United States Patent Application Publication US 2017/0114356 A1 - sequence listing, part 43

SEQ ID NO: 57948 - DNA, 2251 bp, Zea Mays
atgaaatgccatcttcaagtgttcaagctccaccatcagaagggatcaagtaccccactttgagaaagattgctcgagatatcatggcaattccagtcacaactgttgcatctgagtctgtattcagcactgggggaagagtaataagcccacatcgaagtagactagcaccaaaaacagttgaaggattgatgtgtatgcaagcttggtctcgtgctaacatgttaggcgatcaatcctgttttgtgaatgctctaatgacatgtttggaggatgaagaagaagaaatggtaacattgagtttcttaacatttattttcttacttttgatttaatgaatactatcatttaattgtctatttttcttgttaggatgaagcagattctaccatagttgattgaagttgaagcttgaccaagtgatttgtttggaggatgaagaaatggtaacattgagttccttaatatctaatttcttagttttggtttactgaatactaacatttgattgactactttttgctaggatgaagcagattcttgtattctacaatggttgagtgttgctgttggtgcaatattgaattggtctctatgtgttatgttattcctaccgctattggcttggtgtataatgcattaatgctgtggacctgtgaactatttgtgtttgacacataggcatgaacttattctcatatgtatcatgtattcatgttactgctgttattattgtgagactgatgtaatcatgtaatgatgctggtaccatttcagtttgagacatgaatttattgttgcaatgttgctgttttgtctaagattattacctgtgaactgttttttgctgctgggccagtgggccttcacctggcgtcagccggtctgctggtcacagcacgcacacccgacggggacccgaaacccacccgaaacccgacgggtgcgggtgcgggtgtgggatttcacccgcgggtgtggtcgcgggcgggtttgggcttattccgcgggtgcggtcgcgggtgggttttttctccacccgacccgaacccgacccgttgccatctctaccacgagggccacgaccaccaccacccccgccgccgccgcggcaaactgctgctgcccaaccgcgggatggaggtggacgccactgccttctgcccgccgccccagcccgcgcctgccgcctccccggcttcaaagccgcctgcgccggtgctgggcgccggtggagcggtcgcgccggtggcagggcacggccgcggcggagggaggcagtaccgcggcgtccggatgcgcaagtggggcaagtgggtggcggagatccgcgagccgaacaagcggtcgcggatctggctcgggtcctactccaccgccgtcgccgccgcgtgcgcctacgacacggccgtcttctgcctccgcggccgctccgcgcggctcaacttccccgaccagctcgacggcgcggcggtggccgacaaccccgaggacggcgcggggctcacagccgccgccatccgcaagaaggcggccgaggtcggcgcccgcgtcgacgcgctccactgcggcggcggcacctctccgcagccgctgtcgttccatcgccgccgccccaagaaccccgacctcaaccgggagccaaccccggaaacctcagacgacgagtaaagcgcgctgattagggtagctagctagctaggcaggcaggcaggcagcagtagcaagtaaagcaagcaaccaggtggcggcggcgggtccaaacggatgagcgtgggcgggtgcagcgcaaggtgttcggtggaatgcggatgggctcggaggtgtccaataatggagccgcgacgtcgacgtcagggccggaagccgtagtaaagtggaatagcgcgcgggctgtgccgtttgcccggaggcgacggctctagcagtagcaggagacagacgggtgcgtccgtgcctcagtcagtgtgtgcgagcatgttgctcagcaagacggctatgttcatctccccttctcacataaagacgtgtgcaaagaaaaaaaaaagatactgtactacccggcaagcaagatgggcaagagcttcctgaatcttttccttgttaattgctgattttgatttgggttttgaaggcaacatgtgttgtgatcaaatctctgggctctgtttgagacggtggaatttcatggaggtcttcgaatccgacacgaataatttgaattgagaaaaaaaaatccaccgttcaaaat

SEQ ID NO: 57949 - DNA, 2071 bp, Zea Mays
ggttgccgaaccccagtcccccaatcggcgtcggcgcgtgggaatcgtcagaaaaacgcgacgaacagccgaaccggtcacaccgaaagcgcagttgcgaggctgttctccgttgtcacgtttctgcccgcatctcccctccaccgtcctctaggctctagtattctagtcctagtcccccaccggccaccaccaggcaccacgccagccagccccaccactccatccgagtcagagtcttcggctccaagccgccccactgttcctcctcgactccaagcaccgcgccggcagcgtgaggagagggctgtcgcgggccgcccgcaggctcctctgctgcggcagggccgcctccccggaggacctatctgatgaaggaagtggatcattgaggtgggtgttctcattgagagagcttcgatcagcaacaaacagcttcaattacgataacaagattggagaagggccacttgggagtgtgtattggggacaagtttgggatggttctcaggtttctgctccgtacatcttcacccttgctgtgaatttaactttcaactttgttgcctgccacttctcgcccagtcacagttactttacacatgcaaatattttatcggtacctatctcactaaataaccgaacaattacttatacttcttttctttttgttttgggacattgatcttcgattgcgttattattaggttggtaggatatgttgtcattggaagtcaacaaaaaaattatatgaactggctacagagtaatattcttttgaataattgtgagaagtattggtatggtgcttatagacaaataaagtccatctcatcgctgtcaagaggttgaagagtgcaaagaatggcacagaagcggaatttgcttcagaagtcgagatattgggaagaataagacacaaaaacctcctgagttttcgtggatattgtgcggatggacccgaacggattctggtgtatgactttatggcaaactcaagtctctatgcacatcttcatggaccacattctgctgagtgtctccttgactggcggaggagaatatctattgccatcaacactgctcgggctctcttgtaccttcaccactatgcaacacctaagataatccatggaagcatcaagaccaccaatgtgttactggattcagacttccaggcacatgttggcgatttcggtctgataaggtttattcctgatggaatggatcatgaaaagattaccagcgaaagccaacgaggctatcttgctcctgagtacattatgttcggcaaaccaactgcaggttgtgatgtatacagctttggaataatactattggagcttgctagtggcaaaaggccgatagaaaagtcgtgttctgttaagacatatggaattcgaaactgggtgctcccgctggcaaggcagggtagatatgatgaaattgcagactcaaaactgagcgacaagttctctgaatctgaactgagaagaatggtcttagttgggctagcatgtactcattcagaatctgaaaaaagaccaacaatgcttgaagttgtgccgttgctgaaaggcgaatcaaaagaaacccttattaagcttgaaagagatgagttgttcagctcagactcgatggtgagttcacaaggaacaccaaccccagatgggggcacagactctgtgccaaaggaagatcaagaactggttggagcgtgaaatgtgatatgttgctactgtaggcgatggtagaatgcggatttgtgttattggttgatgattggtttgtgcggtttgacatgaatgtaaattgtataggcattgttttctgtaaggaggtatttacccatcccttttgagagattaaggaagagcatgggggctggagatagctgtttatgcgaagtggtttttgtatgcaccgcatagaaaatgcacatgttttttcaggatgtttgtatatttctctgatcaggctgtccacatattaagggtccgtttggttcgtgccttgtttttaaaatctggttctacaatctcattattagccgaacgttttctgattttgc

SEQ ID NO: 57950 - DNA, 1817 bp, Zea Mays
ggttgccgaaccccagtcccccaatcggcgtcggcgcgtgggaatcgtcagaaaaacgcgacgaacagccgaaccggtcacaccgaaagcgcagttgcgaggctgttctccgttgtcacgtttctgcccgcatctcccctccaccgtcctctaggctctagtattctagtcctagtcccccaccggccaccaccaggcaccacgccagccagccccaccactccatccgagtcagagtcttcggctccaagccgccccactgttcctcctcgactccaagcaccgcgccggcagcgtgaggagagggctgtcgcgggccgcccgcaggctcctctgctgcggcagggccgcctccccggaggacctatctgatgaaggaagtggatcattgaggtgggtgttctcattgagagagcttcgatcagcaacaaacagcttcaattacgataacaagattggagaagggccacttgggagtgtgtattggggacaagtttgggatggttctcagagtaatattcttttgaataattgtgagaagtattggtatggtgcttatagacaaataaagtccatctcatcgctgtcaagaggttgaagagtgcaaagaatggcacagaagcggaatttgcttcagaagtcgagatattgggaagaataagacacaaaaacctcctgagttttcgtggatattgtgcggatggacccgaacggattctggtgtatgactttatggcaaactcaagtctctatgcacatcttcatggaccacattctgctgagtgtctccttgactggcggaggagaatatctattgccatcaacactgctcgggctctcttgtaccttcaccactatgcaacacctaagataatccatggaagcatcaagaccaccaatgtgttactggattcagacttccaggcacatgttggcgatttcggtctgataaggtttattcctgatggaatggatcatgaaaagattaccagcgaaagccaacgaggctatcttgctcctgagtacattatgttcggcaaaccaactgcaggttgtgatgtatacagctttggaataatactattggagcttgctagtggcaaaaggccgatagaaaagtcgtgttctgttaagacatatggaattcgaaactgggtgctcccgctggcaaggcagggtagatatgatgaaattgcagactcaaaactgagcgacaagttctctgaatctgaactgagaagaatggtcttagttgggctagcatgtactcattcagaatctgaaaaaagaccaacaatgcttgaagttgtgccgttgctgaaaggcgaatcaaaagaaacccttattaagcttgaaagagatgagttgttcagctcagactcgatggtgagttcacaaggaacaccaaccccagatgggggcacagactctgtgccaaaggaagatcaagaactggttggagcgtgaaatgtgatatgttgctactgtaggcgatggtagaatgcggatttgtgttattggttgatgattggtttgtgcggtttgacatgaatgtaaattgtataggcattgttttctgtaaggaggtatttacccatcccttttgagagattaaggaagagcatgggggctggagatagctgtttatgcgaagtggtttttgtatgcaccgcatagaaaatgcacatgttttttcaggatgtttgtatatttctctgatcaggctgtccacatattaagggtccgtttggttcgtgccttgtttttaaaatctggttctacaatctcattattagccgaacgttttctgattttgc

SEQ ID NO: 57951 - DNA, 2018 bp, Zea Mays
ggttgccgaaccccagtcccccaatcggcgtcggcgcgtgggaatcgtcagaaaaacgcgacgaacagccgaaccggtcacaccgaaagcgcagttgcgaggctgttctccgttgtcacgtttctgcccgcatctcccctccaccgtcctctaggctctagtattctagtcctagtcccccaccggccaccaccaggcaccacgccagccagccccaccactccatccgagtcagagtcttcggctccaagccgccccactgttcctcctcgactccaagcaccgcgccggcagcgtgaggagagggctgtcgcgggccgcccgcaggctcctctgctgcggcagggccgcctccccggaggacctatctgatgaaggaagtggatcattgaggtgggtgttctcattgagagagcttcgatcagcaacaaacagcttcaattacgataacaagattggagaagggccacttgggagtgtgtattggggacaagtttgggatggttctcagagtaatattcttttgaataattgtgagaagtattggtatggtgcttatagacaaataaagtccatctcgtaagtatgctttgttctgtgtctacatttattcttttttacatgtgtagttgtgtccatattttgcagattgagtagctgagaatattgtgacaacgtgtcattccatgcatcaccctgtttccatcttttgtattatataaaactaagttgaaatcaatgcaaccaactgattgactttaccaatcttcattgatccagatcgctgtcaagaggttgaagagtgcaaagaatggcacagaagcggaatttgcttcagaagtcgagatattgggaagaataagacacaaaaacctcctgagttttcgtggatattgtgcggatggacccgaacggattctggtgtatgactttatggcaaactcaagtctctatgcacatcttcatggaccacattctgctgagtgtctccttgactggcggaggagaatatctattgccatcaacactgctcgggctctcttgtaccttcaccactatgcaacacctaagataatccatggaagcatcaagaccaccaatgtgttactggattcagacttccaggcacatgttggcgatttcggtctgataaggtttattcctgatggaatggatcatgaaaagattaccagcgaaagccaacgaggctatcttgctcctgagtacattatgttcggcaaaccaactgcaggttgtgatgtatacagctttggaataatactattggagcttgctagtggcaaaaggccgatagaaaagtcgtgttctgttaagacatatggaattcgaaactgggtgctcccgctggcaaggcagggtagatatgatgaaattgcagactcaaaactgagcgacaagttctctgaatctgaactgagaagaatggtcttagttgggctagcatgtactcattcagaatctgaaaaaagaccaacaatgcttgaagttgtgccgttgctgaaaggcgaatcaaaagaaacccttattaagcttgaaagagatgagttgttcagctcagactcgatggtgagttcacaaggaacaccaaccccagatgggggcacagactctgtgccaaaggaagatcaagaactggttggagcgtgaaatgtgatatgttgctactgtaggcgatggtagaatgcggatttgtgttattggttgatgattggtttgtgcggtttgacatgaatgtaaattgtataggcattgttttctgtaaggaggtatttacccatcccttttgagagattaaggaagagcatgggggctggagatagctgtttatgcgaagtggtttttgtatgcaccgcatagaaaatgcacatgttttttcaggatgtttgtatatttctctgatcaggctgtccacatattaagggtccgtttggttcgtgccttgtttttaaaatctggttctacaatctcattattagccgaacgttttctgattttgc

SEQ ID NO: 57952 - DNA, 1858 bp, Zea Mays
ggttgccgaaccccagtcccccaatcggcgtcggcgcgtgggaatcgtcagaaaaacgcgacgaacagccgaaccggtcacaccgaaagcgcagttgcgaggctgttctccgttgtcacgtttctgcccgcatctcccctccaccgtcctctaggctctagtattctagtcctagtcccccaccggccaccaccaggcaccacgccagccagccccaccactccatccgagtcagagtcttcggctccaagccgccccactgttcctcctcgactccaagcaccgcgccggcagcgtgaggagagggctgtcgcgggccgcccgcaggctcctctgctgcggcagggccgcctccccggaggacctatgtttgggtggttcgtcaggagacaccacggaattccgcgcgcctggctgctcggttcccggcgtttttttcttcgatgttttgaacacgccggatgccacctggaagatctgatgaaggaagtggatcattgaggtgggtgttctcattgagagagcttcgatcagcaacaaacagcttcaattacgataacaagattggagaagggccacttgggagtgtgtattggggacaagtttgggatggttctcagatcgctgtcaagaggttgaagagtgcaaagaatggcacagaagcggaatttgcttcagaagtcgagatattgggaagaataagacacaaaaacctcctgagttttcgtggatattgtgcggatggacccgaacggattctggtgtatgactttatggcaaactcaagtctctatgcacatcttcatggaccacattctgctgagtgtctccttgactggcggaggagaatatctattgccatcaacactgctcgggctctcttgtaccttcaccactatgcaacacctaagataatccatggaagcatcaagaccaccaatgtgttactggattcagacttccaggcacatgttggcgatttcggtctgataaggtttattcctgatggaatggatcatgaaaagattaccagcgaaagccaacgaggctatcttgctcctgagtacattatgttcggcaaaccaactgcaggttgtgatgtatacagctttggaataatactattggagcttgctagtggcaaaaggccgatagaaaagtcgtgttctgttaagacatatggaattcgaaactgggtgctcccgctggcaaggcagggtagatatgatgaaattgcagactcaaaactgagcgacaagttctctgaatctgaactgagaagaatggtcttagttgggctagcatgtactcattcagaatctgaaaaaagaccaacaatgcttgaagttgtgccgttgctgaaaggcgaatcaaaagaaacccttattaagcttgaaagagatgagttgttcagctcagactcgatggtgagttcacaaggaacaccaaccccagatgggggcacagactctgtgccaaaggaagatcaagaactggttggagcgtgaaatgtgatatgttgctactgtaggcgatggtagaatgcggatttgtgttattggttgatgattggtttgtgcggtttgacatgaatgtaaattgtataggcattgttttctgtaaggaggtatttacccatcccttttgagagattaaggaagagcatgggggctggagatagctgtttatgcgaagtggtttttgtatgcaccgcatagaaaatgcacatgttttttcaggatgtttgtatatttctctgatcaggctgtccacatattaagggtccgtttggttcgtgccttgtttttaaaatctggttctacaatctcattattagccgaacgttttctgattttgc

SEQ ID NO: 57953 - DNA, 2130 bp, Zea Mays
gtttgggtggttcgtcaggagacaccacggaattccgcgcgcctggctgctcggttcccggcgtttttttcttcgatgttttgaacacgccggatgccacctggaagatctgatgaaggaagtggatcattgaggtgggtgttctcattgagagagcttcgatcagcaacaaacagcttcaattacgataacaagattggagaagggccacttgggagtgtgtattggggacaagtttgggatggttctcaggtttctgctccgtacatcttcacccttgctgtgaatttaactttcaactttgttgcctgccacttctcgcccagtcacagttactttacacatgcaaatattttatcggtacctatctcactaaataaccgaacaattacttatacttcttttctttttgttttgggacattgatcttcgattgcgttattattaggttggtaggatatgttgtcattggaagtcaacaaaaaaattatatgaactggctacaggtttgcatatctccatcttgtaaataaaaaagaaaaatgcctgcctcaccctgtcatggtggcaactattggacgcgtcttctttaaaattatgattgaggtctcatgttcctgcagagtaatattcttttgaataattgtgagaagtattggtatggtgcttatagacaaataaagtccatctcgtaagtatgctttgttctgtgtctacatttattcttttttacatgtgtagttgtgtccatattttgcagattgagtagctgagaatattgtgacaacgtgtcattccatgcatcaccctgtttccatcttttgtattatataaaactaagttgaaatcaatgcaaccaactgattgactttaccaatcttcattgatccagatcgctgtcaagaggttgaagagtgcaaagaatggcacagaagcggaatttgcttcagaagtcgagatattgggaagaataagacacaaaaacctcctgagttttcgtggatattgtgcggatggacccgaacggattctggtgtatgactttatggcaaactcaagtctctatgcacatcttcatggaccacattctgctgagtgtctccttgactggcggaggagaatatctattgccatcaacactgctcgggctctcttgtaccttcaccactatgcaacacctaagataatccatggaagcatcaagaccaccaatgtgttactggattcagacttccaggcacatgttggcgatttcggtctgataaggtttattcctgatggaatggatcatgaaaagattaccagcgaaagccaacgaggctatcttgctcctgagtacattatgttcggcaaaccaactgcaggttgtgatgtatacagctttggaataatactattggagcttgctagtggcaaaaggccgatagaaaagtcgtgttctgttaagacatatggaattcgaaactgggtgctcccgctggcaaggcagggtagatatgatgaaattgcagactcaaaactgagcgacaagttctctgaatctgaactgagaagaatggtcttagttgggctagcatgtactcattcagaatctgaaaaaagaccaacaatgcttgaagttgtgccgttgctgaaaggcgaatcaaaagaaacccttattaagcttgaaagagatgagttgttcagctcagactcgatggtgagttcacaaggaacaccaaccccagatgggggcacagactctgtgccaaaggaagatcaagaactggttggagcgtgaaatgtgatatgttgctactgtaggcgatggtagaatgcggatttgtgttattggttgatgattggtttgtgcggtttgacatgaatgtaaattgtataggcattgttttctgtaaggaggtatttacccatcccttttgagagattaaggaagagcatgggggctggagatagctgtttatgcgaagtggtttttgtatgcaccgcatagaaaatgcacatgttttttcaggatgtttgtatatttctctgatcaggctgtccacatattaagggtccgtttggttcgtgccttgtttttaaaatctggttctacaatctcattattagccgaacgttttctgattttgc

SEQ ID NO: 57954 - DNA, 1586 bp, Zea Mays
aattccgcgcgcctggctgctcggttcccggcgtttttttcttcgatgttttgaacacgccggatgccacctggaagatctgatgaaggaagtggatcattgaggtgggtgttctcattgagagagcttcgatcagcaacaaacagcttcaattacgataacaagattggagaagggccacttgggagtgtgtattggggacaagtttgggatggttctcaggttggtaggatatgttgtcattggaagtcaacaaaaaaattatatgaactggctacagagtaatattcttttgaataattgtgagaagtattggtatggtgcttatagacaaataaagtccatctcatcgctgtcaagaggttgaagagtgcaaagaatggcacagaagcggaatttgcttcagaagtcgagatattgggaagaataagacacaaaaacctcctgagttttcgtggatattgtgcggatggacccgaacggattctggtgtatgactttatggcaaactcaagtctctatgcacatcttcatggaccacattctgctgagtgtctccttgactggcggaggagaatatctattgccatcaacactgctcgggctctcttgtaccttcaccactatgcaacacctaagataatccatggaagcatcaagaccaccaatgtgttactggattcagacttccaggcacatgttggcgatttcggtctgataaggtttattcctgatggaatggatcatgaaaagattaccagcgaaagccaacgaggctatcttgctcctgagtacattatgttcggcaaaccaactgcaggttgtgatgtatacagctttggaataatactattggagcttgctagtggcaaaaggccgatagaaaagtcgtgttctgttaagacatatggaattcgaaactgggtgctcccgctggcaaggcagggtagatatgatgaaattgcagactcaaaactgagcgacaagttctctgaatctgaactgagaagaatggtcttagttgggctagcatgtactcattcagaatctgaaaaaagaccaacaatgcttgaagttgtgccgttgctgaaaggcgaatcaaaagaaacccttattaagcttgaaagagatgagttgttcagctcagactcgatggtgagttcacaaggaacaccaaccccagatgggggcacagactctgtgccaaaggaagatcaagaactggttggagcgtgaaatgtgatatgttgctactgtaggcgatggtagaatgcggatttgtgttattggttgatgattggtttgtgcggtttgacatgaatgtaaattgtataggcattgttttctgtaaggaggtatttacccatcccttttgagagattaaggaagagcatgggggctggagatagctgtttatgcgaagtggtttttgtatgcaccgcatagaaaatgcacatgttttttcaggatgtttgtatatttctctgatcaggctgtccacatattaagggtccgtttggttcgtgccttgtttttaaaatctggttctacaatctcattattagccgaacgttttctgattttgc

SEQ ID NO: 57955 - DNA, 2436 bp, Zea Mays
tgcttacccaagcgtgtctctctccctggcctcaatctccagccgccactcactaggagatcttctccttcacgccacctaacgtgccatcgtcttcacccggccgtcgtccaccctgccttctccagcttgcgccaaacgtgcgctctttgtgccgccttcgtgacctcccctagctcggccatggatgtcgcgccgcccttctcctatctctctgctcgaccgtgcctcttcttccttgagccacgcccggtgctcctccaccaagcctcgtcggcatgctctcctggcagcggtcggatctggcctcctgcttcccctctagtacgctctcgcttccagctcgttgtgcctctgtactggagttcgccggacagtgcccttgctcggcttctccaatgcgccctaccgccagcacccctctcttggtcatcccttcccctgcgcatgcgctgggcgtgtctcccagccgccagctcggctcctcgcttcaaccgtagacctggtactcctcccgtcgtgcctgtcctctgtgcgcacgcgccatcgccttctctagccattgtgctcggccgatgactcacttcgtgccactcaggggtggatctacgaccggggctgcctgggctgcagccccggtcgcggccagtaaagcgaataggctcatcacgcgtgacagcccagctctgcatccagccgcctagctctagccgtgtccagtccgtgctgtgattctgtgagcatttttcctaccctaaaccagctgccgccgccgcccgccagccgtggaggagccacccagacacccaccgcctacggcccgccgccgcagcacgcagcgctgctagcttggaggccgcagccagcccaccgccgcagcacgcagcgctgctcgcttggaggccggagccagaccgccggacggccggagcctcggagcaccgccgccggcccgccgccgcagcacgcagcgctgctcgcttggaggccggagccagaccgtcggacgcccggaggcccagaggccggagctagaccgccggacggccggagcccggaggcccagagcactgccgcagcaatggctgaactaccaaagtgtacactgctagtatttgctaatgatcggattcggagctgcacgtttcagaagggaatatagtagctcaagttgataggccatatatggctgaggacaatctggaagcatcgacatgacgccacctcatcgctcgcggaacgcgtggttagttgatggattaatcctgtatccgccactggtgccactgcttcggtgattgcactcagtcctgcgatgtcgacccatctcagttgtcctccagccctaccgtacgcctcgtgttgtcgatggcagcccatgacttcaacatcgacatataccaagagtcggcaattgcatgtgtgtgtggtggtttggtgaagatggagctatggacggagtagagagtgaatcccagttcgacgctcgtgacgaaaaaccaaatccaagaattattggcattcttgcgaattttgagccaggttatttgtgcggagtcccgatgtgtcgctcgccaagggcttgataaaacgactgaaccagaaatccattgccattcttgtgatatcgtgtcgacttggtcttggtaagaaaaattattgtttgtgttagttcggctgatgaatggagtaactagatatcttagttgtgagcattgatatggtcgcaatcgtgattggcaaatcagcatttttgtcgtgtaagctaagtttatgtttgaagatttaggttatgcgatagggattaaattggtgtttcgtatccaatgtgtcacacgcgtatccaatgtgtcacacctggatccaagacccggacgcgaacataaacaccaagtgtgctgagaccaagtctcacacatatgatgactcatggtatagaaacgaatgttacatcatttatatataacatagttctatacaaaatagttaaataattacatcatatgaagacaatgattcagtaacccaaagttgattgagagacgatggtctagacctctcacgatctcatcgcagcattctccatgcgcctcatcctggggtacctgttcttgacctgtgtgggttgagacagcaagggtgatctcacatacattcatcgcttaacaagttgtggggaatgtgtatgaactcaccaaaggtgggagctcatgtaaagtgtaaggcttaccaaagaggatgattaaagctgagcattgcttttaaagttggtcaaaattttattagcggttactaagtataagtagatatcaacccaattaaataagagatcaagattaataacaacacccacgatgcaatgcatatgataaattaagtttagttccataaattaatcatatgagtgtcccagccgctcattaccgtgagcatgag

SEQ ID NO: 57956 - DNA, 2523 bp, Zea Mays
tgcttacccaagcgtgtctctctccctggcctcaatctccagccgccactcactaggagatcttctccttcacgccacctaacgtgccatcgtcttcacccggccgtcgtccaccctgccttctccagcttgcgccaaacgtgcgctctttgtgccgccttcgtgacctcccctagctcggccatggatgtcgcgccgcccttctcctatctctctgctcgaccgtgcctcttcttccttgagccacgcccggtgctcctccaccaagcctcgtcggcatgctctcctggcagcggtcggatctggcctcctgcttcccctctagtacgctctcgcttccagctcgttgtgcctctgtactggagttcgccggacagtgcccttgctcggcttctccaatgcgccctaccgccagcacccctctcttggtcatcccttcccctgcgcatgcgctgggcgtgtctcccagccgccagctcggctcctcgcttcaaccgtagacctggtactcctcccgtcgtgcctgtcctctgtgcgcacgcgccatcgccttctctagccattgtgctcggccgatgactcacttcgtgccactcaggggtggatctacgaccggggctgcctgggctgcagccccggtcgcggccagtaaagcgaataggctcatcacgcgtgacagcccagctctgcatccagccgcctagctctagccgtgtccagtccgtgctgtgattctgtgagcatttttcctaccctaaaccagctgccgccgccgcccgccagccgtggaggagccacccagacacccaccgcctacggcccgccgccgcagcacgcagcgctgctagcttggaggccgcagccagcccaccgccgcagcacgcagcgctgctcgcttggaggccggagccagaccgccggacggccggagcctcggagcaccgccgccggcccgccgccgcagcacgcagcgctgctcgcttggaggccggagccagaccgtcggacgcccggaggcccagaggccggagctagaccgccggacggccggagcccggaggcccagagcactgccgcagcaatggctgaactaccaaagtgtacactgctagtatttgctaatgatcggattcggagctgcacgtttcagaagggaatatagtagctcaagttgataggccatatatggctgaggacaatctggaagcatcgacatgacgccacctcatcgctcgcggaacgcgtgattaatcctgtatccgccactggtgccactgcttcggtgattgcactcagtcctgcgatgtcgacccatctcagttgtcctccagccctaccgtacgcctcgtgttgtcgatggcagcccatgacttcaacatcgacatataccaagagtcggcaattgcatgtgtgtgtggtggtttggtgaagatggagctatggacggagtagagagtgaatcccagttcgacgctcgtgacgaaaaaccaaatccaagaattattggcattcttgcgaattttgagccaggttatttgtggtgagctctcttgcttgttttccagttgtcgttaacaccatgacacttgctgctgaccccagattgctcatgtgtgtgatttttgtggtgggatgaaagcggagtcccgatgtgtcgctcgccaagggcttgataaaacgactgaaccagaaatccattgccattcttgtgatatcgtgtcgacttggtcttggtaagaaaaattattgtttgtgttagttcggctgatgaatggagtaactagatatcttagttgtgagcattgatatggtcgcaatcgtgattggcaaatcagcatttttgtcgtgtaagctaagtttatgtttgaagatttaggttatgcgatagggattaaattggtgtttcgtatccaatgtgtcacacgcgtatccaatgtgtcacacctggatccaagacccggacgcgaacataaacaccaagtgtgctgagaccaagtctcacacatatgatgactcatggtatagaaacgaatgttacatcatttatatataacatagttctatacaaaatagttaaataattacatcatatgaagacaatgattcagtaacccaaagttgattgagagacgatggtctagacctctcacgatctcatcgcagcattctccatgcgcctcatcctggggtacctgttcttgacctgtgtgggttgagacagcaagggtgatctcacatacattcatcgcttaacaagttgtggggaatgtgtatgaactcaccaaaggtgggagctcatgtaaagtgtaaggcttaccaaagaggatgattaaagctgagcattgcttttaaagttggtcaaaattttattagcggttactaagtataagtagatatcaacccaattaaataagagatcaagattaataacaacacccacgatgcaatgcatatgataaattaagtttagttccataaattaatcatatgagtgtcccagccgctcattaccgtgagcatgag

SEQ ID NO: 57957 - DNA, 2386 bp, Zea Mays
tgcttacccaagcgtgtctctctccctggcctcaatctccagccgccactcactaggagatcttctccttcacgccacctaacgtgccatcgtcttcacccggccgtcgtccaccctgccttctccagcttgcgccaaacgtgcgctctttgtgccgccttcgtgacctcccctagctcggccatggatgtcgcgccgcccttctcctatctctctgctcgaccgtgcctcttcttccttgagccacgcccggtgctcctccaccaagcctcgtcggcatgctctcctggcagcggtcggatctggcctcctgcttcccctctagtacgctctcgcttccagctcgttgtgcctctgtactggagttcgccggacagtgcccttgctcggcttctccaatgcgccctaccgccagcacccctctcttggtcatcccttcccctgcgcatgcgctgggcgtgtctcccagccgccagctcggctcctcgcttcaaccgtagacctggtactcctcccgtcgtgcctgtcctctgtgcgcacgcgccatcgccttctctagccattgtgctcggccgatgactcacttcgtgccactcaggggtggatctacgaccggggctgcctgggctgcagccccggtcgcggccagtaaagcgaataggctcatcacgcgtgacagcccagctctgcatccagccgcctagctctagccgtgtccagtccgtgctgtgattctgtgagcatttttcctaccctaaaccagctgccgccgccgcccgccagccgtggaggagccacccagacacccaccgcctacggcccgccgccgcagcacgcagcgctgctagcttggaggccgcagccagcccaccgccgcagcacgcagcgctgctcgcttggaggccggagccagaccgccggacggccggagcctcggagcaccgccgccggcccgccgccgcagcacgcagcgctgctcgcttggaggccggagccagaccgtcggacgcccggaggcccagaggccggagctagaccgccggacggccggagcccggaggcccagagcactgccgcagcaatggctgaactaccaaagtgtacactgctagtatttgctaatgatcggattcggagctgcacgtttcagaagggaatatagtagctcaagttgataggccatatatggctgaggacaatctggaagcatcgacatgacgccacctcatcgctcgcggaacgcgtggttagttgatggtcctgcgatgtcgacccatctcagttgtcctccagccctaccgtacgcctcgtgttgtcgatggcagcccatgacttcaacatcgacatataccaagagtcggcaattgcatgtgtgtgtggtggtttggtgaagatggagctatggacggagtagagagtgaatcccagttcgacgctcgtgacgaaaaaccaaatccaagaattattggcattcttgcgaattttgagccaggttatttgtgcggagtcccgatgtgtcgctcgccaagggcttgataaaacgactgaaccagaaatccattgccattcttgtgatatcgtgtcgacttggtcttggtaagaaaaattattgtttgtgttagttcggctgatgaatggagtaactagatatcttagttgtgagcattgatatggtcgcaatcgtgattggcaaatcagcatttttgtcgtgtaagctaagtttatgtttgaagatttaggttatgcgatagggattaaattggtgtttcgtatccaatgtgtcacacgcgtatccaatgtgtcacacctggatccaagacccggacgcgaacataaacaccaagtgtgctgagaccaagtctcacacatatgatgactcatggtatagaaacgaatgttacatcatttatatataacatagttctatacaaaatagttaaataattacatcatatgaagacaatgattcagtaacccaaagttgattgagagacgatggtctagacctctcacgatctcatcgcagcattctccatgcgcctcatcctggggtacctgttcttgacctgtgtgggttgagacagcaagggtgatctcacatacattcatcgcttaacaagttgtggggaatgtgtatgaactcaccaaaggtgggagctcatgtaaagtgtaaggcttaccaaagaggatgattaaagctgagcattgcttttaaagttggtcaaaattttattagcggttactaagtataagtagatatcaacccaattaaataagagatcaagattaataacaacacccacgatgcaatgcatatgataaattaagtttagttccataaattaatcatatgagtgtcccagccgctcattaccgtgagcatgag

SEQ ID NO: 57958 - DNA, 2374 bp, Zea Mays
tgcttacccaagcgtgtctctctccctggcctcaatctccagccgccactcactaggagatcttctccttcacgccacctaacgtgccatcgtcttcacccggccgtcgtccaccctgccttctccagcttgcgccaaacgtgcgctctttgtgccgccttcgtgacctcccctagctcggccatggatgtcgcgccgcccttctcctatctctctgctcgaccgtgcctcttcttccttgagccacgcccggtgctcctccaccaagcctcgtcggcatgctctcctggcagcggtcggatctggcctcctgcttcccctctagtacgctctcgcttccagctcgttgtgcctctgtactggagttcgccggacagtgcccttgctcggcttctccaatgcgccctaccgccagcacccctctcttggtcatcccttcccctgcgcatgcgctgggcgtgtctcccagccgccagctcggctcctcgcttcaaccgtagacctggtactcctcccgtcgtgcctgtcctctgtgcgcacgcgccatcgccttctctagccattgtgctcggccgatgactcacttcgtgccactcaggggtggatctacgaccggggctgcctgggctgcagccccggtcgcggccagtaaagcgaataggctcatcacgcgtgacagcccagctctgcatccagccgcctagctctagccgtgtccagtccgtgctgtgattctgtgagcatttttcctaccctaaaccagctgccgccgccgcccgccagccgtggaggagccacccagacacccaccgcctacggcccgccgccgcagcacgcagcgctgctagcttggaggccgcagccagcccaccgccgcagcacgcagcgctgctcgcttggaggccggagccagaccgccggacggccggagcctcggagcaccgccgccggcccgccgccgcagcacgcagcgctgctcgcttggaggccggagccagaccgtcggacgcccggaggcccagaggccggagctagaccgccggacggccggagcccggaggcccagagcactgccgcagcaatggctgaactaccaaagtgtacactgctagtatttgctaatgatcggattcggagctgcacgtttcagaagggaatatagtagctcaagttgataggccatatatggctgaggacaatctggaagcatcgacatgacgccacctcatcgctcgcggaacgcgtgtcctgcgatgtcgacccatctcagttgtcctccagccctaccgtacgcctcgtgttgtcgatggcagcccatgacttcaacatcgacatataccaagagtcggcaattgcatgtgtgtgtggtggtttggtgaagatggagctatggacggagtagagagtgaatcccagttcgacgctcgtgacgaaaaaccaaatccaagaattattggcattcttgcgaattttgagccaggttatttgtgcggagtcccgatgtgtcgctcgccaagggcttgataaaacgactgaaccagaaatccattgccattcttgtgatatcgtgtcgacttggtcttggtaagaaaaattattgtttgtgttagttcggctgatgaatggagtaactagatatcttagttgtgagcattgatatggtcgcaatcgtgattggcaaatcagcatttttgtcgtgtaagctaagtttatgtttgaagatttaggttatgcgatagggattaaattggtgtttcgtatccaatgtgtcacacgcgtatccaatgtgtcacacctggatccaagacccggacgcgaacataaacaccaagtgtgctgagaccaagtctcacacatatgatgactcatggtatagaaacgaatgttacatcatttatatataacatagttctatacaaaatagttaaataattacatcatatgaagacaatgattcagtaacccaaagttgattgagagacgatggtctagacctctcacgatctcatcgcagcattctccatgcgcctcatcctggggtacctgttcttgacctgtgtgggttgagacagcaagggtgatctcacatacattcatcgcttaacaagttgtggggaatgtgtatgaactcaccaaaggtgggagctcatgtaaagtgtaaggcttaccaaagaggatgattaaagctgagcattgcttttaaagttggtcaaaattttattagcggttactaagtataagtagatatcaacccaattaaataagagatcaagattaataacaacacccacgatgcaatgcatatgataaattaagtttagttccataaattaatcatatgagtgtcccagccgctcattaccgtgagcatgag

SEQ ID NO: 57959 - DNA, 2617 bp, Zea Mays
gattaaacaattctgaaacacaaagtaggggcctcttcgcaaatcccaccagcaccaccgccttcgcctccgaccgcctcccagatccgctcgcccggccgccgtcgtcttcctggtccgcctctgcggcagtgagattcctcgccgccccgccctggattccgtcgagaggatcgtcgaggacttcgcgatggacctcgccatcaaccccttctcctccggcacccgccttcgggacatgatacgtgcgatacgcgcgtgcaagacggcagcggaggagcgtgccgtggtgcggcgggagtgcgcggcgatacgggccgccatcagcgagggcgaccaggactaccggcatcggaacatggccaagcttatgttcatccacatgctcggttaccccacacacttcgggcagatggagtgcctcaagcttattgctgcggcgggcttccccgagaagcgcatcggctatctaggactcatgcttctgctcgacgagcggcaggaggtcctcatgctcgtcaccaactctctcaagcaagatcttaaccactcaaaccagttcattgttgggcttgcgctctgtgcccttggcaacatatgttctgctgaaatggcacgcgatctggctcctgaagtggagagactgttgcaaaatagggaccctaatacaaagaagaaggctgctttatgctctataaggattgtgcgaaaagttccagacttggcggaaaatttcatgagtgctgctgcatcattactgaaggaaaaacatcatggtgttctgatatctgccgttcagctttgcatggaactatgtaaagccagccatgaagcattggagtacttgaggaagaattgccttgaaggactggtccgaatactgagagatgtctccaacagttcatatgctcctgaatacgacatcggtggcatcacagatccattcttacatatccgagtgcttaaactcatgcgaatactgggtcaaggagatgcagattgcagcgagtatatcaatgatattcttgctcaggtttcaacaaaaactgagtcaaataagaatgctggaaatgctattttatatgaatgcgtggagacaataatgggcattgaagctacaagtggtttacgtgtgttggcaattaatattttgggtcgttttttgtccaaccgtgataacaacataagatatgttgccctaaacatgcttatgaaggccattgccgtggacacacaagcggtgcagaggcacagggcaacaattttagagtgcgtcaaggatgcagatgtctctattcgtaaaagagccctagaacttgtttatctacttgtcaatgatacaaatgtaaagccattgactaaggaacttgttgattaccttgaagtgagtgatcaagatttcaaggaagacctcactgctaaaatatgctcaatagttgaaaagttttccctggacaagctatggtacttagaccagatgttcagagttttgtctctggctggtaattatgtaaaggatgatgtatggcatgctcttatagttctaatgagtaatgcatctgaacttcaaggatattcaatcaggtcattatataaggcattgcaagcatctggtgaacaggaaagtttagttagggtggccatttggtgcattggtgaatatggagaaatgctggtcaacaatcttagtatgttagacatggaggaaccgatcacggtaactgaatctgatgctgtggatgccgtagagattgctcttcagcgttactcggcggatgttactaccagggctatgtgtcttgtctctcttttgaagctttcttcccggtttccaccaacatcagagagaataaaagaaatagttgcgcaaaataaagggaatactgtgcttgaattgcagcaaagatctattgaattcagttccattatacaaagacatcagtcgataaaatcatctttgcttgaacgtatgcctgcattggatgaagcaaattatttggtgaagagagctgcttctacacaggctgcagtttcatctgtaaattctgctcctgcagtcacttctggaggcccacttaagcttccaaatggcgtagcaaagccaccaccagctcctttagctgatttgcttgatttgggttctgatgatgctccagtgactacttcggcccctactacatcacctaatgattttctacaggatctgttgggcatcggtttgactgattcgtctcctataggtggagctccgtctacaagcactgacattctgatggatcttctatctattggttcatctcctgtacaaaatggcccaccaacgtcaaactttagccttcctggcatagagactaaacctccccctgttacacctcaagttgtggatcttcttgatggtttgtcctcaagcacatctcttcctgatgagaatgcagcttacccgacaatcacagcattccagagtgcaaccttgaggatcacattcagtttcaaaaagcaacctggaaaacctcaggagactacaattaatgcttctttcacaaatttagcaactactgcattaacagatttcgtcttccaggcagccgtgccaaaggatggaaacccttatatggtg

SEQ ID NO: 57960 - DNA, 3313 bp, Zea Mays
gattaaacaattctgaaacacaaagtaggggcctcttcgcaaatcccaccagcaccaccgccttcgcctccgaccgcctcccagatccgctcgcccggccgccgtcgtcttcctggtccgcctctgcggcagtgagattcctcgccgccccgccctggattccgtcgagaggatcgtcgaggacttcgcgatggacctcgccatcaaccccttctcctccggcacccgccttcgggacatgatacgtgcgatacgcgcgtgcaagacggcagcggaggagcgtgccgtggtgcggcgggagtgcgcggcgatacgggccgccatcagcgagggcgaccaggactaccggcatcggaacatggccaagcttatgttcatccacatgctcggttaccccacacacttcgggcagatggagtgcctcaagcttattgctgcggcgggcttccccgagaagcgcatcggctatctaggactcatgcttctgctcgacgagcggcaggaggtcctcatgctcgtcaccaactctctcaagcaatcttaaccactcaaaccagttcattgttgggcttgcgctctgtgcccttggcaacatatgttctgctgaaatggcacgcgatctggctcctgaagtggagagactgttgcaaaatagggaccctaatacaaagaagaaggctgctttatgctctataaggattgtgcgaaaagttccagacttggcggaaaatttcatgagtgctgctgcatcattactgaaggaaaaacatcatggtgttctgatatctgccgttcagctttgcatggaactatgtaaagccagccatgaagcattggagtacttgaggaagaattgccttgaaggactggtccgaatactgagagatgtctccaacagttcatatgctcctgaatacgacatcggtggcatcacagatccattcttacatatccgagtgcttaaactcatgcgaatactgggtcaaggagatgcagattgcagcgagtatatcaatgatattcttgctcaggtttcaacaaaaactgagtcaaataagaatgctggaaatgctattttatatgaatgcgtggagacaataatgggcattgaagctacaagtggtttacgtgtgttggcaattaatattttgggtcgttttttgtccaaccgtgataacaacataagatatgttgccctaaacatgcttatgaaggccattgccgtggacacacaagcggtgcagaggcacagggcaacaattttagagtgcgtcaaggatgcagatgtctctattcgtaaaagagccctagaacttgtttatctacttgtcaatgatacaaatgtaaagccattgactaaggaacttgttgattaccttgaagtgagtgatcaagatttcaaggaagacctcactgctaaaatatgctcaatagttgaaaagttttccctggacaagctatggtacttagaccagatgttcagagttttgtctctggctggtaattatgtaaaggatgatgtatggcatgctcttatagttctaatgagtaatgcatctgaacttcaaggatattcaatcaggtcattatataaggcattgcaagcatctggtgaacaggaaagtttagttagggtggccatttggtgcattggtgaatatggagaaatgctggtcaacaatcttagtatgttagacatggaggaaccgatcacggtaactgaatctgatgctgtggatgccgtagagattgctcttcagcgttactcggcggatgttactaccagggctatgtgtcttgtctctcttttgaagctttcttcccggtttccaccaacatcagagagaataaaagaaatagttgcgcaaaataaagggaatactgtgcttgaattgcagcaaagatctattgaattcagttccattatacaaagacatcagtcgataaaatcatctttgcttgaacgtatgcctgcattggatgaagcaaattatttggtgaagagagctgcttctacacaggctgcagtttcatctgtaaattctgctcctgcagtcacttctggaggcccacttaagcttccaaatggcgtagcaaagccaccaccagctcctttagctgatttgcttgatttgggttctgatgatgctccagtgactacttcggcccctactacatcacctaatgattttctacaggatctgttgggcatcggtttgactgattcgtctcctataggtggagctccgtctacaagcactgacattctgatggatcttctatctattggttcatctcctgtacaaaatggcccaccaacgtcaaactttagccttcctggcatagagactaaacctccccctgttacacctcaagttgtggatcttcttgatggtttgtcctcaagcacatctcttcctgatgagaatgcagcttacccgacaatcacagcattccagagtgcaaccttgaggatcacattcagtttcaaaaagcaacctggaaaacctcaggagactacaattaatgcttctttcacaaatttagcaactactgcattaacagatttcgtcttccaggcagccgtgccaaagttcatccagttgcgtttggacccagctagcagcagcactcttcctgccagtggaaatgtgtcagtcacacaaagcctcagtgtcactaacaaccaacatgggcagaaaccacttgcaatgcgtatccggatgtcttacaaagtgaatggtgaagacaggctggagcaagggcaaatcagcaactttccttctgggttgtagtgccacctgtgtctatggggttggggttgctctttcagcgtgctacaggcaaggcgtttgtattcttgttcttgaacattttcacttctgcttgcctgctaatgagtttgtacactggtagttggttttggtcgcccattctctctttatatatagtgtacagtagatggcagcgattaatgatatatcctaccaaaattttcaaccttaggctatctccagcagcctccctgttcttctcacttcttatttcaaactccactcttgtaaacagtatcgcctacagtacaaaacagtgttttgcacgctcgtgagatggccttatgctcccatacacagaaggaatgtgttgtatcgcgattttcctgatgtaattatttatttttctaatcaagctcgtacaggcttattgtgcacagacaaattaattgtttttcatgtgcgttcctttaggttcagacatatttggaataccagactcccccaattcttgccaaaaaataggcagttatcaaata

SEQ ID NO: 57961 - DNA, 3163 bp, Zea Mays
gattaaacaattctgaaacacaaagtaggggcctcttcgcaaatcccaccagcaccaccgccttcgcctccgaccgcctcccagatccgctcgcccggccgccgtcgtcttcctggtccgcctctgcggcagtgagattcctcgccgccccgccctggattccgtcgagaggatcgtcgaggacttcgcgatggacctcgccatcaaccccttctcctccggcacccgccttcgggacatgatacgtgcgatacgcgcgtgcaagacggcagcggaggagcgtgccgtggtgcggcgggagtgcgcggcgatacgggccgccatcagcgagggcgaccaggactaccggcatcggaacatggccaagcttatgttcatccacatgctcggttaccccacacacttcgggcagatggagtgcctcaagcttattgctgcggcgggcttccccgagaagcgcatcggctatctaggactcatgcttctgctcgacgagcggcaggaggtcctcatgctcgtcaccaactctctcaagcaagatcttaaccactcaaaccagttcattgttgggcttgcgctctgtgcccttggcaacatatgttctgctgaaatggcacgcgatctggctcctgaagtggagagactgttgcaaaatagggaccctaatacaaagaagaaggctgctttatgctctataaggattgtgcgaaaagttccagacttggcggaaaatttcatgagtgctgctgcatcattactgaaggaaaaacatcatggtgttctgatatctgccgttcagctttgcatggaactatgtaaagccagccatgaagcattggagtacttgaggaagaattgccttgaaggactggtccgaatactgagagatgtctccaacagttcatatgctcctgaatacgacatcggtggcatcacagatccattcttacatatccgagtgcttaaactcatgcgaatactgggtcaaggagatgcagattgcagcgagtatatcaatgatattcttgctcaggtttcaacaaaaactgagtcaaataagaatgctggaaatgctattttatatgaatgcgtggagacaataatgggcattgaagctacaagtggtttacgtgtgttggcaattaatattttgggtcgttttttgtccaaccgtgataacaacataagatatgttgccctaaacatgcttatgaaggccattgccgtggacacacaagcggtgcagaggcacagggcaacaattttagagtgcgtcaaggatgcagatgtctctattcgtaaaagagccctagaacttgtttatctacttgtcaatgatacaaatgtaaagccattgactaaggaacttgttgattaccttgaagtgagtgatcaagatttcaaggaagacctcactgctaaaatatgctcaatagttgaaaagttttccctggacaagctatggtacttagaccagatgttcagagttttgtctctggctggtaattatgtaaaggatgatgtatggcatgctcttatagttctaatgagtaatgcatctgaacttcaaggatattcaatcaggtcattatataaggcattgcaagcatctggtgaacagttagggtggccatttggtgcattggtgaatatggagaaatgctggtcaacaatcttagtatgttagacatggaggaaccgatcacggtaactgaatctgatgctgtggatgccgtagagattgctcttcagcgttactcggcggatgttactaccagggctatgtgtcttgtctctcttttgaagctttcttcccggtttccaccaacatcagagagaataaaagaaatagttgcgcaaaataaagggaatactgtgcttgaattgcagcaaagatctattgaattcagttccattatacaaagacatcagtcgataaagtgagtggcagattctgcaattattgaggatcattttgtattccatagtttgtcaaagtgaggataatgctggtgtatgcgcagatcatctttgcttgaacgtatgcctgcattggatgaagcaaattatttggtgaagagagctgcttctacacaggctgcagtttcatctgtaaattctgctcctgcagtcacttctggaggcccacttaagcttccaaatggcgtagcaaagccaccaccagctcctttagctgatttgcttgatttgggttctgatgatgctccagtgactacttcggcccctactacatcacctaatgattttctacaggatctgttgggcatcggtttgactgattcgtctcctataggtggagctccgtctacaagcactgacattctgatggatcttctatctattggttcatctcctgtacaaaatggcccaccaacgtcaaactttagccttcctggcatagagactaaacctccccctgttacacctcaagttgtggatcttcttgatggtttgtcctcaagcacatctcttcctgatgagaatgcagcttacccgacaatcacagcattccagagtgcaaccttgaggatcacattcagtttcaaaaagcaacctggaaaacctcaggagactacaattaatgcttctttcacaaatttagcaactactgcattaacagatttcgtcttccaggcagccgtgccaaagttcatccagttgcgtttggacccagctagcagcagcactcttcctgccagtggaaatgtgtcagtcacacaaagcctcagtgtcactaacaaccaacatgggcagaaaccacttgcaatgcgtatccggatgtcttacaaagtgaatggtgaagacaggctggagcaagggcaaatcagcaactttccttctgggttgtagtgccacctgtgtctatggggttggggttgctctttcagcgtgctacagtatcgcctacagtacaaaacagtgttttgcacgctcgtgagatggccttatgctcccatacacagaaggaatgtgttgtatcgcgattttcctgatgtaattatttatttttctaatcaagctcgtacaggcttattgtgcacagacaaattaattgtttttcatgtgcgttcctttaggttcagacatatttggaataccagactcccccaattcttgccaaaaaataggcagttatcaaata

SEQ ID NO: 57962 - DNA, 3305 bp, Zea Mays
gattaaacaattctgaaacacaaagtaggggcctcttcgcaaatcccaccagcaccaccgccttcgcctccgaccgcctcccagatccgctcgcccggccgccgtcgtcttcctggtccgcctctgcggcagtgagattcctcgccgccccgccctggattccgtcgagaggatcgtcgaggacttcgcgatggacctcgccatcaaccccttctcctccggcacccgccttcgggacatgatacgtgcgatacgcgcgtgcaagacggcagcggaggagcgtgccgtggtgcggcgggagtgcgcggcgatacgggccgccatcagcgagggcgaccaggactaccggcatcggaacatggccaagcttatgttcatccacatgctcggttaccccacacacttcgggcagatggagtgcctcaagcttattgctgcggcgggcttccccgagaagcgcatcggctatctaggactcatgcttctgctcgacgagcggcaggaggtcctcatgctcgtcaccaactctctcaagcaagatcttaaccactcaaaccagttcattgttgggcttgcgctctgtgcccttggcaacatatgttctgctgaaatggcacgcgatctggctcctgaagtggagagactgttgcaaaatagggaccctaatacaaagaagaaggctgctttatgctctataaggattgtgcgaaaagttccagacttggcggaaaatttcatgagtgctgctgcatcattactgaaggaaaaacatcatggtgttctgatatctgccgttcagctttgcatggaactatgtaaagccagccatgaagcattggagtacttgaggaagaattgccttgaaggactggtccgaatactgagagatgtctccaacagttcatatgctcctgaatacgacatcggtggcatcacagatccattcttacatatccgagtgcttaaactcatgcgaatactgggtcaaggagatgcagattgcagcgagtatatcaatgatattcttgctcaggtttcaacaaaaactgagtcaaataagaatgctggaaatgctattttatatgaatgcgtggagacaataatgggcattgaagctacaagtggtttacgtgtgttggcaattaatattttgggtcgttttttgtccaaccgtgataacaacataagatatgttgccctaaacatgcttatgaaggccattgccgtggacacacaagcggtgcagaggcacagggcaacaattttagagtgcgtcaaggatgcagatgtctctattcgtaaaagagccctagaacttgtttatctacttgtcaatgatacaaatgtaaagccattgactaaggaacttgttgattaccttgaagtgagtgatcaagatttcaaggaagacctcactgctaaaatatgctcaatagttgaaaagttttccctggacaagctatggtacttagaccagatgttcagagttttgtctctggctggtaattatgtaaaggatgatgtatggcatgctcttatagttctaatgagtaatgcatctgaacttcaaggatattcaatcaggtcattatataaggcattgcaagcatctggtgaacagttagggtggccatttggtgcattggtgaatatggagaaatgctggtcaacaatcttagtatgttagacatggaggaaccgatcacggtaactgaatctgatgctgtggatgccgtagagattgctcttcagcgttactcggcggatgttactaccagggctatgtgtcttgtctctcttttgaagctttcttcccggtttccaccaacatcagagagaataaaagaaatagttgcgcaaaataaagggaatactgtgcttgaattgcagcaaagatctattgaattcagttccattatacaaagacatcagtcgataaaatcatctttgcttgaacgtatgcctgcattggatgaagcaaattatttggtgaagagagctgcttctacacaggctgcagtttcatctgtaaattctgctcctgcagtcacttctggaggcccacttaagcttccaaatggcgtagcaaagccaccaccagctcctttagctgatttgcttgatttgggttctgatgatgctccagtgactacttcggcccctactacatcacctaatgattttctacaggatctgttgggcatcggtttgactgattcgtctcctataggtggagctccgtctacaagcactgacattctgatggatcttctatctattggttcatctcctgtacaaaatggcccaccaacgtcaaactttagccttcctggcatagagactaaacctccccctgttacacctcaagttgtggatcttcttgatggtttgtcctcaagcacatctcttcctgatgagaatgcagcttacccgacaatcacagcattccagagtgcaaccttgaggatcacattcagtttcaaaaagcaacctggaaaacctcaggagactacaattaatgcttctttcacaaatttagcaactactgcattaacagatttcgtcttccaggcagccgtgccaaagttcatccagttgcgtttggacccagctagcagcagcactcttcctgccagtggaaatgtgtcagtcacacaaagcctcagtgtcactaacaaccaacatgggcagaaaccacttgcaatgcgtatccggatgtcttacaaagtgaatggtgaagacaggctggagcaagggcaaatcagcaactttccttctgggttgtagtgccacctgtgtctatggggttggggttgctctttcagcgtgctacaggcaaggcgtttgtattcttgttcttgaacattttcacttctgcttgcctgctaatgagtttgtacactggtagttggttttggtcgcccattctctctttatatatagtgtacagtagatggcagcgattaatgatatatcctaccaaaattttcaaccttaggctatctccagcagcctccctgttcttctcacttcttatttcaaactccactcttgtaaacagtatcgcctacagtacaaaacagtgttttgcacgctcgtgagatggccttatgctcccatacacagaaggaatgtgttgtatcgcgattttcctgatgtaattatttatttttctaatcaagctcgtacaggcttattgtgcacagacaaattaattgtttttcatgtgcgttcctttaggttcagacatatttggaataccagactcccccaattcttgccaaaaaataggcagttatcaaata

SEQ ID NO: 57963 - DNA, 3158 bp, Zea Mays
gattaaacaattctgaaacacaaagtaggggcctcttcgcaaatcccaccagcaccaccgccttcgcctccgaccgcctcccagatccgctcgcccggccgccgtcgtcttcctggtccgcctctgcggcagtgagattcctcgccgccccgccctggattccgtcgagaggatcgtcgaggacttcgcgatggacctcgccatcaaccccttctcctccggcacccgccttcgggacatgatacgtgcgatacgcgcgtgcaagacggcagcggaggagcgtgccgtggtgcggcgggagtgcgcggcgatacgggccgccatcagcgagggcgaccaggactaccggcatcggaacatggccaagcttatgttcatccacatgctcggttaccccacacacttcgggcagatggagtgcctcaagcttattgctgcggcgggcttccccgagaagcgcatcggctatctaggactcatgcttctgctcgacgagcggcaggaggtcctcatgctcgtcaccaactctctcaagcaagatcttaaccactcaaaccagttcattgttgggcttgcgctctgtgcccttggcaacatatgttctgctgaaatggcacgcgatctggctcctgaagtggagagactgttgcaaaatagggaccctaatacaaagaagaaggctgctttatgctctataaggattgtgcgaaaagttccagacttggcggaaaatttcatgagtgctgctgcatcattactgaaggaaaaacatcatggtgttctgatatctgccgttcagctttgcatggaactatgtaaagccagccatgaagcattggagtacttgaggaagaattgccttgaaggactggtccgaatactgagagatgtctccaacagttcatatgctcctgaatacgacatcggtggcatcacagatccattcttacatatccgagtgcttaaactcatgcgaatactgggtcaaggagatgcagattgcagcgagtatatcaatgatattcttgctcaggtttcaacaaaaactgagtcaaataagaatgctggaaatgctattttatatgaatgcgtggagacaataatgggcattgaagctacaagtggtttacgtgtgttggcaattaatattttgggtcgttttttgtccaaccgtgataacaacataagatatgttgccctaaacatgcttatgaaggccattgccgtggacacacaagcggtgcagaggcacagggcaacaattttagagtgcgtcaaggatgcagatgtctctattcgtaaaagagccctagaacttgtttatctacttgtcaatgatacaaatgtaaagccattgactaaggaacttgttgattaccttgaagtgagtgatcaagatttcaaggaagacctcactgctaaaatatgctcaatagttgaaaagttttccctggacaagctatggtacttagaccagatgttcagagttttgtctctggctggtaattatgtaaaggatgatgtatggcatgctcttatagttctaatgagtaatgcatctgaacttcaaggatattcaatcaggtcattatataaggcattgcaagcatctggtgaacaggaaagtttagttagggtggccatttggtgcattggtgaatatggagaaatgctggtcaacaatcttagtatgttagacatggaggaaccgatcacggtaactgaatctgatgctgtggatgccgtagagattgctcttcagcgttactcggcggatgttactaccagggctatgtgtcttgtctctcttttgaagctttcttcccggtttccaccaacatcagagagaataaaagaaatagttgcgcaaaataaagggaatactgtgcttgaattgcagcaaagatctattgaattcagttccattatacaaagacatcagtcgataaaatcatctttgcttgaacgtatgcctgcattggatgaagcaaattatttggtgaagagagctgcttctacacaggctgcagtttcatctgtaaattctgctcctgcagtcacttctggaggcccacttaagcttccaaatggcgtagcaaagccaccaccagctcctttagctgatttgcttgatttgggttctgatgatgctccagtgactacttcggcccctactacatcacctaatgattttctacaggatctgttgggcatcggtttgactgattcgtctcctataggtggagctccgtctacaagcactgacattctgatggatcttctatctattggttcatctcctgtacaaaatggcccaccaacgtcaaactttagccttcctggcatagagactaaacctccccctgttacacctcaagttgtggatcttcttgatggtttgtcctcaagcacatctcttcctgatgagaatgcagcttacccgacaatcacagcattccagagtgcaaccttgaggatcacattcagtttcaaaaagcaacctggaaaacctcaggagactacaattaatgcttctttcacaaatttagcaactactgcattaacagatttcgtcttccaggcagccgtgccaaagttcatccagttgcgtttggacccagctagcagcagcactcttcctgccagtggaaatgtgtcagtcacacaaagcctcagtgtcactaacaaccaacatgggcagaaaccacttgcaatgcgtatccggatgtcttacaaagtgaatggtgaagacaggctggagcaagggcaaatcagcaactttccttctgggttgtagtgccacctgtgtctatggggttggggttgctctttcagcgtgctacaggcaaggcgtttgtattcttgttcttgaacattttcacttctgcttgcctgctaatgagtttgtacactggtagttggttttggtcgcccattctctctttatatatagtgtacagtagatggcagcgattaatgatatatcctaccaaaattttcaaccttaggctatctccagcagcctccctgttcttctcacttcttatttcaaactccactcttgtaaacagtatcgcctacagtacaaaacagtgttttgcacgctcgtgagatggccttatgctcccatacacagaaggaatgtgttgcaaaaaaaa

SEQ ID NO: 57964 - DNA, 2562 bp, Zea Mays
ctctctcaagcaatcttaaccactcaaaccagttcattgttgggcttgcgctctgtgcccttggcaacatatgttctgctgaaatggcacgcgatctggctcctgaagtggagagactgttgcaaaatagggaccctaatacaaagaagaaggctgctttatgctctataaggattgtgcgaaaagttccagacttggcggaaaatttcatgagtgctgctgcatcattactgaaggaaaaacatcatggtgttctgatatctgccgttcagctttgcatggaactatgtaaagccagccatgaagcattggagtacttgaggaagaattgccttgaaggactggtccgaatactgagagatgtctccaacagttcatatgctcctgaatacgacatcggtggcatcacagatccattcttacatatccgagtgcttaaactcatgcgaatactgggtcaaggagatgcagattgcagcgagtatatcaatgatattcttgctcaggtttcaacaaaaactgagtcaaataagaatgctggaaatgctattttatatgaatgcgtggagacaataatgggcattgaagctacaagtggtttacgtgtgttggcaattaatattttgggtcgttttttgtccaaccgtgataacaacataagatatgttgccctaaacatgcttatgaaggccattgccgtggacacacaagcggtgcagaggcacagggcaacaattttagagtgcgtcaaggatgcagatgtctctattcgtaaaagagccctagaacttgtttatctacttgtcaatgatacaaatgtaaagccattgactaaggaacttgttgattaccttgaagtgagtgatcaagatttcaaggaagacctcactgctaaaatatgctcaatagttgaaaagttttccctggacaagctatggtacttagaccagatgttcagagttttgtctctggctggtaattatgtaaaggatgatgtatggcatgctcttatagttctaatgagtaatgcatctgaacttcaaggatattcaatcaggtcattatataaggcattgcaagcatctggtgaacaggaaagtttagttagggtggccatttggtgcattggtgaatatggagaaatgctggtcaacaatcttagtatgttagacatggaggaaccgatcacggtaactgaatctgatgctgtggatgccgtagagattgctcttcagcgttactcggcggatgttactaccagggctatgtgtcttgtctctcttttgaagctttcttcccggtttccaccaacatcagagagaataaaagaaatagttgcgcaaaataaagggaatactgtgcttgaattgcagcaaagatctattgaattcagttccattatacaaagacatcagtcgataaaatcatctttgcttgaacgtatgcctgcattggatgaagcaaattatttggtgaagagagctgcttctacacaggctgcagtttcatctgtaaattctgctcctgcagtcacttctggaggcccacttaagcttccaaatggcgtagcaaagccaccaccagctcctttagctgatttgcttgatttgggttctgatgatgctccagtgactacttcggcccctactacatcacctaatgattttctacaggatctgttgggcatcggtttgactgattcgtctcctataggtggagctccgtctacaagcactgacattctgatggatcttctatctattggttcatctcctgtacaaaatggcccaccaacgtcaaactttagccttcctggcatagagactaaacctccccctgttacacctcaagttgtggatcttcttgatggtttgtcctcaagcacatctcttcctgatgagaatgcagcttacccgacaatcacagcattccagagtgcaaccttgaggatcacattcagtttcaaaaagcaacctggaaaacctcaggagactacaattaatgcttctttcacaaatttagcaactactgcattaacagatttcgtcttccaggcagccgtgccaaagttcatccagttgcgtttggacccagctagcagcagcactcttcctgccagtggaaatgtgtcagtcacacaaagcctcagtgtcactaacaaccaacatgggcagaaaccacttgcaatgcgtatccggatgtcttacaaagtgaatggtgaagacaggctggagcaagggcaaatcagcaactttccttctgggttgtagtgccacctgtgtctatggggttggggttgctctttcagcgtgctacagtatcgcctacagtacaaaacagtgttttgcacgctcgtgagatggccttatgctcccatacacagaaggaatgtgttgtatcgcgattttcctgatgtaattatttatttttctaatcaagctcgtacaggcttattgtgcacagacaaattaattgtttttcatgtgcgttcctttaggttcagacatatttggaataccagactcccccaattcttgccaaaaaataggcagttatcaaata

SEQ ID NO: 57965 - DNA, 2543 bp, Zea Mays
ccggacgagaccgccgcaccgcatctcccgtccgtcgatcggatttccccactccacccccaacgcggtcgcgtcaactccacctgcgcccctcaggccctcacgagtcacgacctcgtcttcgcgggcgccgccgaccggatcctcccgacgctatcgcggtcaaccctgcctgcaccctcacgacctcgtcttcgcggtcgcacatgatcacgtggtcaaatcccgctccgttagcaagtaccaccagcagcaagccagcaacccaatgctgtgctcctcccacctcctgctgcgcgcacaagtcaactcctgtctgcggccgccgcgccccacgccggtccccatgccgttcccgctgtccaccgatccatccgacgcggatgctctgcacgctgtgttccggcagtggagactggagggcggcgcggcgatggaggacccgtgcaggaagggcgtctggtcagagtcgtccggaataaacgcgtccgtcgaatgcaactgcctcccctcaagggtgtgccgcatcacaagcctaaatgtgagtgggcacgggaacatctcggcgatcccgcgggagctattcaatttgacagaactggtctctctggatttaagtaataacaacttgagtggttcgatacccccggaagttattaatctttccaaactggaaacatgctaggcacttcaataataatcctctcagtggaggttttcctcatgaactgtcgcttttaaggaatctacggtccctgtggatgtttgataattacattgtagggccttttccggcatttattcagaacttaaccaatctcacagacttgcgaatatatgggacgaatcttcaaggacctattccaaaaaatttctctaatctgagcaatcttgaagtcctgatgcttggtgatcttgcgggcaaccattcttatttaaatgtcataggagcgtgggcaaacctttcagtgttatctctgagaaaatgtggtcttacaggtcaggttcctaatactcccccaaacttgcccaagctaaaatatctggatttgacatcaaacaacttatcaggatcaataggaggactcttgctttcatataagacctcaaattacatatatgtaggtggaaacaacttaagtggacctgtgccttctgaaattgttcaatcatcagtttccttggatgtttcgtataactattatgttgacggatccctttctaacaatccttctggtcagaagcagttcataaattatcttggaacatcaattgatgcaagtggaagaatcaacagtggaaatcttacaatcctgaactgccttcgcatgaacgaatgcaacataaataatttaactaatcgtgcaacttccttcgctataaactgtggtggcaagcaagtggagtattcagatctaatgccaattatgttctctgaagactccactgatcttggaggatcaggctttcatgttaatgctactagtcattgggtagttagtcatgtgggttctgatccatttaacgaatccaccggtattgtaaatacaagtgatatttttgaaaccaacatgcaagagctctaccaaacagcaagaacttcaacaagttcgttgtggtactatgtggtaggtttagctaacgggaactacacagtccaactcttctttgcagagatagtcataactcatggacctggaaagcgcttatttgacattgatattcaggaccagaatatcaggaaggactttgacattactaaggaagcagggggttccagaaaagccactaacataacctacgaagtgactgttgataactccatactggcaatacatctgtattggagtggacgcggcacctgttgtattccatatgaaggagcttacgggccactagtttcagcaataaaagttacccattcccaagacccgaaaaccagtcccccacaagcaccacattctgattctgcccgagatgatgtaaagcgaagaggagtggttgcaggcattgcagcactttccatagctgctgcggtgatatcttcatctgttgtctacctttggtggaaatgggtttcacttgtgaagcgcccaatggcatgagttcgtcagatgtttgcatatagttgattctcccacaaatttccatgtcatgcgaaggactctatgtatttgtcttttagcgttggctgctagcaactagccaactagcatagccaagatgactgatgtacagttgacgttgcgatcacggttttaggtctcaagttttgtttcacgattattgtaacctaggaaattatctaagacattctgctgctaatatgttgtttgtttgttgatcaaagtgattcaaatcgcattgtgatatattgtttgtttgtcgatcaaactcattgtaaaactattctcggacgaatgtcacatttcacgtgttgccaacttactgatcgacttccagttgcagtgtgtgtatttgtttcgcatgagtagaaaggtacgatataactatctaacatcatattctttgttcgcgaaaat

SEQ ID NO: 57966 - DNA, 2606 bp, Zea Mays
cgcaccgcatctcccgtccgtcgatcggatttccccactccacccccaacgcggtcgcgtcaactccacctgcgcccctcaggccctcacgagtcacgacctcgtcttcgcgggcgccgccgaccggatcctcccgacgctatcgcggtcaaccctgcctgcaccctcacgacctcgtcttcgcggtcgcacatgatcacgtggtcaaatcccgctccgttagcaagtaccaccagcagcaagccagcaacccaatgctgtgctcctcccacctcctgctgcgcgcacaagtcaactcctgtctgcggccgccgcgccccacgccggtccccatggctcgttccgctcccactttcgtcgctgtttttctcctagtcctcgtgcttctcaccatggacgcggcgcagggtcaacagccgttcccgctgtccaccgatccatccgacgcggatgctctgcacgctgtgttccggcagtggagactggagggcggcgcggcgatggaggacccgtgcaggaagggcgtctggtcagagtcgtccggaataaacgcgtccgtcgaatgcaactgcctcccctcaagggtgtgccgcatcacaagcctaaatgtgagtgggcacgggaacatctcggcgatcccgcgggagctattcaatttgacagaactggtctctctggatttaagtaataacaacttgagtggttcgatacccccggaagttattaatctttccaaactggaaacatggcacttcaataataatcctctcagtggaggttttcctcatgaactgtcgcttttaaggaatctacggtccctgtggatgtttgataattacattgtagggccttttccggcatttattcagaacttaaccaatctcacagacttgcgaatatatgggacgaatcttcaaggacctattccaaaaaatttctctaatctgagcaatcttgaagtcctgatgcttggtgatcttgcgggcaaccattcttatttaaatgtcataggagcgtgggcaaacctttcagtgttatctctgagaaaatgtggtcttacaggtcaggttcctaatactcccccaaacttgcccaagctaaaatatctggatttgacatcaaacaacttatcaggatcaataggaggactcttgctttcatataagacctcaaattacatatatgtaggtggaaacaacttaagtggacctgtgccttctgaaattgttcaatcatcagtttccttggatgtttcgtataactattatgttgacggatccctttctaacaatccttctggtcagaagcagttcataaattatcttggaacatcaattgatgcaagtggaagaatcaacagtggaaatcttacaatcctgaactgccttcgcatgaacgaatgcaacataaataatttaactaatcgtgcaacttccttcgctataaactgtggtggcaagcaagtggagtattcagatctaatgccaattatgttctctgaagactccactgatcttggaggatcaggctttcatgttaatgctactagtcattgggtagttagtcatgtgggttctgatccatttaacgaatccaccggtattgtaaatacaagtgatatttttgaaaccaacatgcaagagctctaccaaacagcaagaacttcaacaagttcgttgtggtactatgtggtaggtttagctaacgggaactacacagtccaactcttctttgcagagatagtcataactcatggacctggaaagcgcttatttgacattgatattcaggaccagaatatcaggaaggactttgacattactaaggaagcagggggttccagaaaagccactaacataacctacgaagtgactgttgataactccatactggcaatacatctgtattggagtggacgcggcacctgttgtattccatatgaaggagcttacgggccactagtttcagcaataaaagttacccattcccaagacccgaaaaccagtcccccacaagcaccacattctgattctgcccgagatgatgtaaagcgaagaggagtggttgcaggcattgcagcactttccatagctgctgcggtgatatcttcatctgttgtctacctttggtggaaatgggtttcacttgtgaagcgcccaatggcatgagttcgtcagatgtttgcatatagttgattctcccacaaatttccatgtcatgcgaaggactctatgtatttgtcttttagcgttggctgctagcaactagccaactagcatagccaagatgactgatgtacagttgacgttgcgatcacggttttaggtctcaagttttgtttcacgattattgtaacctaggaaattatctaagacattctgctgctaatatgttgtttgtttgttgatcaaagtgattcaaatcgcattgtgatatattgtttgtttgtcgatcaaactcattgtaaaactattctcggacgaatgtcacatttcacgtgttgccaacttactgatcgacttccagttgcagtgtgtgtatttgtttcgcatgagtagaaaggtacgatataactatctaacatcatattctttgttcgcgaaaat

SEQ ID NO: 57967 - DNA, 2512 bp, Zea Mays
ccccactccacccccaacgcggtcgcgtcaactccacctgcgcccctcaggccctcacgagtcacgacctcgtcttcgcgggcgccgccgaccggatcctcccgacgctatcgcggtcaaccctgcctgcaccctcacgacctcgtcttcgcggtcgcacatgatcacgtggtcaaatcccgctccgttagcaagtaccaccagcagcaagccagcaacccaatgctgtgctcctcccacctcctgctgcgcgcacaagtcaactcctgtctgcggccgccgcgccccacgccggtccccatggctcgttccgctcccactttcgtcgctgtttttctcctagtcctcgtgcttctcaccatggacgcggcgcagggtcaacagccgttcccgctgtccaccgatccatccgacgcggatgctctgcacgctgtgttccggcagtggagactggagggcggcgcggcgatggaggacccgtgcaggaagggcgtctggtcagagtcgtccggaataaacgcgtccgtcgaatgcaactgcctcccctcaagggtgtgccgcatcacaagcctaaatgtgagtgggcacgggaacatctcggcgatcccgcgggagctattcaatttgacagaactggtctctctggatttaagtaataacaacttgagtggttcgatacccccggaagttattaatctttccaaactggaaacatgctaggcacttcaataataatcctctcagtggaggttttcctcatgaactgtcgcttttaaggaatctacggtccctgtggatgtttgataattacattgtagggccttttccggcatttattcagaacttaaccaatctcacagacttgcgaatatatgggacgaatcttcaaggacctattccaaaaaatttctctaatctgagcaatcttgaagtcctgatgcttggtgatcttgcgggcaaccattcttatttaaatgtcataggagcgtgggcaaacctttcagtgttatctctgagaaaatgtggtcttacaggtcaggttcctaatactcccccaaacttgcccaagctaaaatatctggatttgacatcaaacaacttatcaggatcaataggaggactcttgctttcatataagacctcaaattacatggatgtttcgtataactattatgttgacggatccctttctaacaatccttctggtcagaagcagttcataaattatcttggaacatcaattgatgcaagtggaagaatcaacagtggaaatcttacaatcctgaactgccttcgcatgaacgaatgcaacataaataatttaactaatcgtgcaacttccttcgctataaactgtggtggcaagcaagtggagtattcagatctaatgccaattatgttctctgaagactccactgatcttggaggatcaggctttcatgttaatgctactagtcattgggtagttagtcatgtgggttctgatccatttaacgaatccaccggtattgtaaatacaagtgatatttttgaaaccaacatgcaagagctctaccaaacagcaagaacttcaacaagttcgttgtggtactatgtggtaggtttagctaacgggaactacacagtccaactcttctttgcagagatagtcataactcatggacctggaaagcgcttatttgacattgatattcaggaccagaatatcaggaaggactttgacattactaaggaagcagggggttccagaaaagccactaacataacctacgaagtgactgttgataactccatactggcaatacatctgtattggagtggacgcggcacctgttgtattccatatgaaggagcttacgggccactagtttcagcaataaaagttacccattcccaagacccgaaaaccagtcccccacaagcaccacattctgattctgcccgagatgatgtaaagcgaagaggagtggttgcaggcattgcagcactttccatagctgctgcggtgatatcttcatctgttgtctacctttggtggaaatgggtttcacttgtgaagcgcccaatggcatgagttcgtcagatgtttgcatatagttgattctcccacaaatttccatgtcatgcgaaggactctatgtatttgtcttttagcgttggctgctagcaactagccaactagcatagccaagatgactgatgtacagttgacgttgcgatcacggttttaggtctcaagttttgtttcacgattattgtaacctaggaaattatctaagacattctgctgctaatatgttgtttgtttgttgatcaaagtgattcaaatcgcattgtgatatattgtttgtttgtcgatcaaactcattgtaaaactattctcggacgaatgtcacatttcacgtgttgccaacttactgatcgacttccagttgcagtgtgtgtatttgtttcgcatgagtagaaaggtacgatataactatctaacatcatattctttgttcgcgaaaat

SEQ ID NO: 57968 - DNA, 2482 bp, Zea Mays
gtcaactccacctgcgcccctcaggccctcacgagtcacgacctcgtcttcgcgggcgccgccgaccggatcctcccgacgctatcgcggtcaaccctgcctgcaccctcacgacctcgtcttcgcggtcgcacatgatcacgtggtcaaatcccgctccgttagcaagtaccaccagcagcaagccagcaacccaatgctgtgctcctcccacctcctgctgcgcgcacaagtcaactcctgtctgcggccgccgcgccccacgccggtccccatggctcgttccgctcccactttcgtcgctgtttttctcctagtcctcgtgcttctcaccatggacgcggcgcagggtcaacagccgttcccgctgtccaccgatccatccgacgcggatgctctgcacgctgtgttccggcagtggagactggagggcggcgcggcgatggaggacccgtgcaggaagggcgtctggtcagagtcgtccggaataaacgcgtccgtcgaatgcaactgcctcccctcaagggtgtgccgcatcacaagcctaaatgtgagtgggcacgggaacatctcggcgatcccgcgggagctattcaatttgacagaactggtctctctggatttaagtaataacaacttgagtggttcgatacccccggaagttattaatctttccaaactggaaacatggcacttcaataataatcctctcagtggaggttttcctcatgaactgtcgcttttaaggaatctacggtccctgtggatgtttgataattacattgtagggccttttccggcatttattcagaacttaaccaatctcacagacttgcgaatatatgggacgaatcttcaaggacctattccaaaaaatttctctaatctgagcaatcttgaagtcctgatgcttggtgatcttgcgggcaaccattcttatttaaatgtcataggagcgtgggcaaacctttcagtgttatctctgagaaaatgtggtcttacaggtcaggttcctaatactcccccaaacttgcccaagctaaaatatctggatttgacatcaaacaacttatcaggatcaataggaggactcttgctttcatataagacctcaaattacatggatgtttcgtataactattatgttgacggatccctttctaacaatccttctggtcagaagcagttcataaattatcttggaacatcaattgatgcaagtggaagaatcaacagtggaaatcttacaatcctgaactgccttcgcatgaacgaatgcaacataaataatttaactaatcgtgcaacttccttcgctataaactgtggtggcaagcaagtggagtattcagatctaatgccaattatgttctctgaagactccactgatcttggaggatcaggctttcatgttaatgctactagtcattgggtagttagtcatgtgggttctgatccatttaacgaatccaccggtattgtaaatacaagtgatatttttgaaaccaacatgcaagagctctaccaaacagcaagaacttcaacaagttcgttgtggtactatgtggtaggtttagctaacgggaactacacagtccaactcttctttgcagagatagtcataactcatggacctggaaagcgcttatttgacattgatattcaggaccagaatatcaggaaggactttgacattactaaggaagcagggggttccagaaaagccactaacataacctacgaagtgactgttgataactccatactggcaatacatctgtattggagtggacgcggcacctgttgtattccatatgaaggagcttacgggccactagtttcagcaataaaagttacccattcccaagacccgaaaaccagtcccccacaagcaccacattctgattctgcccgagatgatgtaaagcgaagaggagtggttgcaggcattgcagcactttccatagctgctgcggtgatatcttcatctgttgtctacctttggtggaaatgggtttcacttgtgaagcgcccaatggcatgagttcgtcagatgtttgcatatagttgattctcccacaaatttccatgtcatgcgaaggactctatgtatttgtcttttagcgttggctgctagcaactagccaactagcatagccaagatgactgatgtacagttgacgttgcgatcacggttttaggtctcaagttttgtttcacgattattgtaacctaggaaattatctaagacattctgctgctaatatgttgtttgtttgttgatcaaagtgattcaaatcgcattgtgatatattgtttgtttgtcgatcaaactcattgtaaaactattctcggacgaatgtcacatttcacgtgttgccaacttactgatcgacttccagttgcagtgtgtgtatttgtttcgcatgagtagaaaggtacgatataactatctaacatcatattctttgttcgcgaaaat

SEQ ID NO: 57969 - DNA, 2167 bp, Zea Mays
gtcaactccacctgcgcccctcaggccctcacgagtcacgacctcgtcttcgcgggcgccgccgaccggatcctcccgacgctatcgcggtcaaccctgcctgcaccctcacgacctcgtcttcgcggtcgcacatgatcacgtggtcaaatcccgctccgttagcaagtaccaccagcagcaagccagcaacccaatgctgtgctcctcccacctcctgctgcgcgcacaagtcaactcctgtctgcggccgccgcgccccacgccggtccccatggctcgttccgctcccactttcgtcgctgtttttctcctagtcctcgtgcttctcaccatggacgcggcgcagggtcaacagccgttcccgctgtccaccgatccatccgacgcggatgctctgcacgctgtgttccggcagtggagactggagggcggcgcggcgatggaggacccgtgcaggaagggcgtctggtcagagtcgtccggaataaacgcgtccgtcgaatgcaactgcctcccctcaagggtgtgccgcatcacaagcctaaatgtgagtgggcacgggaacatctcggcgatcccgcgggagctattcaatttgacagaactggtctctctggatttaagtaataacaacttgagtggttcgatacccccggaagttattaatctttccaaactggaaacatggcacttcaataataatcctctcagtggaggttttcctcatgaactgtcgcttttaaggaatctacggtccctgtggatgtttgataattacattgtagggccttttccggcatttattcagaacttaaccaatctcacagacttgcgaatatatgggacgaatcttcaaggacctattccaaaaaatttctctaatctgagcaatcttgaagtcctgatgcttggtgatcttgcgggcaaccattcttatttaaatgtcataggagcgtgggcaaacctttcagtgttatctctgagaaaatgtggtcttacaggtcaggttcctaatactcccccaaacttgcccaagctaaaatatctggatttgacatcaaacaacttatcaggatcaataggaggactcttgctttcatataagacctcaaattacatggatgtttcgtataactattatgttgacggatccctttctaacaatccttctggtcagaagcagttcataaattatcttggaacatcaattgatgcaagtggaagaatcaacagtggaaatcttacaatcctgaactgccttcgcatgaacgaatgcaacataaataatttaactaagatagtcataactcatggacctggaaagcgcttatttgacattgatattcaggaccagaatatcaggaaggactttgacattactaaggaagcagggggttccagaaaagccactaacataacctacgaagtgactgttgataactccatactggcaatacatctgtattggagtggacgcggcacctgttgtattccatatgaaggagcttacgggccactagtttcagcaataaaagttacccattcccaagacccgaaaaccagtcccccacaagcaccacattctgattctgcccgagatgatgtaaagcgaagaggagtggttgcaggcattgcagcactttccatagctgctgcggtgatatcttcatctgttgtctacctttggtggaaatgggtttcacttgtgaagcgcccaatggcatgagttcgtcagatgtttgcatatagttgattctcccacaaatttccatgtcatgcgaaggactctatgtatttgtcttttagcgttggctgctagcaactagccaactagcatagccaagatgactgatgtacagttgacgttgcgatcacggttttaggtctcaagttttgtttcacgattattgtaacctaggaaattatctaagacattctgctgctaatatgttgtttgtttgttgatcaaagtgattcaaatcgcattgtgatatattgtttgtttgtcgatcaaactcattgtaaaactattctcggacgaatgtcacatttcacgtgttgccaacttactgatcgacttccagttgcagtgtgtgtatttgtttcgcatgagtagaaaggtacgatataactatctaacatcatattctttgttcgcgaaaat

SEQ ID NO: 57970 - DNA, 848 bp, Zea Mays
tcacgagtcacgacctcgtcttcgcgggcgccgccgaccggatcctcccgacgctatcgcggtcaaccctgcctgcaccctcacgacctcgtcttcgcggtcgcacatgatcacgtggtcaaatcccgctccgttagcaagtaccaccagcagcaagccagcaacccaatgctgtgctcctcccacctcctgctgcgcgcacaagtcaactcctgtctgcggccgccgcgccccacgccggtccccatggctcgttccgctcccactttcgtcgctgtttttctcctagtcctcgtgcttctcaccatggacgcggcgcagggtcaacagccgttcccgctgtccaccgatccatccgacgcggatgctctgcacgctgtgttccggcagtggagactggagggcggcgcggcgatggaggacccgtgcaggaagggcgtctggtcagagtcgtccggaataaacgcgtccgtcgaatgcaactgcctcccctcaagggtgtgccgcatcacaagcctaaatgtgagtgggcacgggaacatctcggcgatcccgcgggagctattcaatttgacagaactggtctctctggatttaagtaataacaacttgagtggttcgatacccccggaagttattaatctttccaaactggaaacatgctaggcacttcaataataatcctctcagtggaggttttcctcatgaactgtcgcttttaaggaatctacggtccctgtggatgtttgataattacattgtagggccttttccggcatttattcagaacttaaccaatctcacagacttgcgaatatatgggacgaatcttcaaggacctattccaa

SEQ ID NO: 57971 - DNA, 2504 bp, Zea Mays
tcacgagtcacgacctcgtcttcgcgggcgccgccgaccggatcctcccgacgctatcgcggtcaaccctgcctgcaccctcacgacctcgtcttcgcggtcgcacatgatcacgtggtcaaatcccgctccgttagcaagtaccaccagcagcaagccagcaacccaatgctgtgctcctcccacctcctgctgcgcgcacaagtcaactcctgtctgcggccgccgcgccccacgccggtccccatggctcgttccgctcccactttcgtcgctgtttttctcctagtcctcgtgcttctcaccatggacgcggcgcagggtcaacagccgttcccgctgtccaccgatccatccgacgcggatgctctgcacgctgtgttccggcagtggagactggagggcggcgcggcgatggaggacccgtgcaggaagggcgtctggtcagagtcgtccggaataaacgcgtccgtcgaatgcaactgcctcccctcaagggtgtgccgcatcacaagcctaaatgtgagtgggcacgggaacatctcggcgatcccgcgggagctattcaatttgacagaactggtctctctggatttaagtaataacaacttgagtggttcgatacccccggaagttattaatctttccaaactggaaacatggcacttcaataataatcctctcagtggaggttttcctcatgaactgtcgcttttaaggaatctacggtccctgtggatgtttgataattacattgtagggccttttccggcatttattcagaacttaaccaatctcacagacttgcgaatatatgggacgaatcttcaaggacctattccaaaaaatttctctaatctgagcaatcttgaagtcctgatgcttggtgatcttgcgggcaaccattcttatttaaatgtcataggagcgtgggcaaacctttcagtgttatctctgagaaaatgtggtcttacaggtcaggttcctaatactcccccaaacttgcccaagctaaaatatctggatttgacatcaaacaacttatcaggatcaataggaggactcttgctttcatataagacctcaaattacatatatgtaggtggaaacaacttaagtggacctgtgccttctgaaattgttcaatcatcagtttccttggatgtttcgtataactattatgttgacggatccctttctaacaatccttctgaaattatcttggaacatcaattgatgcaagtggaagaatcaacagtggaaatcttacaatcctgaactgccttcgcatgaacgaatgcaacataaataatttaactaatcgtgcaacttccttcgctataaactgtggtggcaagcaagtggagtattcagatctaatgccaattatgttctctgaagactccactgatcttggaggatcaggctttcatgttaatgctactagtcattgggtagttagtcatgtgggttctgatccatttaacgaatccaccggtattgtaaatacaagtgatatttttgaaaccaacatgcaagagctctaccaaacagcaagaacttcaacaagttcgttgtggtactatgtggtaggtttagctaacgggaactacacagtccaactcttctttgcagagatagtcataactcatggacctggaaagcgcttatttgacattgatattcaggaccagaatatcaggaaggactttgacattactaaggaagcagggggttccagaaaagccactaacataacctacgaagtgactgttgataactccatactggcaatacatctgtattggagtggacgcggcacctgttgtattccatatgaaggagcttacgggccactagtttcagcaataaaagttacccattcccaagacccgaaaaccagtcccccacaagcaccacattctgattctgcccgagatgatgtaaagcgaagaggagtggttgcaggcattgcagcactttccatagctgctgcggtgatatcttcatctgttgtctacctttggtggaaatgggtttcacttgtgaagcgcccaatggcatgagttcgtcagatgtttgcatatagttgattctcccacaaatttccatgtcatgcgaaggactctatgtatttgtcttttagcgttggctgctagcaactagccaactagcatagccaagatgactgatgtacagttgacgttgcgatcacggttttaggtctcaagttttgtttcacgattattgtaacctaggaaattatctaagacattctgctgctaatatgttgtttgtttgttgatcaaagtgattcaaatcgcattgtgatatattgtttgtttgtcgatcaaactcattgtaaaactattctcggacgaatgtcacatttcacgtgttgccaacttactgatcgacttccagttgcagtgtgtgtatttgtttcgcatgagtagaaaggtacgatataactatctaacatcatattctttgttcgcgaaaat

SEQ ID NO: 57972 - DNA, 2209 bp, Zea Mays
tcacgagtcacgacctcgtcttcgcgggcgccgccgaccggatcctcccgacgctatcgcggtcaaccctgcctgcaccctcacgacctcgtcttcgcggtcgcacatgatcacgtggtcaaatcccgctccgttagcaagtaccaccagcagcaagccagcaacccaatgctgtgctcctcccacctcctgctgcgcgcacaagtcaactcctgtctgcggccgccgcgccccacgccggtccccatggctcgttccgctcccactttcgtcgctgtttttctcctagtcctcgtgcttctcaccatggacgcggcgcagggtcaacagccgttcccgctgtccaccgatccatccgacgcggatgctctgcacgctgtgttccggcagtggagactggagggcggcgcggcgatggaggacccgtgcaggaagggcgtctggtcagagtcgtccggaataaacgcgtccgtcgaatgcaactgcctcccctcaagggtgtgccgcatcacaagcctaaatgtgagtgggcacgggaacatctcggcgatcccgcgggagctattcaatttgacagaactggtctctctggatttaagtaataacaacttgagtggttcgatacccccggaagttattaatctttccaaactggaaacatgctaggcacttcaataataatcctctcagtggaggttttcctcatgaactgtcgcttttaaggaatctacggtccctgtggatgtttgataattacattgtagggccttttccggcatttattcagaacttaaccaatctcacagacttgcgaatatatgggacgaatcttcaaggacctattccaaaaaatttctctaatctgagcaatcttgaagtcctgatgcttggtgatcttgcgggcaaccattcttatttaaatgtcataggagcgtgggcaaacctttcagtgttatctctgagaaaatgtggtcttacaggtcaggttcctaatactcccccaaacttgcccaagctaaaatatctggatttgacatcaaacaacttatcaggatcaataggaggactcttgctttcatataagacctcaaattacatatatgtaggtggaaacaacttaagtggacctgtgccttctgaaattgttcaatcatcagtttccttggatgtttcgtataactattatgttgacggatccctttctaacaatccttctggtcagaagcagttcataaattatcttggaacatcaattgatgcaagtggaagaatcaacagtggaaatcttacaatcctgaactgccttcgcatgaacgaatgcaacataaataatttaactaagatagtcataactcatggacctggaaagcgcttatttgacattgatattcaggaccagaatatcaggaaggactttgacattactaaggaagcagggggttccagaaaagccactaacataacctacgaagtgactgttgataactccatactggcaatacatctgtattggagtggacgcggcacctgttgtattccatatgaaggagcttacgggccactagtttcagcaataaaagttacccattcccaagacccgaaaaccagtcccccacaagcaccacattctgattctgcccgagatgatgtaaagcgaagaggagtggttgcaggcattgcagcactttccatagctgctgcggtgatatcttcatctgttgtctacctttggtggaaatgggtttcacttgtgaagcgcccaatggcatgagttcgtcagatgtttgcatatagttgattctcccacaaatttccatgtcatgcgaaggactctatgtatttgtcttttagcgttggctgctagcaactagccaactagcatagccaagatgactgatgtacagttgacgttgcgatcacggttttaggtctcaagttttgtttcacgattattgtaacctaggaaattatctaagacattctgctgctaatatgttgtttgtttgttgatcaaagtgattcaaatcgcattgtgatatattgtttgtttgtcgatcaaactcattgtaaaactattctcggacgaatgtcacatttcacgtgttgccaacttactgatcgacttccagttgcagtgtgtgtatttgtttcgcatgagtagaaaggtacgatataactatctaacatcatattctttgttcgcgaaaat

SEQ ID NO: 57973 - DNA, 2016 bp, Zea Mays
attaaaatgagtttttcaagagaaattctcattcatacccccattttaggtgcacttctaatctattgactactttctcctcgagttgccattgcaccacaattaacttcttcagaattcagagcacgccacagttcaatatttcttcaagaggatttaagtaataacaacttgagtggttcgatacccccggaagttattaatctttccaaactggaaacatggcacttcaataataatcctctcagtggaggttttcctcatgaactgtcgcttttaaggaatctacggtccctgtggatgtttgataattacattgtagggccttttccggcatttattcagaacttaaccaatctcacagacttgcgaatatatgggacgaatcttcaaggacctattccaaaaaatttctctaatctgagcaatcttgaagtcctgatgcttggtgatcttgcgggcaaccattcttatttaaatgtcataggagcgtgggcaaacctttcagtgttatctctgagaaaatgtggtcttacaggtcaggttcctaatactcccccaaacttgcccaagctaaaatatctggatttgacatcaaacaacttatcaggatcaataggaggactcttgctttcatataagacctcaaattacatggatgtttcgtataactattatgttgacggatccctttctaacaatccttctggtcagaagcagttcataaattatcttggaacatcaattgatgcaagtggaagaatcaacagtggaaatcttacaatcctgaactgccttcgcatgaacgaatgcaacataaataatttaactaatcgtgcaacttccttcgctataaactgtggtggcaagcaagtggagtattcagatctaatgccaattatgttctctgaagactccactgatcttggaggatcaggctttcatgttaatgctactagtcattgggtagttagtcatgtgggttctgatccatttaacgaatccaccggtattgtaaatacaagtgatatttttgaaaccaacatgcaagagctctaccaaacagcaagaacttcaacaagttcgttgtggtactatgtggtaggtttagctaacgggaactacacagtccaactcttctttgcagagatagtcataactcatggacctggaaagcgcttatttgacattgatattcaggaccagaatatcaggaaggactttgacattactaaggaagcagggggttccagaaaagccactaacataacctacgaagtgactgttgataactccatactggcaatacatctgtattggagtggacgcggcacctgttgtattccatatgaaggagcttacgggccactagtttcagcaataaaagttacccattcccaagacccgaaaaccagtcccccacaagcaccacattctgattctgcccgagatgatgtaaagcgaagaggagtggttgcaggcattgcagcactttccatagctgctgcggtgatatcttcatctgttgtctacctttggtggaaatgggtttcacttgtgaagcgcccaatggcatgagttcgtcagatgtttgcatatagttgattctcccacaaatttccatgtcatgcgaaggactctatgtatttgtcttttagcgttggctgctagcaactagccaactagcatagccaagatgactgatgtacagttgacgttgcgatcacggttttaggtctcaagttttgtttcacgattattgtaacctaggaaattatctaagacattctgctgctaatatgttgtttgtttgttgatcaaagtgattcaaatcgcattgtgatatattgtttgtttgtcgatcaaactcattgtaaaactattctcggacgaatgtcacatttcacgtgttgccaacttactgatcgacttccagttgcagtgtgtgtatttgtttcgcatgagtagaaaggtacgatataactatctaacatcatattctttgttcgcgaaaat

SEQ ID NO: 57974 - DNA, 1981 bp, Zea Mays
cccattttaggtgcacttctaatctattgactactttctcctcgagttgccattgcaccacaattaacttcttcagaattcagagcacgccacagttcaatatttcttcaagaggatttaagtaataacaacttgagtggttcgatacccccggaagttattaatctttccaaactggaaacatgctaggcacttcaataataatcctctcagtggaggttttcctcatgaactgtcgcttttaaggaatctacggtccctgtggatgtttgataattacattgtagggccttttccggcatttattcagaacttaaccaatctcacagacttgcgaatatatgggacgaatcttcaaggacctattccaaaaaatttctctaatctgagcaatcttgaagtcctgatgcttggtgatcttgcgggcaaccattcttatttaaatgtcataggagcgtgggcaaacctttcagtgttatctctgagaaaatgtggtcttacaggtcaggttcctaatactcccccaaacttgcccaagctaaaatatctggatttgacatcaaacaacttatcaggatcaataggaggactcttgctttcatataagacctcaaattacatggatgtttcgtataactattatgttgacggatccctttctaacaatccttctggtcagaagcagttcataaattatcttggaacatcaattgatgcaagtggaagaatcaacagtggaaatcttacaatcctgaactgccttcgcatgaacgaatgcaacataaataatttaactaatcgtgcaacttccttcgctataaactgtggtggcaagcaagtggagtattcagatctaatgccaattatgttctctgaagactccactgatcttggaggatcaggctttcatgttaatgctactagtcattgggtagttagtcatgtgggttctgatccatttaacgaatccaccggtattgtaaatacaagtgatatttttgaaaccaacatgcaagagctctaccaaacagcaagaacttcaacaagttcgttgtggtactatgtggtaggtttagctaacgggaactacacagtccaactcttctttgcagagatagtcataactcatggacctggaaagcgcttatttgacattgatattcaggaccagaatatcaggaaggactttgacattactaaggaagcagggggttccagaaaagccactaacataacctacgaagtgactgttgataactccatactggcaatacatctgtattggagtggacgcggcacctgttgtattccatatgaaggagcttacgggccactagtttcagcaataaaagttacccattcccaagacccgaaaaccagtcccccacaagcaccacattctgattctgcccgagatgatgtaaagcgaagaggagtggttgcaggcattgcagcactttccatagctgctgcggtgatatcttcatctgttgtctacctttggtggaaatgggtttcacttgtgaagcgcccaatggcatgagttcgtcagatgtttgcatatagttgattctcccacaaatttccatgtcatgcgaaggactctatgtatttgtcttttagcgttggctgctagcaactagccaactagcatagccaagatgactgatgtacagttgacgttgcgatcacggttttaggtctcaagttttgtttcacgattattgtaacctaggaaattatctaagacattctgctgctaatatgttgtttgtttgttgatcaaagtgattcaaatcgcattgtgatatattgtttgtttgtcgatcaaactcattgtaaaactattctcggacgaatgtcacatttcacgtgttgccaacttactgatcgacttccagttgcagtgtgtgtatttgtttcgcatgagtagaaaggtacgatataactatctaacatcatattctttgttcgcgaaaat

SEQ ID NO: 57975 - DNA, 1456 bp, Zea Mays
ctctgagaaaatgtggtcttacagggatttgacatcaaacaacttatcaggatcaataggaggactcttgctttcatataagacctcaaattacatggatgtttcgtataactattatgttgacggatccctttctaacaatccttctggtcagaagcagttcataaattatcttggaacatcaattgatgcaagtggaagaatcaacagtggaaatcttacaatcctgaactgccttcgcatgaacgaatgcaacataaataatttaactaatcgtgcaacttccttcgctataaactgtggtggcaagcaagtggagtattcagatctaatgccaattatgttctctgaagactccactgatcttggaggatcaggctttcatgttaatgctactagtcattgggtagttagtcatgtgggttctgatccatttaacgaatccaccggtattgtaaatacaagtgatatttttgaaaccaacatgcaagagctctaccaaacagcaagaacttcaacaagttcgttgtggtactatgtggtaggtttagctaacgggaactacacagtccaactcttctttgcagagatagtcataactcatggacctggaaagcgcttatttgacattgatattcaggaccagaatatcaggaaggactttgacattactaaggaagcagggggttccagaaaagccactaacataacctacgaagtgactgttgataactccatactggcaatacatctgtattggagtggacgcggcacctgttgtattccatatgaaggagcttacgggccactagtttcagcaataaaagttacccattcccaagacccgaaaaccagtcccccacaagcaccacattctgattctgcccgagatgatgtaaagcgaagaggagtggttgcaggcattgcagcactttccatagctgctgcggtgatatcttcatctgttgtctacctttggtggaaatgggtttcacttgtgaagcgcccaatggcatgagttcgtcagatgtttgcatatagttgattctcccacaaatttccatgtcatgcgaaggactctatgtatttgtcttttagcgttggctgctagcaactagccaactagcatagccaagatgactgatgtacagttgacgttgcgatcacggttttaggtctcaagttttgtttcacgattattgtaacctaggaaattatctaagacattctgctgctaatatgttgtttgtttgttgatcaaagtgattcaaatcgcattgtgatatattgtttgtttgtcgatcaaactcattgtaaaactattctcggacgaatgtcacatttcacgtgttgccaacttactgatcgacttccagttgcagtgtgtgtatttgtttcgcatgagtagaaaggtacgatataactatctaacatcatattctttgttcgcgaaaat

SEQ ID NO: 57976 - DNA, 1652 bp, Zea Mays
caagcgtcatccatgctcctattaaactactatgtttgacaatatttgtctggtctacgtacctaggagacacaaaagctatatctctgagaaaatgtggtcttacaggtcaggttcctaatactcccccaaacttgcccaagctaaaatatctggatttgacatcaaacaacttatcaggatcaataggaggactcttgctttcatataagacctcaaattacatatatgtaggtggaaacaacttaagtggacctgtgccttctgaaattgttcaatcatcagtttccttggatgtttcgtataactattatgttgacggatccctttctaacaatccttctggtcagaagcagttcataaattatcttggaacatcaattgatgcaagtggaagaatcaacagtggaaatcttacaatcctgaactgccttcgcatgaacgaatgcaacataaataatttaactaatcgtgcaacttccttcgctataaactgtggtggcaagcaagtggagtattcagatctaatgccaattatgttctctgaagactccactgatcttggaggatcaggctttcatgttaatgctactagtcattgggtagttagtcatgtgggttctgatccatttaacgaatccaccggtattgtaaatacaagtgatatttttgaaaccaacatgcaagagctctaccaaacagcaagaacttcaacaagttcgttgtggtactatgtggtaggtttagctaacgggaactacacagtccaactcttctttgcagagatagtcataactcatggacctggaaagcgcttatttgacattgatattcaggaccagaatatcaggaaggactttgacattactaaggaagcagggggttccagaaaagccactaacataacctacgaagtgactgttgataactccatactggcaatacatctgtattggagtggacgcggcacctgttgtattccatatgaaggagcttacgggccactagtttcagcaataaaagttacccattcccaagacccgaaaaccagtcccccacaagcaccacattctgattctgcccgagatgatgtaaagcgaagaggagtggttgcaggcattgcagcactttccatagctgctgcggtgatatcttcatctgttgtctacctttggtggaaatgggtttcacttgtgaagcgcccaatggcatgagttcgtcagatgtttgcatatagttgattctcccacaaatttccatgtcatgcgaaggactctatgtatttgtcttttagcgttggctgctagcaactagccaactagcatagccaagatgactgatgtacagttgacgttgcgatcacggttttaggtctcaagttttgtttcacgattattgtaacctaggaaattatctaagacattctgctgctaatatgttgtttgtttgttgatcaaagtgattcaaatcgcattgtgatatattgtttgtttgtcgatcaaactcattgtaaaactattctcggacgaatgtcacatttcacgtgttgccaacttactgatcgacttccagttgcagtgtgtgtatttgtttcgcatgagtagaaaggtacgatataactatctaacatcatattctttgttcgcgaaaat

SEQ ID NO: 57977 - DNA, 1578 bp, Zea Mays
cttatgtggtggtttaatagtcttctctacccgtggggtactttctgatggtttttggatcttgggcgacaaacatcatctggccttggtggcaacttggccttttatttgcattttgatgatgctgttttttctgatccattttgacctggatatgtaggtggaaacaacttaagtggacctgtgccttctgaaattgttcaatcatcagtttccttggatgtttcgtataactattatgttgacggatccctttctaacaatccttctggtcagaagcagttcataaattatcttggaacatcaattgatgcaagtggaagaatcaacagtggaaatcttacaatcctgaactgccttcgcatgaacgaatgcaacataaataatttaactaatcgtgcaacttccttcgctataaactgtggtggcaagcaagtggagtattcagatctaatgccaattatgttctctgaagactccactgatcttggaggatcaggctttcatgttaatgctactagtcattgggtagttagtcatgtgggttctgatccatttaacgaatccaccggtattgtaaatacaagtgatatttttgaaaccaacatgcaagagctctaccaaacagcaagaacttcaacaagttcgttgtggtactatgtggtaggtttagctaacgggaactacacagtccaactcttctttgcagagatagtcataactcatggacctggaaagcgcttatttgacattgatattcaggaccagaatatcaggaaggactttgacattactaaggaagcagggggttccagaaaagccactaacataacctacgaagtgactgttgataactccatactggcaatacatctgtattggagtggacgcggcacctgttgtattccatatgaaggagcttacgggccactagtttcagcaataaaagttacccattcccaagacccgaaaaccagtcccccacaagcaccacattctgattctgcccgagatgatgtaaagcgaagaggagtggttgcaggcattgcagcactttccatagctgctgcggtgatatcttcatctgttgtctacctttggtggaaatgggtttcacttgtgaagcgcccaatggcatgagttcgtcagatgtttgcatatagttgattctcccacaaatttccatgtcatgcgaaggactctatgtatttgtcttttagcgttggctgctagcaactagccaactagcatagccaagatgactgatgtacagttgacgttgcgatcacggttttaggtctcaagttttgtttcacgattattgtaacctaggaaattatctaagacattctgctgctaatatgttgtttgtttgttgatcaaagtgattcaaatcgcattgtgatatattgtttgtttgtcgatcaaactcattgtaaaactattctcggacgaatgtcacatttcacgtgttgccaacttactgatcgacttccagttgcagtgtgtgtatttgtttcgcatgagtagaaaggtacgatataactatctaacatcatattctttgttcgcgaaaat

SEQ ID NO: 57978 - DNA, 1274 bp, Zea Mays
aatttttccatgctgctgcaacaaacagtggaaatcttacaatcctgaactgccttcgcatgaacgaatgcaacataaataatttaactaatcgtgcaacttccttcgctataaactgtggtggcaagcaagtggagtattcagatctaatgccaattatgttctctgaagactccactgatcttggaggatcaggctttcatgttaatgctactagtcattgggtagttagtcatgtgggttctgatccatttaacgaatccaccggtattgtaaatacaagtgatatttttgaaaccaacatgcaagagctctaccaaacagcaagaacttcaacaagttcgttgtggtactatgtggtaggtttagctaacgggaactacacagtccaactcttctttgcagagatagtcataactcatggacctggaaagcgcttatttgacattgatattcaggaccagaatatcaggaaggactttgacattactaaggaagcagggggttccagaaaagccactaacataacctacgaagtgactgttgataactccatactggcaatacatctgtattggagtggacgcggcacctgttgtattccatatgaaggagcttacgggccactagtttcagcaataaaagttacccattcccaagacccgaaaaccagtcccccacaagcaccacattctgattctgcccgagatgatgtaaagcgaagaggagtggttgcaggcattgcagcactttccatagctgctgcggtgatatcttcatctgttgtctacctttggtggaaatgggtttcacttgtgaagcgcccaatggcatgagttcgtcagatgtttgcatatagttgattctcccacaaatttccatgtcatgcgaaggactctatgtatttgtcttttagcgttggctgctagcaactagccaactagcatagccaagatgactgatgtacagttgacgttgcgatcacggttttaggtctcaagttttgtttcacgattattgtaacctaggaaattatctaagacattctgctgctaatatgttgtttgtttgttgatcaaagtgattcaaatcgcattgtgatatattgtttgtttgtcgatcaaactcattgtaaaactattctcggacgaatgtcacatttcacgtgttgccaacttactgatcgacttccagttgcagtgtgtgtatttgtttcgcatgagtagaaaggtacgatataactatctaacatcatattctttgttcgcgaaaat

SEQ ID NO: 57979 - DNA, 2709 bp, Zea Mays
agaaaagctactcacaccaataagccaaagccaaacagcccttccttcgcagcgatggcggcggcggcgccgccggtggccaagaaggtcccgcggcagctcgttgagcacggcgacgtccgcgtcgacaactactactggctccgcgacgactctcgatccgacccggacgtcctcgcgcacctccgcgccgagaacgactacaccgccgccgtcatgtccgcaacttgaggatgaaatatatgctgaaatcagaggaagaataaaggaagatgatatagatgcgcctcttcgcaaagggcggtactactactatgaaaggacattgactggcaaggagtatgtgcaacactgtaggcgtcccgtatcgactgatgctcctattacagtccacgatgtgatgcccacaggacctgatgcccctgatgagcatattatcctggatgagaatgttaaggctgagggccacgactactacagcatcggagctttcaaggtcagtcccaacaacaagctagttgcttacgctgaagacactaaaggtgatgaaatctacacggtctatgtcattgacacggagagtggagaatacgttgggcaaccacttaaaggaattacttctgacattgagtgggctggtgacgaccacctcgtttacattacaatggatagtatacttcggccagataaagtatggctacataagttagggtctgaccaatcaagtgatgcttgtttgtatcatgagaaagatgatacattttctctaggccttcaagcttctgaaagcaagagatatttatttgttgaatctggaagcaaaaacacaagctttatattctacctggacatacccaaacagaacaaggaacttgctgttttgacacctcgtgtgtatggcattgatacaacagctagtcatcgtggaaatcatttctttattaagaggcgaagtgatgaattctacaattctgaattggttgcttgtccactggataatgtagctgagaccactatactgctaccacatagagaaagtgtgaaaatacaagacttccagctctttgacaaccatattgctgtatatgagcgtgagaatggccttcccaaagtgatcgtatatcggctacctgctattggagagtcaattggacaactccagggaggtcgagcgattgattttattgatccaacatatgctgtggaccctgaggagtctcagtttcattcatctgttctacgatttcattatagctcaatgcggactccaccctctgtttatgactatgatatggattcaggggtgtctgtgctgaagaagatccatactgcggattcaatgcatcaaattatgtaacagaaagaaaatgggctgctgctgctgatggcactcaggtccccatgtccattctatacagaaatgatcttgtgaagcttgatggctcagaccctatgctactctatggctatggctcctatgagatatgcatagatccgagttttagagggtcacgattctctctggtagataggggctttatatatgtgatagctcatatccgcggtggtggtgaaatgggccggaagtggtacgaggatgggaaactgttgaagaagaaaaacactttcactgatttcattgattgtgctgagcacttgataaaaagcaagtactgctccagggaaaagctttgcattaatggcagaagcgcaggtggcttattgatgggtgctgtcctaaatatgaggcctgacttattcagggcagctgttgctggagtgccttttgttgatgttgtcacaactatgcttgatccaactatcccactgacaacagctgaatgggaggtatctatttcctcaaaattattccatgttcggtgtcgtatcgcaatttttattcttgccggttcttatgaatccatgtgtcgctgtccttggttcaggagtggggtgatccaagaaaagaagaattctattattacatgaaatcgtattctcctgttgacaatgcaagtgcagatctttatttgtaaattgaaatattgcatcaccctgtgtcatttgtttgtggacgccacaggtgatggcgcaagagtatcccaacattcttgtcactgcaggcttaaacgatccacgcgtgatgtactctgagcctgcgaaatacgtggcgaagctgagggagctgaagagagatgacaatcttgtgctgttcaagtgcgagctgggagctggacacttctccaaatcgggaaggttcgagaaattacaggaggatgcgtttacttatgcgttcatcctaaaggcgctgggcatgactcggaagctggcatcactgtgaattcgattggtgtgaggcacctggactggatttgtatcatggcctgccctcttggttgggggatggatggattctgatggaatatgcatttagatttgaatagggacacagatgttatgcaaaagagattgtttgaaactttgaattctgatttgcatttggatatctgtcctagaataattgtgcttctattattcaatatttgccccatttttaacctatggaccatataaattttgctattttctcctttcaaagtactacaatcattacatgttggtactagtattattttacaggagcatgtatgtaattttatagtgactggtttatgcacatcatataaatacgtttattttggaacagag

SEQ ID NO: 57980 - DNA, 2951 bp, Zea Mays
agaaaagctactcacaccaataagccaaagccaaacagcccttccttcgcagcgatggcggcggcggcgccgccggtggccaagaaggtcccgcggcagctcgttgagcacggcgacgtccgcgtcgacaactactactggctccgcgacgactctcgatccgacccggacgtcctcgcgcacctccgcgccgagaacgactacaccgccgccgtcatgtccggtcagtcggggacttgggatctactcacatgcgagatgcctttagcgtgctattaggcattagcttgagatctacccacatgcgatctattgttttgacatgacaattgacaatcacttgccagtgtttccaacttaccagattgtgctattgatattatatatcacttagaaattggaatgtagttgtatagcgtctgttcagacttcagtgtggttgctagctctctactcgggaacgtagtactctataatgtagtagtagacagtactactactacacgggttgtttccagtggattggtagtgcagatgattctgtgctgtcgtgagtagcctcagtcctcttctgctaaccctggtaactctcttggagatgtcaagcaacttgaggatgaaatatatgctgaaatcagaggaagaataaaggaagatgatatagatgcgcctcttcgcaaagggcggtactactactatgaaaggacattgactggcaaggagtatgtgcaacactgtaggcgtcccgtatcgactgatgctcctattacagtccacgatgtgatgcccacaggacctgatgcccctgatgagcatattatcctggatgagaatgttaaggctgagggccacgactactacagcatcggagctttcaaggtcagtcccaacaacaagctagttgcttacgctgaagacactaaaggtgatgaaatctacacggtctatgtcattgacacggagagtggagaatacgttgggcaaccacttaaaggaattacttctgacattgagtgggctggtgacgaccacctcgtttacattacaatggatagtatacttcggccagataaagtatggctacataagttagggtctgaccaatcaagtgatgcttgtttgtatcatgagaaagatgatacattttctctaggccttcaagcttctgaaagcaagagatatttatttgttgaatctggaagcaaaaacacaagctttatattctacctggacatacccaaacagaacaaggaacttgctgttttgacacctcgtgtgtatggcattgatacaacagctagtcatcgtggaaatcatttctttattaagaggcgaagtgatgaattctacaattctgaattggttgcttgtccactggataatgtagctgagaccactatactgctaccacatagagaaagtgtgaaaatacaagacttccagctctttgacaaccatattgctgtatatgagcgtgagaatggccttcccaaagtgatcgtatatcggctacctgctattggagagtcaattggacaactccagggaggtcgagcgattgattttattgatccaacatatgctgtggaccctgaggagtctcagtttcattcatctgttctacgatttcattatagctcaatgcggactccaccctctgtttatgactatgatatggattcaggggtgtctgtgctgaagaagatccatactattttaggcggattcaatgcatcaaattatgtaacagaaagaaaatgggctgctgctgctgatggcactcaggtccccatgtccattctatacagaaatgatcttgtgaagcttgatggctcagaccctatgctactctatggctatggctcctatgagatatgcatagatccgagttttagagggtcacgattctctctggtagataggggctttatatatgtgatagctcatatccgcggtggtggtgaaatgggccggaagtggtacgaggatgggaaactgttgaagaagaaaaacactttcactgatttcattgattgtgctgagcacttgataaaaagcaagtactgctccagggaaaagctttgcattaatggcagaagcgcaggtggcttattgatgggtgctgtcctaaatatgaggcctgacttattcagggcagctgttgctggagtgccttttgttgatgttgtcacaactatgcttgatccaactatcccactgacaacagctgaatgggaggtgatggcgcaagagtatcccaacattcttgtcactgcaggcttaaacggtatctgaaggcttaaacggcatttgtggttggtctgtggtagctagctgagtatctgactcggtgttgttggtgataacaaaccagatccacgcgtgatgtactctgagcctgcgaaatacgtggcgaagctgagggagctgaagagagatgacaatcttgtgctgttcaagtgcgagctgggagctggacacttctccaaatcgggaaggttcgagaaattacaggaggatgcgtttacttatgcgttcatcctaaaggcgctgggcatgactcggaagctggcatcactgtgaattcgattggtgtgaggcacctggactggatttgtatcatggcctgccctcttggttgggggatggatggattctgatggaatatgcatttagatttgaatagggacacagatgttatgcaaaagagattgtttgaaactttgaattctgatttgcatttggatatctgtcctagaataattgtgcttctattattcaatatttgccccatttttaacctatggaccatataaattttgctattttctcctttcaaagtactacaatcattacatgttggtactagtattattttacaggagcatgtatgtaattttatagtgactggtttatgcacatcatataaatacgtttattttggaacagag

SEQ ID NO: 57981 - DNA, 2633 bp, Zea Mays
agaaaagctactcacaccaataagccaaagccaaacagcccttccttcgcagcgatggcggcggcggcgccgccggtggccaagaaggtcccgcggcagctcgttgagcacggcgacgtccgcgtcgacaactactactggctccgcgacgactctcgatccgacccggacgtcctcgcgcacctccgcgccgagaacgactacaccgccgccgtcatgtccgatgtcaagcaacttgaggatgaaatatatgctgaaatcagaggaagaataaaggaagatgatatagatgcgcctcttcgcaaagggcggtactactactatgaaaggacattgactggcaaggagtatgtgcaacactgtaggcgtcccgtatcgactgatgctcctattacagtccacgatgtgatgcccacaggacctgatgcccctgatgagcatattatcctggatgagaatgttaaggctgagggccacgactactacagcatcggagctttcaaggtcagtcccaacaacaagctagttgcttacgctgaagacactaaaggtgatgaaatctacacggtctatgtcattgacacggagagtggagaatacgttgggcaaccacttaaaggaattacttctgacattgagtgggctggtgacgaccacctcgtttacattacaatggatagtatacttcggccagataaagtatggctacataagttagggtctgaccaatcaagtgatgcttgtttgtatcatgagaaagatgatacattttctctaggccttcaagcttctgaaagcaagagatatttatttgttgaatctggaagcaaaaacacaagctttatattctacctggacatacccaaacagaacaaggaacttgctgttttgacacctcgtgtgtatggcattgatacaacagctagtcatcgtggaaatcatttctttattaagaggcgaagtgatgaattctacaattctgaattggttgcttgtccactggataatgtagctgagaccactatactgctaccacatagagaaagtgtgaaaatacaagacttccagctctttgacaaccatattgctgtatatgagcgtgagaatggccttcccaaagtgatcgtatatcggctacctgctattggagagtcaattggacaactccagggaggtcgagcgattgattttattgatccaacatatgctgtggaccctgaggagtctcagtttcattcatctgttctacgatttcattatagctcaatgcggactccaccctctgtttatgactatgatatggattcaggggtgtctgtgctgaagaagatccatactattttaggcggattcaatgcatcaaattatgtaacagaaagaaaatgggctgctgctgctgatggcactcaggtccccatgtccattctatacagaaatgatcttgtgaagcttgatggctcagaccctatgctactctatggctatggctcctatgaggaaccagcaatgtctaactagtagtaactgcatgtgacaacttggcatcgagactatgagatggttccaggtttcaggaataaatataatagaagttattgtgataaaaccgtgctcttgttttctttgttcttatggctacagatatgcatagatccgagttttagagggtcacgattctctctggtagataggggctttatatatgtgatagctcatatccgcggtggtggtgaaatgggccggaagtggtacgaggatgggaaactgttgaagaagaaaaacactttcactgatttcattgattgtgctgagcacttgataaaaagcaagtactgctccagggaaaagctttgcattaatggcagaagcgcaggtggcttattgatgggtgctgtcctaaatatgaggcctgacttattcagggcagctgttgctggagtgccttttgttgatgttgtcacaactatgcttgatccaactatcccactgacaacagctgaatgggaggtgatggcgcaagagtatcccaacattcttgtcactgcaggcttaaacgatccacgcgtgatgtactctgagcctgcgaaatacgtggcgaagctgagggagctgaagagagatgacaatcttgtgctgttcaagtgcgagctgggagctggacacttctccaaatcgggaaggttcgagaaattacaggaggatgcgtttacttatgcgttcatcctaaaggcgctgggcatgactcggaagctggcatcactgtgaattcgattggtgtgaggcacctggactggatttgtatcatggcctgccctcttggttgggggatggatggattctgatggaatatgcatttagatttgaatagggacacagatgttatgcaaaagagattgtttgaaactttgaattctgatttgcatttggatatctgtcctagaataattgtgcttctattattcaatatttgccccatttttaacctatggaccatataaattttgctattttctcctttcaaagtactacaatcattacatgttggtactagtattattttacaggagcatgtatgtaattttatagtgactggtttatgcacatcatataaatacgtttattttggaacagag

SEQ ID NO: 57982 - DNA, 3481 bp, Zea Mays
agaaaagctactcacaccaataagccaaagccaaacagcccttccttcgcagcgatggcggcggcggcgccgccggtggccaagaaggtcccgcggcagctcgttgagcacggcgacgtccgcgtcgacaactactactggctccgcgacgactctcgatccgacccggacgtcctcgcgcacctccgcgccgagaacgactacaccgccgccgtcatgtccggtcagtcggggacttgggatctactcacatgcgagatgcctttagcgtgctattaggcattagcttgagatctacccacatgcgatctattgttttgacatgacaattgacaatcacttgccagtgtttccaacttaccagattgtgctattgatattatatatcacttagaaattggaatgtagttgtatagcgtctgttcagacttcagtgtggttgctagctctctactcgggaacgtagtactctataatgtagtagtagacagtactactactacacgggttgtttccagtggattggtagtgcagatgattctgtgctgtcgtgagtagcctcagtcctcttctgctaaccctggtaactctcttggagatgtcaagcaacttgaggatgaaatatatgctgaaatcagaggaagaataaaggaagatgatatagatgcgcctcttcgcaaagggcggtactactactatgaaaggacattgactggcaaggagtatgtgcaacactgtaggcgtcccgtatcgactgatgctcctattacagtccacgatgtgatgcccacaggacctgatgcccctgatgagcatattatcctggatgagaatgttaaggctgagggccacgactactacagcatcggagctttcaaggtcagtcccaacaacaagctagttgcttacgctgaagacactaaaggtgatgaaatctacacggtctatgtcattgacacggagagtggagaatacgttgggcaaccacttaaaggaattacttctgacattgagtgggctggtgacgaccacctcgtttacattacaatggatagtatacttcggccagataaagtatggctacataagttagggtctgaccaatcaagtgatgcttgtttgtatcatgagaaagatgatacattttctctaggccttcaagcttctgaaagcaagagatatttatttgttgaatctggaagcaaaaacacaagctttatattctacctggacatacccaaacagaacaaggaacttgctgttttgacacctcgtgtgtatggcattgatacaacagctagtcatcgtggaaatcatttctttattaagaggcgaagtgatgaattctacaattctgaattggttgcttgtccactggataatgtagctgagaccactatactgctaccacatagagaaagtgtgaaaatacaagacttccagctctttgacaaccatattgctgtatatgagcgtgagaatggccttcccaaagtgatcgtatatcggctacctgctattggagagtcaattggacaactccagggaggtcgagcgattgattttattgatccaacatatgctgtggaccctgaggagtctcagtttcattcatctgttctacgatttcattatagctcaatgcggactccaccctctgtttatgactatgatatggattcaggggtgtctgtgctgaagaagatccatactattttaggcggattcaatgcatcaaattatgtaacagaaagaaaatgggctgctgctgctgatggcactcaggtccccatgtccattctatacagaaatgatcttgtgaagcttgatggctcagaccctatgctactctatggctatggctcctatgaggtacgttctgtttgtttattttcttttttgctatttggtaaactgtaataaggaatctttctgcaatttttaacacttcgaagtttgaacaaatttcaagattggcatgtacactgcgctagctgcagttataaatgcaggcttgtactgtagcatggcttgctgcagctgcaaccgcagcaagcactgctgagcaggctgatagtgatagtttatgtcaacttcctttggttcgtttgaaagtttgtgttcttctttatatgtgcatcatgtacagactatacttatttgctaatgtgctatcatgcattcattagctgttttattcatcattgttttcaaatgacaacaattctttagcattcagttattctagtgtttcctcgctgagaaagattccttggcaggaaccagcaatgtctaactagtagtaactgcatgtgacaacttggcatcgagactatgagatggttccaggtttcaggaataaatataatagaagttattgtgataaaaccgtgctcttgttttctttgttcttatggctacagatatgcatagatccgagttttagagggtcacgattctctctggtagataggggctttatatatgtgatagctcatatccgcggtggtggtgaaatgggccggaagtggtacgaggatgggaaactgttgaagaagaaaaacactttcactgatttcattgattgtgctgagcacttgataaaaagcaagtactgctccagggaaaagctttgcattaatggcagaagcgcaggtggcttattgatgggtgctgtcctaaatatgaggcctgacttattcagggcagctgttgctggagtgccttttgttgatgttgtcacaactatgcttgatccaactatcccactgacaacagctgaatgggaggagtggggtgatccaagaaaagaagaattctattattacatgaaatcgtattctcctgttgacaatgtgatggcgcaagagtatcccaacattcttgtcactgcaggcttaaacgatccacgcgtgatgtactctgagcctgcgaaatacgtggcgaagctgagggagctgaagagagatgacaatcttgtgctgttcaagtgcgagctgggagctggacacttctccaaatcgggaaggttcgagaaattacaggaggatgcgtttacttatgcgttcatcctaaaggcgctgggcatgactcggaagctggcatcactgtgaattcgattggtgtgaggcacctggactggatttgtatcatggcctgccctcttggttgggggatggatggattctgatggaatatgcatttagatttgaatagggacacagatgttatgcaaaagagattgtttgaaactttgaattctgatttgcatttggatatctgtcctagaataattgtgcttctattattcaatatttgccccatttttaacctatggaccatataaattttgctattttctcctttcaaagtactacaatcattacatgttggtactagtattattttacaggagcatgtatgtaattttatagtgactggtttatgcacatcatataaatacgtttattttggaacagag

SEQ ID NO: 57983 - DNA, 2547 bp, Zea Mays
agaaaagctactcacaccaataagccaaagccaaacagcccttccttcgcagcgatggcggcggcggcgccgccggtggccaagaaggtcccgcggcagctcgttgagcacggcgacgtccgcgtcgacaactactactggctccgcgacgactctcgatccgacccggacgtcctcgcgcacctccgcgccgagaacgactacaccgccgccgtcatgtccgcaacttgaggatgaaatatatgctgaaatcagaggaagaataaaggaagatgatatagatgcgcctcttcgcaaagggcggtactactactatgaaaggacattgactggcaaggagtatgtgcaacactgtaggcgtcccgtatcgactgatgctcctattacagtccacgatgtgatgcccacaggacctgatgcccctgatgagcatattatcctggatgagaatgttaaggctgagggccacgactactacagcatcggagctttcaaggtcagtcccaacaacaagctagttgcttacgctgaagacactaaaggtgatgaaatctacacggtctatgtcattgacacggagagtggagaatacgttgggcaaccacttaaaggaattacttctgacattgagtgggctggtgacgaccacctcgtttacattacaatggatagtatacttcggccagataaagtatggctacataagttagggtctgaccaatcaagtgatgcttgtttgtatcatgagaaagatgatacattttctctaggccttcaagcttctgaaagcaagagatatttatttgttgaatctggaagcaaaaacacaagctttatattctacctggacatacccaaacagaacaaggaacttgctgttttgacacctcgtgtgtatggcattgatacaacagctagtcatcgtggaaatcatttctttattaagaggcgaagtgatgaattctacaattctgaattggttgcttgtccactggataatgtagctgagaccactatactgctaccacatagagaaagtgtgaaaatacaagacttccagctctttgacaaccatattgctgtatatgagcgtgagaatggccttcccaaagtgatcgtatatcggctacctgctattggagagtcaattggacaactccagggaggtcgagcgattgattttattgatccaacatatgctgtggaccctgaggagtctcagtttcattcatctgttctacgatttcattatagctcaatgcggactccaccctctgtttatgactatgatatggattcaggggtgtctgtgctgaagaagatccatactattttaggcggattcaatgcatcaaattatgtaacagaaagaaaatgggctgctgctgctgatggcactcaggtccccatgtccattctatacagaaatgatcttgtgaagcttgatggctcagaccctatgctactctatggctatggctcctatgagatatgcatagatccgagttttagagggtcacgattctctctggtagataggggctttatatatgtgatagctcatatccgcggtggtggtgaaatgggccggaagtggtacgaggatgggaaactgttgaagaagaaaaacactttcactgatttcattgattgtgctgagcacttgataaaaagcaagtactgctccagggaaaagctttgcattaatggcagaagcgcaggtggcttattgatgggtgctgtcctaaatatgaggcctgacttattcagggcagctgttgctggagtgccttttgttgatgttgtcacaactatgcttgatccaactatcccactgacaacagctgaatgggaggagtggggtgatccaagaaaagaagaattctattattacatgaaatcgtattctcctgttgacaatgtgatggcgcaagagtatcccaacattcttgtcactgcaggcttaaacgatccacgcgtgatgtactctgagcctgcgaaatacgtggcgaagctgagggagctgaagagagatgacaatcttgtgctgttcaagtgcgagctgggagctggacacttctccaaatcgggaaggttcgagaaattacaggaggatgcgtttacttatgcgttcatcctaaaggcgctgggcatgactcggaagctggcatcactgtgaattcgattggtgtgaggcacctggactggatttgtatcatggcctgccctcttggttgggggatggatggattctgatggaatatgcatttagatttgaatagggacacagatgttatgcaaaagagattgtttgaaactttgaattctgatttgcatttggatatctgtcctagaataattgtgcttctattattcaatatttgccccatttttaacctatggaccatataaattttgctattttctcctttcaaagtactacaatcattacatgttggtactagtattattttacaggagcatgtatgtaattttatagtgactggtttatgcacatcatataaatacgtttattttggaacagag

SEQ ID NO: 57984 - DNA, 2115 bp, Zea Mays
agaaaagctactcacaccaataagccaaagccaaacagcccttccttcgcagcgatggcggcggcggcgccgccggtggccaagaaggtcccgcggcagctcgttgagcacggcgacgtccgcgtcgacaactactactggctccgcgacgactctcgatccgacccggacgtcctcgcgcacctccgcgccgagaacgactacaccgccgccgtcatgtccgcaacttgaggatgaaatatatgctgaaatcagaggaagaataaaggaagatgatatagatgcgcctcttcgcaaagggcggtactactactatgaaaggacattgactggcaaggagtatgtgcaacactgtaggcgtcccgtatcgactgatgctcctattacagtccacgatgtgatgcccacaggacctgatgcccctgatgagcatattatcctggatgagaatgttaaggctgagggccacgactactacagcatcggagctttcaaggtcagtcccaacaacaagctagttgcttacgctgaagacactaaaggtgatgaaatctacacggtctatgtcattgacacggagagtggagaatacgttgggcaaccacttaaaggaattacttctgacattgagtgggctggtgacgaccacctcgtttacattacaatggatagtatacttcggccagataaagtatggctacataagttagggtctgaccaatcaagtgatgcttgtttgtatcatgagaaagatgatacattttctctaggccttcaagcttctgaaagcaagagatatttatttgttgaatctggaagcaaaaacacaagctttatattctacctggacatacccaaacagaacaaggaacttgctgttttgacacctcgtgtgtatggcattgatacaacagctagtcatcgtggaaatcatttctttattaagaggcgaagtgatgaattctacaattctgaattggttgcttgtccactggataatgtagctgagaccactatactgctaccacatagagaaagtgtgaaaatacaagacttccagctctttgacaaccatattgctgtatatgagcgtgagaatggccttcccaaagtgatcgtatatcggctacctgctattggagagtcaattggacaactccagggaggtcgagcgattgattttattgatccaacatatgctgtggaccctgaggagtctcagtttcattcatctgttctacgatttcattatagctcaatgcggactccaccctctgtttatgactatgatatggattcaggggtgtctgtgctgaagaagatccatactattttaggcggattcaatgcatcaaattatgtaacagaaagaaaatgggctgctgctgctgatggcactcaggtccccatgtccattctatacagaaatgatcttgtgaagcttgatggctcagaccctatgctactctatggctatggctcctatgaggtgatggcgcaagagtatcccaacattcttgtcactgcaggcttaaacgatccacgcgtgatgtactctgagcctgcgaaatacgtggcgaagctgagggagctgaagagagatgacaatcttgtgctgttcaagtgcgagctgggagctggacacttctccaaatcgggaaggttcgagaaattacaggaggatgcgtttacttatgcgttcatcctaaaggcgctgggcatgactcggaagctggcatcactgtgaattcgattggtgtgaggcacctggactggatttgtatcatggcctgccctcttggttgggggatggatggattctgatggaatatgcatttagatttgaatagggacacagatgttatgcaaaagagattgtttgaaactttgaattctgatttgcatttggatatctgtcctagaataattgtgcttctattattcaatatttgccccatttttaacctatggaccatataaattttgctattttctcctttcaaagtactacaatcattacatgttggtactagtattattttacaggagcatgtatgtaattttatagtgactggtttatgcacatcatataaatacgtttattttggaacagag

SEQ ID NO: 57985 - DNA, 2555 bp, Zea Mays
agaaaagctactcacaccaataagccaaagccaaacagcccttccttcgcagcgatggcggcggcggcgccgccggtggccaagaaggtcccgcggcagctcgttgagcacggcgacgtccgcgtcgacaactactactggctccgcgacgactctcgatccgacccggacgtcctcgcgcacctccgcgccgagaacgactacaccgccgccgtcatgtccgatgtcaagcaacttgaggatgaaatatatgctgaaatcagaggaagaataaaggaagatgatatagatgcgcctcttcgcaaagggcggtactactactatgaaaggacattgactggcaaggagtatgtgcaacactgtaggcgtcccgtatcgactgatgctcctattacagtccacgatgtgatgcccacaggacctgatgcccctgatgagcatattatcctggatgagaatgttaaggctgagggccacgactactacagcatcggagctttcaaggtcagtcccaacaacaagctagttgcttacgctgaagacactaaaggtgatgaaatctacacggtctatgtcattgacacggagagtggagaatacgttgggcaaccacttaaaggaattacttctgacattgagtgggctggtgacgaccacctcgtttacattacaatggatagtatacttcggccagataaagtatggctacataagttagggtctgaccaatcaagtgatgcttgtttgtatcatgagaaagatgatacattttctctaggccttcaagcttctgaaagcaagagatatttatttgttgaatctggaagcaaaaacacaagctttatattctacctggacatacccaaacagaacaaggaacttgctgttttgacacctcgtgtgtatggcattgatacaacagctagtcatcgtggaaatcatttctttattaagaggcgaagtgatgaattctacaattctgaattggttgcttgtccactggataatgtagctgagaccactatactgctaccacatagagaaagtgtgaaaatacaagacttccagctctttgacaaccatattgctgtatatgagcgtgagaatggccttcccaaagtgatcgtatatcggctacctgctattggagagtcaattggacaactccagggaggtcgagcgattgattttattgatccaacatatgctgtggaccctgaggagtctcagtttcattcatctgttctacgatttcattatagctcaatgcggactccaccctctgtttatgactatgatatggattcaggggtgtctgtgctgaagaagatccatactattttaggcggattcaatgcatcaaattatgtaacagaaagaaaatgggctgctgctgctgatggcactcaggtccccatgtccattctatacagaaatgatcttgtgaagcttgatggctcagaccctatgctactctatggctatggctcctatgagatatgcatagatccgagttttagagggtcacgattctctctggtagataggggctttatatatgtgatagctcatatccgcggtggtggtgaaatgggccggaagtggtacgaggatgggaaactgttgaagaagaaaaacactttcactgatttcattgattgtgctgagcacttgataaaaagcaagtactgctccagggaaaagctttgcattaatggcagaagcgcaggtggcttattgatgggtgctgtcctaaatatgaggcctgacttattcagggcagctgttgctggagtgccttttgttgatgttgtcacaactatgcttgatccaactatcccactgacaacagctgaatgggaggagtggggtgatccaagaaaagaagaattctattattacatgaaatcgtattctcctgttgacaatgtgatggcgcaagagtatcccaacattcttgtcactgcaggcttaaacgatccacgcgtgatgtactctgagcctgcgaaatacgtggcgaagctgagggagctgaagagagatgacaatcttgtgctgttcaagtgcgagctgggagctggacacttctccaaatcgggaaggttcgagaaattacaggaggatgcgtttacttatgcgttcatcctaaaggcgctgggcatgactcggaagctggcatcactgtgaattcgattggtgtgaggcacctggactggatttgtatcatggcctgccctcttggttgggggatggatggattctgatggaatatgcatttagatttgaatagggacacagatgttatgcaaaagagattgtttgaaactttgaattctgatttgcatttggatatctgtcctagaataattgtgcttctattattcaatatttgccccatttttaacctatggaccatataaattttgctattttctcctttcaaagtactacaatcattacatgttggtactagtattattttacaggagcatgtatgtaattttatagtgactggtttatgcacatcatataaatacgtttattttggaacagag

SEQ ID NO: 57986 - DNA, 2770 bp, Zea Mays
agaaaagctactcacaccaataagccaaagccaaacagcccttccttcgcagcgatggcggcggcggcgccgccggtggccaagaaggtcccgcggcagctcgttgagcacggcgacgtccgcgtcgacaactactactggctccgcgacgactctcgatccgacccggacgtcctcgcgcacctccgcgccgagaacgactacaccgccgccgtcatgtccgatgtcaagcaacttgaggatgaaatatatgctgaaatcagaggaagaataaaggaagatgatatagatgcgcctcttcgcaaagggcggtactactactatgaaaggacattgactggcaaggagtatgtgcaacactgtaggcgtcccgtatcgactgatgctcctattacagtccacgatgtgatgcccacaggacctgatgcccctgatgagcatattatcctggatgagaatgttaaggctgagggccacgactactacagcatcggagctttcaaggtcagtcccaacaacaagctagttgcttacgctgaagacactaaaggtgatgaaatctacacggtctatgtcattgacacggagagtggagaatacgttgggcaaccacttaaaggaattacttctgacattgagtgggctggtgacgaccacctcgtttacattacaatggatagtatacttcggccagataaagtatggctacataagttagggtctgaccaatcaagtgatgcttgtttgtatcatgagaaagatgatacattttctctaggccttcaagcttctgaaagcaagagatatttatttgttgaatctggaagcaaaaacacaagctttatattctacctggacatacccaaacagaacaaggaacttgctgttttgacacctcgtgtgtatggcattgatacaacagctagtcatcgtggaaatcatttctttattaagaggcgaagtgatgaattctacaattctgaattggttgcttgtccactggataatgtagctgagaccactatactgctaccacatagagaaagtgtgaaaatacaagacttccagctctttgacaaccatattgctgtatatgagcgtgagaatggccttcccaaagtgatcgtatatcggctacctgctattggagagtcaattggacaactccagggaggtcgagcgattgattttattgatccaacatatgctgtggaccctgaggagtctcagtttcattcatctgttctacgatttcattatagctcaatgcggactccaccctctgtttatgactatgatatggattcaggggtgtctgtgctgaagaagatccatactattttaggcggattcaatgcatcaaattatgtaacagaaagaaaatgggctgctgctgctgatggcactcaggtccccatgtccattctatacagaaatgatcttgtgaagcttgatggctcagaccctatgctactctatggctatggctcctatgaggaaccagcaatgtctaactagtagtaactgcatgtgacaacttggcatcgagactatgagatggttccaggtttcaggaataaatataatagaagttattgtgataaaaccgtgctcttgttttctttgttcttatggctacagatatgcatagatccgagttttagagggtcacgattctctctggtagataggggctttatatatgtgatagctcatatccgcggtggtggtgaaatgggccggaagtggtacgaggatgggaaactgttgaagaagaaaaacactttcactgatttcattgattgtgctgagcacttgataaaaagcaagtactgctccagggaaaagctttgcattaatggcagaagcgcaggtggcttattgatgggtgctgtcctaaatatgaggcctgacttattcagggcagctgttgctggagtgccttttgttgatgttgtcacaactatgcttgatccaactatcccactgacaacagctgaatgggaggagtggggtgatccaagaaaagaagaattctattattacatgaaatcgtattctcctgttgacaatgcaagtgcagatctttatttgtaaattgaaatattgcatcaccctgtgtcatttgtttgtggacgccacaggtgatggcgcaagagtatcccaacattcttgtcactgcaggcttaaacgatccacgcgtgatgtactctgagcctgcgaaatacgtggcgaagctgagggagctgaagagagatgacaatcttgtgctgttcaagtgcgagctgggagctggacacttctccaaatcgggaaggttcgagaaattacaggaggatgcgtttacttatgcgttcatcctaaaggcgctgggcatgactcggaagctggcatcactgtgaattcgattggtgtgaggcacctggactggatttgtatcatggcctgccctcttggttgggggatggatggattctgatggaatatgcatttagatttgaatagggacacagatgttatgcaaaagagattgtttgaaactttgaattctgatttgcatttggatatctgtcctagaataattgtgcttctattattcaatatttgccccatttttaacctatggaccatataaattttgctattttctcctttcaaagtactacaatcattacatgttggtactagtattattttacaggagcatgtatgtaattttatagtgactggtttatgcacatcatataaatacgtttattttggaacagag

SEQ ID NO: 57987 - DNA, 3098 bp, Zea Mays
agaaaagctactcacaccaataagccaaagccaaacagcccttccttcgcagcgatggcggcggcggcgccgccggtggccaagaaggtcccgcggcagctcgttgagcacggcgacgtccgcgtcgacaactactactggctccgcgacgactctcgatccgacccggacgtcctcgcgcacctccgcgccgagaacgactacaccgccgccgtcatgtccgcaacttgaggatgaaatatatgctgaaatcagaggaagaataaaggaagatgatatagatgcgcctcttcgcaaagggcggtactactactatgaaaggacattgactggcaaggagtatgtgcaacactgtaggcgtcccgtatcgactgatgctcctattacagtccacgatgtgatgcccacaggacctgatgcccctgatgagcatattatcctggatgagaatgttaaggctgagggccacgactactacagcatcggagctttcaaggtcagtcccaacaacaagctagttgcttacgctgaagacactaaaggtgatgaaatctacacggtctatgtcattgacacggagagtggagaatacgttgggcaaccacttaaaggaattacttctgacattgagtgggctggtgacgaccacctcgtttacattacaatggatagtatacttcggccagataaagtatggctacataagttagggtctgaccaatcaagtgatgcttgtttgtatcatgagaaagatgatacattttctctaggccttcaagcttctgaaagcaagagatatttatttgttgaatctggaagcaaaaacacaagctttatattctacctggacatacccaaacagaacaaggaacttgctgttttgacacctcgtgtgtatggcattgatacaacagctagtcatcgtggaaatcatttctttattaagaggcgaagtgatgaattctacaattctgaattggttgcttgtccactggataatgtagctgagaccactatactgctaccacatagagaaagtgtgaaaatacaagacttccagctctttgacaaccatattgctgtatatgagcgtgagaatggccttcccaaagtgatcgtatatcggctacctgctattggagagtcaattggacaactccagggaggtcgagcgattgattttattgatccaacatatgctgtggaccctgaggagtctcagtttcattcatctgttctacgatttcattatagctcaatgcggactccaccctctgtttatgactatgatatggattcaggggtgtctgtgctgaagaagatccatactattttaggcggattcaatgcatcaaattatgtaacagaaagaaaatgggctgctgctgctgatggcactcaggtccccatgtccattctatacagaaatgatcttgtgaagcttgatggctcagaccctatgctactctatggctatggctcctatgaggtacgttctgtttgtttattttcttttttgctatttggtaaactgtaataaggaatctttctgcaatttttaacacttcgaagtttgaacaaatttcaagattggcatgtacactgcgctagctgcagttataaatgcaggcttgtactgtagcatggcttgctgcagctgcaaccgcagcaagcactgctgagcaggctgatagtgatagtttatgtcaacttcctttggttcgtttgaaagtttgtgttcttctttatatgtgcatcatgtacagactatacttatttgctaatgtgctatcatgcattcattagctgttttattcatcattgttttcaaatgacaacaattctttagcattcagttattctagtgtttcctcgctgagaaagattccttggcaggaaccagcaatgtctaactagtagtaactgcatgtgacaacttggcatcgagactatgagatggttccaggtttcaggaataaatataatagaagttattgtgataaaaccgtgctcttgttttctttgttcttatggctacagatatgcatagatccgagttttagagggtcacgattctctctggtagataggggctttatatatgtgatagctcatatccgcggtggtggtgaaatgggccggaagtggtacgaggatgggaaactgttgaagaagaaaaacactttcactgatttcattgattgtgctgagcacttgataaaaagcaagtactgctccagggaaaagctttgcattaatggcagaagcgcaggtggcttattgatgggtgctgtcctaaatatgaggcctgacttattcagggcagctgttgctggagtgccttttgttgatgttgtcacaactatgcttgatccaactatcccactgacaacagctgaatgggaggagtggggtgatccaagaaaagaagaattctattattacatgaaatcgtattctcctgttgacaatgtgatggcgcaagagtatcccaacattcttgtcactgcaggcttaaacgatccacgcgtgatgtactctgagcctgcgaaatacgtggcgaagctgagggagctgaagagagatgacaatcttgtgctgttcaagtgcgagctgggagctggacacttctccaaatcgggaaggttcgagaaattacaggaggatgcgtttacttatgcgttcatcctaaaggcgctgggcatgactcggaagctggcatcactgtgaattcgattggtgtgaggcacctggactggatttgtatcatggcctgccctcttggttgggggatggatggattctgatggaatatgcatttagatttgaatagggacacagatgttatgcaaaagagattgtttgaaactttgaattctgatttgcatttggatatctgtcctagaataattgtgcttctattattcaatatttgccccatttttaacctatggaccatataaattttgctattttctcctttcaaagtactacaatcattacatgttggtactagtattattttacaggagcatgtatgtaattttatagtgactggtttatgcacatcatataaatacgtttattttggaacagag

SEQ ID NO: 57988 - DNA, 3106 bp, Zea Mays
agaaaagctactcacaccaataagccaaagccaaacagcccttccttcgcagcgatggcggcggcggcgccgccggtggccaagaaggtcccgcggcagctcgttgagcacggcgacgtccgcgtcgacaactactactggctccgcgacgactctcgatccgacccggacgtcctcgcgcacctccgcgccgagaacgactacaccgccgccgtcatgtccgatgtcaagcaacttgaggatgaaatatatgctgaaatcagaggaagaataaaggaagatgatatagatgcgcctcttcgcaaagggcggtactactactatgaaaggacattgactggcaaggagtatgtgcaacactgtaggcgtcccgtatcgactgatgctcctattacagtccacgatgtgatgcccacaggacctgatgcccctgatgagcatattatcctggatgagaatgttaaggctgagggccacgactactacagcatcggagctttcaaggtcagtcccaacaacaagctagttgcttacgctgaagacactaaaggtgatgaaatctacacggtctatgtcattgacacggagagtggagaatacgttgggcaaccacttaaaggaattacttctgacattgagtgggctggtgacgaccacctcgtttacattacaatggatagtatacttcggccagataaagtatggctacataagttagggtctgaccaatcaagtgatgcttgtttgtatcatgagaaagatgatacattttctctaggccttcaagcttctgaaagcaagagatatttatttgttgaatctggaagcaaaaacacaagctttatattctacctggacatacccaaacagaacaaggaacttgctgttttgacacctcgtgtgtatggcattgatacaacagctagtcatcgtggaaatcatttctttattaagaggcgaagtgatgaattctacaattctgaattggttgcttgtccactggataatgtagctgagaccactatactgctaccacatagagaaagtgtgaaaatacaagacttccagctctttgacaaccatattgctgtatatgagcgtgagaatggccttcccaaagtgatcgtatatcggctacctgctattggagagtcaattggacaactccagggaggtcgagcgattgattttattgatccaacatatgctgtggaccctgaggagtctcagtttcattcatctgttctacgatttcattatagctcaatgcggactccaccctctgtttatgactatgatatggattcaggggtgtctgtgctgaagaagatccatactattttaggcggattcaatgcatcaaattatgtaacagaaagaaaatgggctgctgctgctgatggcactcaggtccccatgtccattctatacagaaatgatcttgtgaagcttgatggctcagaccctatgctactctatggctatggctcctatgaggtacgttctgtttgtttattttcttttttgctatttggtaaactgtaataaggaatctttctgcaatttttaacacttcgaagtttgaacaaatttcaagattggcatgtacactgcgctagctgcagttataaatgcaggcttgtactgtagcatggcttgctgcagctgcaaccgcagcaagcactgctgagcaggctgatagtgatagtttatgtcaacttcctttggttcgtttgaaagtttgtgttcttctttatatgtgcatcatgtacagactatacttatttgctaatgtgctatcatgcattcattagctgttttattcatcattgttttcaaatgacaacaattctttagcattcagttattctagtgtttcctcgctgagaaagattccttggcaggaaccagcaatgtctaactagtagtaactgcatgtgacaacttggcatcgagactatgagatggttccaggtttcaggaataaatataatagaagttattgtgataaaaccgtgctcttgttttctttgttcttatggctacagatatgcatagatccgagttttagagggtcacgattctctctggtagataggggctttatatatgtgatagctcatatccgcggtggtggtgaaatgggccggaagtggtacgaggatgggaaactgttgaagaagaaaaacactttcactgatttcattgattgtgctgagcacttgataaaaagcaagtactgctccagggaaaagctttgcattaatggcagaagcgcaggtggcttattgatgggtgctgtcctaaatatgaggcctgacttattcagggcagctgttgctggagtgccttttgttgatgttgtcacaactatgcttgatccaactatcccactgacaacagctgaatgggaggagtggggtgatccaagaaaagaagaattctattattacatgaaatcgtattctcctgttgacaatgtgatggcgcaagagtatcccaacattcttgtcactgcaggcttaaacgatccacgcgtgatgtactctgagcctgcgaaatacgtggcgaagctgagggagctgaagagagatgacaatcttgtgctgttcaagtgcgagctgggagctggacacttctccaaatcgggaaggttcgagaaattacaggaggatgcgtttacttatgcgttcatcctaaaggcgctgggcatgactcggaagctggcatcactgtgaattcgattggtgtgaggcacctggactggatttgtatcatggcctgccctcttggttgggggatggatggattctgatggaatatgcatttagatttgaatagggacacagatgttatgcaaaagagattgtttgaaactttgaattctgatttgcatttggatatctgtcctagaataattgtgcttctattattcaatatttgccccatttttaacctatggaccatataaattttgctattttctcctttcaaagtactacaatcattacatgttggtactagtattattttacaggagcatgtatgtaattttatagtgactggtttatgcacatcatataaatacgtttattttggaacagag

SEQ ID NO: 57989 - DNA, 2063 bp, Zea Mays
aaatattttacctccctcgactataacaaaaaaacagtttttctcgttttttttctttttatgtttggtttgatttaatctttaaaaattacattaaaacacaggaaaatcataaaataaaaaatactaaacttcacataagtagatatatacattaaacatagtatatgatatattttattatacttttgtataactttagatttatattttttataattaattcacaactaccaaaatttgatgtttgatttatatctacataaaattagataagtcatacataattcaataagaatacttcgtatggtttttagtttttttctgccctacatgtttatttttaactaactaaagatgatggacactttatgtgacagcgtatgctaacggatccggcgggccctgcaacggcgcggcagcaggataagaggacgcggcgcgcgcatccacaagcagcggaggagcccgaccacgccagtgagcccgcccgattcgccgtcgcggcggccacgtttcccctccaatggccaccagctccaccgccttgctgcaccttgtcataccggcctcccgccgccgccggcacttggtgcctcgggccgcacactccgagtccgccccgcccgccgcctccgtcgaccgccgccgcttcatcgcccacaccgccgccgcggccgccgtctcccctctcgtcttgccccgctggacccccgcggctcgcgcggacgaagcgccggcgctctccgagtgggagcgcatcttcctgcccatcgactccggcgtcgtcctcctcgacatcgccttcgtcccagacgacccctcccatgaggtgattcaggttttctccttggaacaagacagacaatactggagacgaaagacggcggcaacacctggttccctcgctccatcccttccgcagaggacgaagatttcaactacaggttcaactcggtaagcttcaagggcagagagggatggattatcggcaagcctgcaattctactgcacacctcagatgctggcgagagctgggaaagaatacccctgagtgcccaacttcctgggaacatggtttacataaaagctactggggagcagagcgcagagatggttaccgatgagggagcaatctatgttacctctaaccgtggatacaactggaaggctgccgtgcaggagaccgtttcagctactctgaacagaacagtttcaagtggcattagcggtgcaagctactacactgggactttcaacacggtgaacagatcggccgacgggcgctacgtggctgtgtccagccgagggaacttctatctgacgtgggagcccgggcagccgttctggcaaccccacaacagggcggtggcacggaggattcagaacatggggtggagagcggacggtggactttggctgctggtgcgcggtggtggcctcttcctcagcagaggaaccgggataactgaagattttgaggaggtgcaggtgcagagccgggggtttgggatcctggacgtgggctaccgctcgcaggaggaggcctgggctgctggtggcagcggcgtgctgctcaagaccacaaacggagggaagagctggatgcgcgacaaggctgccgacaacatcgccgccaatctctactccgtcaagttccttgatgacaggaaaggcttcgtgctgggcaacgacggcgtgttgcttcggtatcttggctgacattctatgtatatgtgtgtacagcgaacggcatgtgctgctgctactactactgtaaaaggctgcttactgtgcttgcgttctctcttctgcaacccaaattgagtgtaaagatgcatgtgctgcttgctaggaacttgaaaaccttgtatacccgtatctactatctatatatatgctaccttgttgcaaacaaccctcaaaccattgagaagctctccattctcaatgcctgggacaaatcattctactcaatctatttgcatttttctacgaagacccatattaacaaaggccatctttcagagccaataaaattccctgcatattgcaatcttgac

SEQ ID NO: 57990 - DNA, 1727 bp, Zea Mays
ctgccctacatgtttatttttaactaactaaagatgatggacactttatgtgacagcgtatgctaacggatccggcgggccctgcaacggcgcggcagcaggataagaggacgcggcgcgcgcatccacaagcagcggaggagcccgaccacgccagtgagcccgcccgattcgccgtcgcggcggccacgtttcccctccaatggccaccagctccaccgccttgctgcaccttgtcataccggcctcccgccgccgccggcacttggtgcctcgggccgcacactccgagtccgccccgcccgccgcctccgtcgaccgccgccgcttcatcgcccacaccgccgccgcggccgccgtctcccctctcgtcttgccccgctggacccccgcggctcgcgcggacgaagcgccggcgctctccgagtgggagcgcatcttcctgcccatcgactccggcgtcgtcctcctcgacatcgccttcgtcccagacgacccctcccatggttttctccttggaacaagacagacaatactggagacgaaagacggcggcaacacctggttccctcgctccatcccttccgcagaggacgaagatttcaactacaggttcaactcggtaagcttcaagggcagagagggatggattatcggcaagcctgcaattctactgcacacctcagatgctggcgagagctgggaaagaatacccctgagtgcccaacttcctgggaacatgtttacataaaagctactggggagcagagcgcagagatggttaccgatgagggagcaatctatgttacctctaaccgtggatacaactggaaggctgccgtgcaggagaccgtttcagctactctgaacagaacagtttcaagtggcattagcggtgcaagctactacactgggactttcaacacggtgaacagatcggccgacgggcgctacgtggctgtgtccagccgagggaacttctatctgacgtgggagcccgggcagccgttctggcaaccccacaacagggcggtggcacggaggattcagaacatggggtggagagcggacggtggactttggctgctggtgcgcggtggtggcctcttcctcagcagaggaaccgggataactgaagattttgaggaggtgcaggtgcagagccgggggtttgggatcctggacgtgggctaccgctcgcaggaggaggcctgggctgctggtggcagcggcgtgctgctcaagaccacaaacggagggaagagctggatgcgcgacaaggctgccgacaacatcgccgccaatctctactccgtcaagttccttgatgacaggaaaggcttcgtgctgggcaacgacggcgtgttgcttcggtatcttggctgacattctatgtatatgtgtgtacagcgaacggcatgtgctgctgctactactactgtaaaaggctgcttactgtgcttgcgttctctcttctgcaacccaaattgagtgtaaagatgcatgtgctgcttgctaggaacttgaaaaccttgtatacccgtatctactatctatatatatgctaccttgttgcaaacaaccctcaaaccattgagaagctctccattctcaatgcctgggacaaatcattctactcaatctatttgcatttttctacgaagacccatattaacaaaggccatctttcagagccaataaaattccctgcatattgcaatcttgac

SEQ ID NO: 57991 - DNA, 1023 bp, Zea Mays
cgcgcgccaccgcgcttctaacatatggggccgcttggccagccgcaccacgtgccgctcacacccgatctcgcaagcttccactgattgcccagacccgcgtgcgagcctccgtgcgcggttcaccgtttctccgtcgctgtcgtgtgccactgcatgtggacctagcatgtcagtggctcttcccgcgcgaatctcttgttccggcgtaacggacttcgcaatcgtcggccgccaccgctattcccctgcttccgtgtgcgtcgtggcttcggcccttatatgacggcaccatgaccgctctgccttcgtggctaacttggagcgggtgagaaaacgccaatgccatgagtcgtgggaggggaagaactcgcgccaccaccgtcatcttgttcgcatcgccgctcgaggcctttgacggggtcggggtgcatcgccggtgcaccctgagcacgagggtggaggttgagggcatcggagttggaggcttccctggaattgctcgtcggagctttcactgtcgtgctgtgccttagtccaccgcgggccgagctaccgcgcgcgccaccttcggagaagaacaagtggtccaggaggaggcctacaacgaggagtacaagcttatctaggtggtgtctcccagtcatcttgatggcgcccaggaataattattagttggctttatttttatcatttatttttgtaagactcttccactatgtaataataatatttgtgacatttatctctatacacttggtcattgtatgtgttgtttttctttagcgcatatatgagacgcacccagctttaccccttaaatctgggtgtgacaaaagtggtatcagaggcaaatgttgactgtaggacaaaacctagatagaactggataaaacccttacctacttacctttactctgattctttctgtacttttcttgatccggtctcagctttggcttttctactctgactactcttaccttttctactctagaaagacgagaaggatttcacaccttg

SEQ ID NO: 57992 - DNA, 1017 bp, Zea Mays
cgcgcgccaccgcgcttctaacatatggggccgcttggccagccgcaccacgtgccgctcacacccgatctcgcaagcttccactgattgcccagacccgcgtgcgagcctccgtgcgcggttcaccgtttctccgtcgctgtcgtgtgccactgcatgtggacctagcatgtcagtggctcttcccgcgcgaatctcttgttccggcgtaacggacttcgcaatcgtcggccgccaccgctattcccctgcttccgtgtgcgtcgtggcttcggcccttatatgacggcaccatgaccgctctgccttcgtggctaacttggagcgggtgagaaaacgccaatgccatgagtcgtgggaggggaagaactcgcgccaccaccgtcatcttgttcgcatcgccgctcgaggcctttgacggggtcggggtgcatcgccggtgcaccctgagcacgagggtggaggttgagggcatcggagttggaggcttccctggaattgctcgtcggagctttcactgtcgtgctgtgccttagtccaccgcgggccgagctaccgcgcgcgccaccttcgaacaagtggtccaggaggaggcctacaacgaggagtacaagcttatctaggtggtgtctcccagtcatcttgatggcgcccaggaataattattagttggctttatttttatcatttatttttgtaagactcttccactatgtaataataatatttgtgacatttatctctatacacttggtcattgtatgtgttgtttttctttagcgcatatatgagacgcacccagctttaccccttaaatctgggtgtgacaaaagtggtatcagaggcaaatgttgactgtaggacaaaacctagatagaactggataaaacccttacctacttacctttactctgattctttctgtacttttcttgatccggtctcagctttggcttttctactctgactactcttaccttttctactctagaaagacgagaaggatttcacaccttg

SEQ ID NO: 57993 - DNA, 2049 bp, Zea Mays
cgcgcgccaccgcgcttctaacatatggggccgcttggccagccgcaccacgtgccgctcacacccgatctcgcaagcttccactgattgcccagacccgcgtgcgagcctccgtgcgcggttcaccgtttctccgtcgctgtcgtgtgccactgcatgtggacctagcatgtcagtggctcttcccgcgcgaatctcttgttccggcgtaacggacttcgcaatcgtcggccgccaccgctattcccctgcttccgtgtgcgtcgtggcttcggcccttatatgacggcaccatgaccgctctgccttcgtggctaacttggagcgggtgagaaaacgccaatgccatgagtcgtgggaggggaagaactcgcgccaccaccgtcatcttgttcgcatcgccgctcgaggcctttgacggggtcggggtgcatcgccggtgcaccctgagcacgagggtggaggttgagggcatcggagttggaggcttccctggaattgctcgtcggagctttcactgtcgtgctgtgccttagtccaccgcgggccgagctaccgcgcgcgccaccttcgacgggcaagtgactgaggacccagaggctcagcaggtggaaaatactgagcaggagctcgttgaaggcaaattgtgcccttgatcacttctatttacccaataatgttcatgttaatcattatgatttgtataggttaattttgatgagacccaataggtcaccccagtttggctatctttataccttgtttaccactaaacttttgggtagtacctgctattgctttatgtggttttgggtgttaagatacaaattattcatgatcatgcttttattatcaatttgttatttactgttcatgacaagatcattatgttaattggaacatggagttaccacccgagaaaatagtgctaccacaagggtggtatgggacgccattggctgactaattagtaaagctagtggaggactaccttaccaaaagggcaagggtagtaggggagtggtcggtttagggaggttatcgggttgattttgttgcgatggcttttcagacgggggattccaatgctgcgctccctagaaattgtagcgggttttctgaagctactgaaactttgtaaaggcttcgtagtgttaccctacctcgcttccttggtagaggtgtatgggattcatgaccccttggtagatgggtaacatggctcatgggtaaagatgtgcaacctctgcagagtgtaaaactggtatatcagtcgtgctcacggccatgagtggctcggaccctcacatgagtaacttatggaattaaattcaactggtcatttgcatcgcattgtggtttatcattaattttggtctattattactctggtttggtatatacttatacttagtaactgctaataaaatttgaccaacttattaaaagcaatgctcaactttaaccattatttgttgatcagccttacacttcacatgagctcccacctttggtgagttcatgcacatcattccgcacaacttgttgagctatgatcttttgtgagctcacccttgtgatatataaacccccccataggagaagaacaagtggtccaggaggaggcctacaacgaggagtacaagcttatctaggtggtgtctcccagtcatcttgatggcgcccaggaataattattagttggctttatttttatcatttatttttgtaagactcttccactatgtaataataatatttgtgacatttatctctatacacttggtcattgtatgtgttgtttttctttagcgcatatatgagacgcacccagctttaccccttaaatctgggtgtgacaaaagtggtatcagaggcaaatgttgactgtaggacaaaacctagatagaactggataaaacccttacctacttacctttactctgattctttctgtacttttcttgatccggtctcagctttggcttttctactctgactactcttaccttttctactctagaaagacgagaaggatttcacaccttg

SEQ ID NO: 57994 - DNA, 2974 bp, Zea Mays
cgcgcgccaccgcgcttctaacatatggggccgcttggccagccgcaccacgtgccgctcacacccgatctcgcaagcttccactgattgcccagacccgcgtgcgagcctccgtgcgcggttcaccgtttctccgtcgctgtcgtgtgccactgcatgtggacctagcatgtcagtggctcttcccgcgcgaatctcttgttccggcgtaacggacttcgcaatcgtcggccgccaccgctattcccctgcttccgtgtgcgtcgtggcttcggcccttatatgacggcaccatgaccgctctgccttcgtggctaacttggagcgggtgagaaaacgccaatgccatgagtcgtgggaggggaagaactcgcgccaccaccgtcatcttgttcgcatcgccgctcgaggcctttgacggggtcggggtgcatcgccggtgcaccctgagcacgagggtggaggttgagggcatcggagttggaggcttccctggaattgctcgtcggagctttcactgtcgtgctgtgccttagtccaccgcgggccgagctaccgcgcgcgccaccttcggtgagtacatgctcccttgtctctatttgatcagagtggcgtgttgcgaccgtggaatggagtgtagggcattagatttggaggatcgcggtcaccggtaatggcacgccaccgtcgcgccgctgtttcatcgtcggggtcgagtctaagctgggtgttgaggctcggttgttgaatttgcgatgggcgatcaggagtagatctgggctcattgtttcgctcgattagatctggggcgtcgattcggtaatggacggtttaggtcagctcggggcgggatcgtccttcattctttgatttcggatcagacgatcatgaaggattacacgtttatgaatcgtatatatttaatcttggtcgtcgggcgttgatcgaacggtcagtgtctcaggataccccttcggcgcaggcgttttacaaaagagggcttagacttttagaaaattaacccgccggtccatagtagtgttagaacaattatggtgaggccctaaaatttatgatttcatccctaaactccctggtaatcatgcgcgcagtacagaaagctagtaaatggagtaaaaattatagaaaatgatttttagtattaaaataattccagaacttgcttaattcttagaaaatccattttaattccttttttattcattctagttgcattaattttgtattaatatttattatgacctggtaactctgttttagcatggaacatagattaaaattatttacttggtttattctatatcaaacatgtagaaacttcggaaaatcataactctttaaccataactccgaatttagtgattctcaaacctacgatctcgtttcgatacgtagaatattattatgcagtatgttctcatgtttggtgtgatgttaatttctcatgtatcatgtttgcttgtattgttgcgagtagacgggcaagtgactgaggacccagaggctcagcaggtggaaaatactgagcaggagctcgttgaaggcaaattgtgcccttgatcacttctatttacccaataatgttcatgttaatcattatgatttgtataggttaattttgatgagacccaataggtcaccccagtttggctatctttataccttgtttaccactaaacttttgggtagtacctgctattgctttatgtggttttgggtgttaagatacaaattattcatgatcatgcttttattatcaatttgttatttactgttcatgacaagatcattatgttaattggaacatggagttaccacccgagaaaatagtgctaccacaagggtggtatgggacgccattggctgactaattagtaaagctagtggaggactaccttaccaaaagggcaagggtagtaggggagtggtcggtttagggaggttatcgggttgattttgttgcgatggcttttcagacgggggattccaatgctgcgctccctagaaattgtagcgggttttctgaagctactgaaactttgtaaaggcttcgtagtgttaccctacctcgcttccttggtagaggtgtatgggattcatgaccccttggtagatgggtaacatggctcatgggtaaagatgtgcaacctctgcagagtgtaaaactggtatatcagtcgtgctcacggccatgagtggctcggaccctcacatgagtaacttatggaattaaattcaactggtcatttgcatcgcattgtggtttatcattaattttggtctattattactctggtttggtatatacttatacttagtaactgctaataaaatttgaccaacttattaaaagcaatgctcaactttaaccattatttgttgatcagccttacacttcacatgagctcccacctttggtgagttcatgcacatcattccgcacaacttgttgagctatgatcttttgtgagctcacccttgtgatatataaacccccccataggagaagaacaagtggtccaggaggaggcctacaacgaggagtacaagcttatctaggtggtgtctcccagtcatcttgatggcgcccaggaataattattagttggctttatttttatcatttatttttgtaagactcttccactatgtaataataatatttgtgacatttatctctatacacttggtcattgtatgtgttgtttttctttagcgcatatatgagacgcacccagctttaccccttaaatctgggtgtgacaaaagtggtatcagaggcaaatgttgactgtaggacaaaacctagatagaactggataaaacccttacctacttacctttactctgattctttctgtacttttcttgatccggtctcagctttggcttttctactctgactactcttaccttttctactctagaaagacgagaaggatttcacaccttg

SEQ ID NO: 57995 - DNA, 3567 bp, Zea Mays
gccgtcccctgggttctgtctggggagcaggagcagcagtcgccgagagcaacccaaagcaagctgcagttcgtaagaggatcaggggccggcgccggaggagatcccccgcgctatttggagctccccaagaaatgccgtgtgcactagaagtgattgatgcaaggttacagagcacatcacatattcagtgcagcagatcatttgaccaaaacattggaagacgcttttcaaagggccatctgatacaaaaacctgttgccatttgtcctgagaacagtgacacctcatcaacaatacttctgtttcggcacgatccagactggaaacaagcaccattcttgtctgacactcaagaggtcaacaagccaaatgaaaagaacatgcatgatcaggttgattcttctaaaccagtttccaatggaaacacacatgggggaagcacctttagacaatctcagcaaagggaaaacgtttgtaattcattgatggcagttcctccctgccatgtagttgcaaagaagtactccaggtctgttgctactgctctgagtctgggatctgattctgatattttgcacaacggtgacaagcttccaaaaaggaattctagaaagagaggaaaacagtgcaagcgaacaatccgcaaaaggctgaatttggcatcagaaaccatttttgaagagagtacttatggtgcttctcctgcggaggtagttccgaccaatttactggttgataagttgtcagagaccacatcctctgctagctcattggttaaaactgatggtcggtacaaggaggaccatgtggaatgtggtattatgttgaatttagctacattgggaactgatgagatggatggttctggatgtgctggttcatcttataatgatgcaggagggagattaagctccagttgtgtttcttacttgaatgacaaatccaatacgacagattcttcagaatttgacggatccaccttcactgaacatggcttgggagaagaaagcaatagctaccagaagttaacatgcccctatgtttataatcccagttatgcaaccatggattccatctttagtaggtggaacagcgacaacagtgggaactacagtgtcgatgttgaggctaggttaaccgtcaaagacgaaaatagacatgatcattcgaaactgggggcttccacagggcggagtaatgtgaggatggaatgccagttgatagggtcatgttttagtgctactcatgctgaagacacaaacgatcctctagggatcagatcatactcctctaaggatgttactgatagttgtagccatactgaaatggttcagtgcagcagcaagtcctttcattttaaatcagggaggaggaacataaaatcaagtaaaacaccaagctatgttgatttgactgcgtctaacagagtgagaggttctaataggcacaagaacaatggaaaagatagttcagcagtgtggcagaaagtagaaaggaatgacaagatggtatctaaagcaggccatccgagcgatacacctgttcatgataagggtgcaaatgaagttggtaagaagggtgtacaggaagatccaacaagaattcgggcaaaacataatccgaataagaaagtgtgcaaacagaagccttcaaatggagcagttgaattggagcctgccaaaggagaagatgcattgaactcatgccatacattttctggacctttctacacgaagcaagcaccctttctacgccagcaaagaaactctttttcgaaacaaggttctcagtcattgaaaaactactgtgctcctaggaatggtatccccaaggtggcaaaggattacttgcagcaagaagaattacctatgttggtgctagttcatgccaagaacaccagtgataaatcaagctcatattcaagttcagctgatgaagttggtctaactggagtcagcaacaactatccaactgagggaaatgagagttcacaacctgatattgaggtagcagcgtcagtatcttgcaacttggttccagatttggctccacaagctgcttctgatgatttccacatatcagatcctcactctttacgtcctgaaaacaagggtgcatccaacagtcggagctccaataacttgtgcacagatccttttgctgcagaagcaaaggaagctcgatgtgtgaagctactaacagagaataattcccaagaaccctcagataatgcagctgagaccgattacagcaagatgaaagaagtcatcagctatgtttacacagcacagcagcgagtggaagacatccaactttgcattggtaggcctattgctgattttgaaaattttgtttactctgcttctccagttgtgcactgcagctcgtgctctgttggctgtaaatcttgcctgcaagaatgtgtgaaggatggcttatgtttgcatcagactccagatatcactctaagaactgtctggcagtggtacgaagagcctagttgctatggtttggatgtaaaggcacaagatctctggaggtcaaaagccttgtggaatagtcattgtcagtttacaacatattttgtaccatatctatctgctgttcaactcttcagtcaacctaaaagaaccagtggtggaagcattgataaggaatcaatccatagggatgtgacatgtgaaacatctccacagctgaacctgcccccaatatttgcaaagctttttccaaaacaatctgttccagtaaataaaccatctactctgcgtactgaagatgatcaacagtcagcagatggggagctggtatttgaattttttgaatatgaacagccatactcacggcgacaattatttgacaaggtaaatgagctgattgccggtgcgaaaccgtcaaattgccaaatatctggggacccaaagaatctggaggccagcctgcatgatctccatccagcgtcttggtatgctctcttttcatggaacgtgcacttgtatctggtattgtgttgcatggtatcccatataccggatacctgatggaaaattccaggctacattcttgacatatcactctcttggccactggattcgtcggagcagctcagcaggtggggccgctgttttgccagtcatgggcctgcagtcttacaatgccaaggcagagtggtggtttgagatgagcaagtccgaatctgaaggcgggcagtcgcaggccagtgaagcatccgagattctgaaggagagatcgcgcacgctgagtgaggctgcggccgtgttgtccagggccagcgtgctgaagaatgggcagatgagtagaaacagacatccagactacgagttcttcctctcccggagctgatttggaagtgcctcttcgtactcggatttagttaggtttcagtgtatgtatgtgttgttgacactaaagcttattctgcaaccgatgactggaagctgtttgcttagcttagcttagcaatataataataatgctagtcagttctcatccaagtgtcatgtcactgttattgaagtagatcagagatgaaacaggaaggac

SEQ ID NO: 57996 - DNA, 3474 bp, Zea Mays
ctgggttctgtctggggagcaggagcagcagtcgccgagagcaacccaaagcaagctgcaggctccccaagaaatgccgtgtgcactagaagtgattgatgcaaggttacagagcacatcacatattcagtgcagcagatcatttgaccaaaacattggaagacgcttttcaaagggccatctgatacaaaaacctgttgccatttgtcctgagaacagtgacacctcatcaacaatacttctgtttcggcacgatccagactggaaacaagcaccattcttgtctgacactcaagaggtcaacaagatcagccaaatgaaaagaacatgcatgatcaggttgattcttctaaaccagtttccaatggaaacacacatgggggaagcacctttagacaatctcagcaaagggaaaacgtttgtaattcattgatggcagttcctccctgccatgtagttgcaaagaagtactccaggtctgttgctactgctctgagtctgggatctgattctgatattttgcacaacggtgacaagcttccaaaaaggaattctagaaagagaggaaaacagtgcaagcgaacaatccgcaaaaggctgaatttggcatcagaaaccatttttgaagagagtacttatggtgcttctcctgcggaggtagttccgaccaatttactggttgataagttgtcagagaccacatcctctgctagctcattggttaaaactgatggtcggtacaaggaggaccatgtggaatgtggtattatgttgaatttagctacattgggaactgatgagatggatggttctggatgtgctggttcatcttataatgatgcaggagggagattaagctccagttgtgtttcttacttgaatgacaaatccaatacgacagattcttcagaatttgacggatccaccttcactgaacatggcttgggagaagaaagcaatagctaccagaagttaacatgcccctatgtttataatcccagttatgcaaccatggattccatctttagtaggtggaacagcgacaacagtgggaactacagtgtcgatgttgaggctaggttaaccgtcaaagacgaaaatagacatgatcattcgaaactgggggcttccacagggcggagtaatgtgaggatggaatgccagttgatagggtcatgttttagtgctactcatgctgaagacacaaacgatcctctagggatcagatcatactcctctaaggatgttactgatagttgtagccatactgaaatggttcagtgcagcagcaagtcctttcattttaaatcagggaggaggaacataaaatcaagtaaaacaccaagctatgttgatttgactgcgtctaacagagtgagaggttctaataggcacaagaacaatggaaaagatagttcagcagtgtggcagaaagtagaaaggaatgacaagatggtatctaaagcaggccatccgagcgatacacctgttcatgataagggtgcaaatgaagttggtaagaagggtgtacaggaagatccaacaagaattcgggcaaaacataatccgaataagaaagtgtgcaaacagaagccttcaaatggagcagttgaattggagcctgccaaaggagaagatgcattgaactcatgccatacattttctggacctttctacacgaagcaagcaccctttctacgccagcaaagaaactctttttcgaaacaaggttctcagtcattgaaaaactactgtgctcctaggaatggtatccccaaggtggcaaaggattacttgcagcaagaagaattacctatgttggtgctagttcatgccaagaacaccagtgataaatcaagctcatattcaagttcagctgatgaagttggtctaactggagtcagcaacaactatccaactgagggaaatgagagttcacaacctgatattgaggtagcagcgtcagtatcttgcaacttggttccagatttggctccacaagctgcttctgatgatttccacatatcagatcctcactctttacgtcctgaaaacaagggtgcatccaacagtcggagctccaataacttgtgcacagatccttttgctgcagaagcaaaggaagctcgatgtgtgaagctactaacagagaataattcccaagaaccctcagataatgcagctgagaccgattacagcaagatgaaagaagtcatcagctatgtttacacagcacagcagcgagtggaagacatccaactttgcattggtaggcctattgctgattttgaaaattttgtttactctgcttctccagttgtgcactgcagctcgtgctctgttggctgtaaatcttgcctgcaagaatgtgtgaaggatggcttatgtttgcatcagactccagatatcactctaagaactgtctggcagtggtacgaagagcctagttgctatggtttggatgtaaaggcacaagatctctggaggtcaaaagccttgtggaatagtcattgtcagtttacaacatattttgtaccatatctatctgctgttcaactcttcagtcaacctaaaagaaccagtggtggaagcattgataaggaatcaatccatagggatgtgacatgtgaaacatctccacagctgaacctgcccccaatatttgcaaagctttttccaaaacaatctgttccagtaaataaaccatctactctgcgtactgaagatgatcaacagtcagcagatggggagctggtatttgaattttttgaatatgaacagccatactcacggcgacaattatttgacaaggtaaatgagctgattgccggtgcgaaaccgtcaaattgccaaatatctggggacccaaagaatctggaggccagcctgcatgatctccatccagcgtcttggtattgtgttgcatggtatcccatataccggatacctgatggaaaattccaggctacattcttgacatatcactctcttggccactggattcgtcggagcagctcagcaggtggggccgctgttttgccagtcatgggcctgcagtcttacaatgccaaggcagagtggtggtttgagatgagcaagtccgaatctgaaggcgggcagtcgcaggccagtgaagcatccgagattctgaaggagagatcgcgcacgctgagtgaggctgcggccgtgttgtccagggccagcgtgctgaagaatgggcagatgagtagaaacagacatccagactacgagttcttcctctcccggagctgatttggaagtgcctcttcgtactcggatttagttaggtttcagtgtatgtatgtgttgttgacactaaagcttattctgcaaccgatgactggaagctgtttgcttagcttagcttagcaatataataataatgctagtcagttctcatccaagtgtcatgtcactgttattgaagtagatcagagatgaaacaggaaggac

SEQ ID NO: 57997 - DNA, 3680 bp, Zea Mays
ctgggttctgtctggggagcaggagcagcagtcgccgagagcaacccaaagcaagctgcagttcgtaagaggatcaggggccggcgccggaggagatcccccgcgctatttggagctccccaagaaatgccgtgtgcactagaagtgattgatgcaaggttacagagcacatcacatattcagtgcagcagatcatttgaccaaaacattggaagacgcttttcaaagggccatctgatacaaaaacctgttgccatttgtcctgagaacagtgacacctcatcaacaatacttctgtttcggcacgatccagactggaaacaagcaccattcttgtctgacactcaagaggtcaacaagccaaatgaaaagaacatgcatgatcaggttgattcttctaaaccagtttccaatggaaacacacatgggggaagcacctttagacaatctcagcaaagggaaaacgtttgtaattcattgatggcagttcctccctgccatgtagttgcaaagaagtactccaggtctgttgctactgctctgagtctgggatctgattctgatattttgcacaacggtgacaagcttccaaaaaggaattctagaaagagaggaaaacagtgcaagcgaacaatccgcaaaaggctgaatttggcatcagaaaccatttttgaagagagtacttatggtgcttctcctgcggaggtagttccgaccaatttactggttgataagttgtcagagaccacatcctctgctagctcattggttaaaactgatggtcggtacaaggaggaccatgtggaatgtggtattatgttgaatttagctacattgggaactgatgagatggatggttctggatgtgctggttcatcttataatgatgcaggagggagattaagctccagttgtgtttcttacttgaatgacaaatccaatacgacagattcttcagaatttgacggatccaccttcactgaacatggcttgggagaagaaagcaatagctaccagaagttaacatgcccctatgtttataatcccagttatgcaaccatggattccatctttagtaggtggaacagcgacaacagtgggaactacagtgtcgatgttgaggctaggttaaccgtcaaagacgaaaatagacatgatcattcgaaactgggggcttccacagggcggagtaatgtgaggatggaatgccagttgatagggtcatgttttagtgctactcatgctgaagacacaaacgatcctctagggatcagatcatactcctctaaggatgttactgatagttgtagccatactgaaatggttcagtgcagcagcaagtcctttcattttaaatcagggaggaggaacataaaatcaagtaaaacaccaagctatgttgatttgactgcgtctaacagagtgagaggttctaataggcacaagaacaatggaaaagatagttcagcagtgtggcagaaagtagaaaggaatgacaagatggtatctaaagcaggccatccgagcgatacacctgttcatgataagggtgcaaatgaagttggtaagaagggtgtacaggaagatccaacaagaattcgggcaaaacataatccgaataagaaagtgtgcaaacagaagccttcaaatggagcagttgaattggagcctgccaaaggagaagatgcattgaactcatgccatacattttctggacctttctacacgaagcaagcaccctttctacgccagcaaagaaactctttttcgaaacaaggttctcagtcattgaaaaactactgtgctcctaggaatggtatccccaaggtggcaaaggattacttgcagcaagaagaattacctatgttggtgctagttcatgccaagaacaccagtgataaatcaagctcatattcaagttcagctgatgaagttggtctaactggagtcagcaacaactatccaactgagggaaatgagagttcacaacctgatattgaggtagcagcgtcagtatcttgcaacttggttccagatttggctccacaagctgcttctgatgatttccacatatcagatcctcactctttacgtcctgaaaacaagggtgcatccaacagtcggagctccaataacttgtgcacagatccttttgctgcagaagcaaaggaagctcgatgtgtgaagctactaacagagaataattcccaagaaccctgtaagtggtattctgctgctggacacttgtcacagaagtgggttcctgttggaaagaaagagacttgcaatgggatctgtttagatgtctcagctaatggtgatgacagcaacttgcctagtgaaaggacttataaactgaacttatctgaacatgctgcagcagataatgcagctgagaccgattacagcaagatgaaagaagtcatcagctatgtttacacagcacagcagcgagtggaagacatccaactttgcattggtaggcctattgctgattttgaaaattttgtttactctgcttctccagttgtgcactgcagctcgtgctctgttggctgtaaatcttgcctgcaagaatgtgtgaaggatggcttatgtttgcatcagactccagatatcactctaagaactgtctggcagtggtacgaagagcctagttgctatggtttggatgtaaaggcacaagatctctggaggtcaaaagccttgtggaatagtcattgtcagtttacaacatattttgtaccatatctatctgctgttcaactcttcagtcaacctaaaagaaccagtggtggaagcattgataaggaatcaatccatagggatgtgacatgtgaaacatctccacagctgaacctgcccccaatatttgcaaagctttttccaaaacaatctgttccagtaaataaaccatctactctgcgtactgaagatgatcaacagtcagcagatggggagctggtatttgaattttttgaatatgaacagccatactcacggcgacaattatttgacaaggtaaatgagctgattgccggtgcgaaaccgtcaaattgccaaatatctggggacccaaagaatctggaggccagcctgcatgatctccatccagcgtcttggtattgtgttgcatggtatcccatataccggatacctgatggaaaattccaggctacattcttgacatatcactctcttggccactggattcgtcggagcagctcagcaggtggggccgctgttttgccagtcatgggcctgcagtcttacaatgccaagagtggtggtttgagatgagcaagtccgaatctgaaggcgggcagtcgcaggccagtgaagcatccgagattctgaaggagagatcgcgcacgctgagtgaggctgcggccgtgttgtccagggccagcgtgctgaagaatgggcagatgagtagaaacagacatccagactacgagttcttcctctcccggagctgatttggaagtgcctcttcgtactcggatttagttaggtttcagtgtatgtatgtgttgttgacactaaagcttattctgcaaccgatgactggaagctgtttgcttagcttagcttagcaatataataataatgctagtcagttctcatccaagtgtcatgtcactgttattgaagtagatcagagatgaaacaggaaggac

SEQ ID NO: 57998 - DNA, 3723 bp, Zea Mays
ctgggttctgtctggggagcaggagcagcagtcgccgagagcaacccaaagcaagctgcaggtatttgctttcgtctgcgtcttcgtcttcgtcgtcttggttgccgaaaggctccccaagaaatgccgtgtgcactagaagtgattgatgcaaggttacagagcacatcacatattcagtgcagcagatcatttgaccaaaacattggaagacgcttttcaaagggccatctgatacaaaaacctgttgccatttgtcctgagaacagtgacacctcatcaacaatacttctgtttcggcacgatccagactggaaacaagcaccattcttgtctgacactcaagaggtcaacaagatcagccaaatgaaaagaacatgcatgatcaggttgattcttctaaaccagtttccaatggaaacacacatgggggaagcacctttagacaatctcagcaaagggaaaacgtttgtaattcattgatggcagttcctccctgccatgtagttgcaaagaagtactccaggtctgttgctactgctctgagtctgggatctgattctgatattttgcacaacggtgacaagcttccaaaaaggaattctagaaagagaggaaaacagtgcaagcgaacaatccgcaaaaggctgaatttggcatcagaaaccatttttgaagagagtacttatggtgcttctcctgcggaggtagttccgaccaatttactggttgataagttgtcagagaccacatcctctgctagctcattggttaaaactgatggtcggtacaaggaggaccatgtggaatgtggtattatgttgaatttagctacattgggaactgatgagatggatggttctggatgtgctggttcatcttataatgatgcaggagggagattaagctccagttgtgtttcttacttgaatgacaaatccaatacgacagattcttcagaatttgacggatccaccttcactgaacatggcttgggagaagaaagcaatagctaccagaagttaacatgcccctatgtttataatcccagttatgcaaccatggattccatctttagtaggtggaacagcgacaacagtgggaactacagtgtcgatgttgaggctaggttaaccgtcaaagacgaaaatagacatgatcattcgaaactgggggcttccacagggcggagtaatgtgaggatggaatgccagttgatagggtcatgttttagtgctactcatgctgaagacacaaacgatcctctagggatcagatcatactcctctaaggatgttactgatagttgtagccatactgaaatggttcagtgcagcagcaagtcctttcattttaaatcagggaggaggaacataaaatcaagtaaaacaccaagctatgttgatttgactgcgtctaacagagtgagaggttctaataggcacaagaacaatggaaaagatagttcagcagtgtggcagaaagtagaaaggaatgacaagatggtatctaaagcaggccatccgagcgatacacctgttcatgataagggtgcaaatgaagttggtaagaagggtgtacaggaagatccaacaagaattcgggcaaaacataatccgaataagaaagtgtgcaaacagaagccttcaaatggagcagttgaattggagcctgccaaaggagaagatgcattgaactcatgccatacattttctggacctttctacacgaagcaagcaccctttctacgccagcaaagaaactctttttcgaaacaaggttctcagtcattgaaaaactactgtgctcctaggaatggtatccccaaggtggcaaaggattacttgcagcaagaagaattacctatgttggtgctagttcatgccaagaacaccagtgataaatcaagctcatattcaagttcagctgatgaagttggtctaactggagtcagcaacaactatccaactgagggaaatgagagttcacaacctgatattgaggtagcagcgtcagtatcttgcaacttggttccagatttggctccacaagctgcttctgatgatttccacatatcagatcctcactctttacgtcctgaaaacaagggtgcatccaacagtcggagctccaataacttgtgcacagatccttttgctgcagaagcaaaggaagctcgatgtgtgaagctactaacagagaataattcccaagaaccctgtaagtggtattctgctgctggacacttgtcacagaagtgggttcctgttggaaagaaagagacttgcaatgggatctgtttagatgtctcagctaatggtgatgacagcaacttgcctagtgaaaggacttataaactgaacttatctgaacatgctgcagcagataatgcagctgagaccgattacagcaagatgaaagaagtcatcagctatgtttacacagcacagcagcgagtggaagacatccaactttgcattggtaggcctattgctgattttgaaaattttgtttactctgcttctccagttgtgcactgcagctcgtgctctgttggctgtaaatcttgcctgcaagaatgtgtgaaggatggcttatgtttgcatcagactccagatatcactctaagaactgtctggcagtggtacgaagagcctagttgctatggtttggatgtaaaggcacaagatctctggaggtcaaaagccttgtggaatagtcattgtcagtttacaacatattttgtaccatatctatctgctgttcaactcttcagtcaacctaaaagaaccagtggtggaagcattgataaggaatcaatccatagggatgtgacatgtgaaacatctccacagctgaacctgcccccaatatttgcaaagctttttccaaaacaatctgttccagtaaataaaccatctactctgcgtactgaagatgatcaacagtcagcagatggggagctggtatttgaattttttgaatatgaacagccatactcacggcgacaattatttgacaaggtaaatgagctgattgccggtgcgaaaccgtcaaattgccaaatatctggggacccaaagaatctggaggccagcctgcatgatctccatccagcgtcttggtatgctctcttttcatggaacgtgcacttgtatctggtattgtgttgcatggtatcccatataccggatacctgatggaaaattccaggctacattcttgacatatcactctcttggccactggattcgtcggagcagctcagcaggtggggccgctgttttgccagtcatgggcctgcagtcttacaatgccaaggcagagtggtggtttgagatgagcaagtccgaatctgaaggcgggcagtcgcaggccagtgaagcatccgagattctgaaggagagatcgcgcacgctgagtgaggctgcggccgtgttgtccagggccagcgtgctgaagaatgggcagatgagtagaaacagacatccagactacgagttcttcctctcccggagctgatttggaagtgcctcttcgtactcggatttagttaggtttcagtgtatgtatgtgttgttgacactaaagcttattctgcaaccgatgactggaagctgtttgcttagcttagcttagcaatataataataatgctagtcagttctcatccaagtgtcatgtcactgttattgaagtagatcagagatgaaacaggaaggac

SEQ ID NO: 57999 - DNA, 970 bp, Zea Mays
ctgggttctgtctggggagcaggagcagcagtcgccgagagcaacccaaagcaagctgcaggtatttgctttcgtctgcgtcttcgtcttcgtcgtcttggttgccgaaaggctccccaagaaatgccgtgtgcactagaagtgattgatgcaaggttacagagcacatcacatattcagtgcagcagatcatttgaccaaaacattggaagacgcttttcaaagggccatctgatacaaaaacctgttgccatttgtcctgagaacagggtaaatgagctgattgccggtgcgaaaccgtcaaattgccaaatatctggggacccaaagaatctggaggccagcctgcatgatctccatccagcgtcttggtatgctctcttttcatggaacgtgcacttgtatctggtattgtgttgcatggtatcccatataccggatacctgatggaaaattccaggctacattcttgacatatcactctcttggccactggattcgtcggagcagctcagcaggtggggccgctgttttgccagtcatgggcctgcagtcttacaatgccaaggcagagtggtggtttgagatgagcaagtccgaatctgaaggcgggcagtcgcaggccagtgaagcatccgagattctgaaggagagatcgcgcacgctgagtgaggctgcggccgtgttgtccagggccagcgtgctgaagaatgggcagatgagtagaaacagacatccagactacgagttcttcctctcccggagctgatttggaagtgcctcttcgtactcggatttagttaggtttcagtgtatgtatgtgttgttgacactaaagcttattctgcaaccgatgactggaagctgtttgcttagcttagcttagcaatataataataatgctagtcagttctcatccaagtgtcatgtcactgttattgaagtagatcagagatgaaacaggaaggac

SEQ ID NO: 58000 - DNA, 3469 bp, Zea Mays
ctgggttctgtctggggagcaggagcagcagtcgccgagagcaacccaaagcaagctgcaggctccccaagaaatgccgtgtgcactagaagtgattgatgcaaggttacagagcacatcacatattcagtgcagcagatcatttgaccaaaacattggaagacgcttttcaaagggccatctgatacaaaaacctgttgccatttgtcctgagaacagtgacacctcatcaacaatacttctgtttcggcacgatccagactggaaacaagcaccattcttgtctgacactcaagaggtcaacaagccaaatgaaaagaacatgcatgatcaggttgattcttctaaaccagtttccaatggaaacacacatgggggaagcacctttagacaatctcagcaaagggaaaacgtttgtaattcattgatggcagttcctccctgccatgtagttgcaaagaagtactccaggtctgttgctactgctctgagtctgggatctgattctgatattttgcacaacggtgacaagcttccaaaaaggaattctagaaagagaggaaaacagtgcaagcgaacaatccgcaaaaggctgaatttggcatcagaaaccatttttgaagagagtacttatggtgcttctcctgcggaggtagttccgaccaatttactggttgataagttgtcagagaccacatcctctgctagctcattggttaaaactgatggtcggtacaaggaggaccatgtggaatgtggtattatgttgaatttagctacattgggaactgatgagatggatggttctggatgtgctggttcatcttataatgatgcaggagggagattaagctccagttgtgtttcttacttgaatgacaaatccaatacgacagattcttcagaatttgacggatccaccttcactgaacatggcttgggagaagaaagcaatagctaccagaagttaacatgcccctatgtttataatcccagttatgcaaccatggattccatctttagtaggtggaacagcgacaacagtgggaactacagtgtcgatgttgaggctaggttaaccgtcaaagacgaaaatagacatgatcattcgaaactgggggcttccacagggcggagtaatgtgaggatggaatgccagttgatagggtcatgttttagtgctactcatgctgaagacacaaacgatcctctagggatcagatcatactcctctaaggatgttactgatagttgtagccatactgaaatggttcagtgcagcagcaagtcctttcattttaaatcagggaggaggaacataaaatcaagtaaaacaccaagctatgttgatttgactgcgtctaacagagtgagaggttctaataggcacaagaacaatggaaaagatagttcagcagtgtggcagaaagtagaaaggaatgacaagatggtatctaaagcaggccatccgagcgatacacctgttcatgataagggtgcaaatgaagttggtaagaagggtgtacaggaagatccaacaagaattcgggcaaaacataatccgaataagaaagtgtgcaaacagaagccttcaaatggagcagttgaattggagcctgccaaaggagaagatgcattgaactcatgccatacattttctggacctttctacacgaagcaagcaccctttctacgccagcaaagaaactctttttcgaaacaaggttctcagtcattgaaaaactactgtgctcctaggaatggtatccccaaggtggcaaaggattacttgcagcaagaagaattacctatgttggtgctagttcatgccaagaacaccagtgataaatcaagctcatattcaagttcagctgatgaagttggtctaactggagtcagcaacaactatccaactgagggaaatgagagttcacaacctgatattgaggtagcagcgtcagtatcttgcaacttggttccagatttggctccacaagctgcttctgatgatttccacatatcagatcctcactctttacgtcctgaaaacaagggtgcatccaacagtcggagctccaataacttgtgcacagatccttttgctgcagaagcaaaggaagctcgatgtgtgaagctactaacagagaataattcccaagaaccctcagataatgcagctgagaccgattacagcaagatgaaagaagtcatcagctatgtttacacagcacagcagcgagtggaagacatccaactttgcattggtaggcctattgctgattttgaaaattttgtttactctgcttctccagttgtgcactgcagctcgtgctctgttggctgtaaatcttgcctgcaagaatgtgtgaaggatggcttatgtttgcatcagactccagatatcactctaagaactgtctggcagtggtacgaagagcctagttgctatggtttggatgtaaaggcacaagatctctggaggtcaaaagccttgtggaatagtcattgtcagtttacaacatattttgtaccatatctatctgctgttcaactcttcagtcaacctaaaagaaccagtggtggaagcattgataaggaatcaatccatagggatgtgacatgtgaaacatctccacagctgaacctgcccccaatatttgcaaagctttttccaaaacaatctgttccagtaaataaaccatctactctgcgtactgaagatgatcaacagtcagcagatggggagctggtatttgaattttttgaatatgaacagccatactcacggcgacaattatttgacaaggtaaatgagctgattgccggtgcgaaaccgtcaaattgccaaatatctggggacccaaagaatctggaggccagcctgcatgatctccatccagcgtcttggtattgtgttgcatggtatcccatataccggatacctgatggaaaattccaggctacattcttgacatatcactctcttggccactggattcgtcggagcagctcagcaggtggggccgctgttttgccagtcatgggcctgcagtcttacaatgccaaggcagagtggtggtttgagatgagcaagtccgaatctgaaggcgggcagtcgcaggccagtgaagcatccgagattctgaaggagagatcgcgcacgctgagtgaggctgcggccgtgttgtccagggccagcgtgctgaagaatgggcagatgagtagaaacagacatccagactacgagttcttcctctcccggagctgatttggaagtgcctcttcgtactcggatttagttaggtttcagtgtatgtatgtgttgttgacactaaagcttattctgcaaccgatgactggaagctgtttgcttagcttagcttagcaatataataataatgctagtcagttctcatccaagtgtcatgtcactgttattgaagtagatcagagatgaaacaggaaggac

SEQ ID NO: 58001 - DNA, 2054 bp, Zea Mays
tgcgcgtgctccttgctgttctgctgactggtctcaccatctcatcccaccaccaccaccaccaccaccatctttaggataagatagcaaatatatggccatcatactcgtacgagcagcgtcgccggggctctccgccgccgacagcatcagccaccaggggactctccagtgctccaccctgctcaagacgaagaggccggcggcgcgccggtggatgccctgctcgctccttggcctccacccgtgggaggctggccgtccctcccccgccgtctactccagcctcgccgtcaacccggcgggagaggccgtcgtctcgtccgagcagaaggtctacgacgtcgtgctcaagcaggccgcattgctcaaacgccagctgcgcacgccggtcctcgacgccaggccccaggacatggacatgccacgcaacgggctcaaggaagcctacgaccgctgcggcgagatctgtgaggagtatgccaagacgttttacctcggaactatgttgatgacagaggagcggcgccgcgccatatgggccatctatgtgtggtgtaggaggacagatgagcttgtagatgggccaaacgccaactacattacaccaacagctttggaccggtgggagaagagacttgaggatctgttcacgggacgtccttacgacatgcttgatgccgctctctctgataccatctcaaggttccccatagacattcagccattcagggacatgattgaagggatgaggagtgatcttaggaagacaaggtataacaacttcgacgagctctacatgtactgctactatgttgctggaactgtcgggttaatgagcgtacctgtgatgggcatcgcaaccgagtctaaagcaacaactgaaagcgtatacagtgctgccttggctctgggaattgcgaaccaactcacgaacatactccgggatgttggagaggagcagggctctctgatgaggacatcttcaaaggggtcgtcacgaaccggtggagaaacttcatgaagaggcagatcaagagggccaggatgttttttgaggaggcagagagaggggtaactgagctctcacaggctagcagatggccagtatgggcttccctgttgttgtacaggcagatcctggatgagatcgaagccaacgactacaacaacttcacgaagagggcgtatgttggtaaagggaagaagttgctagcacttcctgtggcatatggaaaatcgctactgctcccatgttcattgagaaatggccagacctagccaccagagaagctgcaatgcaaggttcaggttaggctagatagaaagttaaatggggcaacatcaggaggccttgatgaaaaacagacaacctggtgaattgttgttgggatcaggcacagaacagataagagccgcgcagccaacctagggcatgtttggtttcaattagttctaggactaaactttagtcctaggactaaactttagtccctatatgtttggttctagggactaaatagattctaaagtcattaaatacattgtccaaagactcaaatacccttagaatatactcatgatattagttatctataaaaaggtaagggcaacatgataattatgagcttttagtctcttttagcacctatgtgaaggactaaagactaaatcattttagtccatattttagtcctagtgtttggcaaaaaagggactaaaagggactaaaaactagagactaatctttagtccctctaaccaaacacccccctagatggatacggaacattcgcctcttattcggagcaatatatgtctctcaaggaaagagcccaacatgtatactgccttctttttctcatcccagatttgggggaaaaacaatgtaaatgccaatggtatcgtaggaagattactagaagtaaatgccaatgtaaaaacagatgagttggcatttacatgataggatggtgggatcatcagactgaaaatgataggggattgtgctcccctgcgactccaactattaaacaaggaatccgtcagcagta

SEQ ID NO: 58002 - DNA, 2165 bp, Zea Mays
atggtatctgtctgtctcaaatacaataatcaccatgcatgtatccctccaatgtatcagtaccattgctcatacctagctagtagcatgttacgtacggagtatcaatcagtaaatttcagaatggctactactggaactggatgcgctgtactagctagtatgtttccctacttaatatataacgtagatacgcacttctgacttaattatgctgctgtggcaaaaggattttttttttttactttaacagcagattccaacaataacagtgcaaaattgggctacttttcaagtaatggtaacaactagcagctcccagtggaaattaacaatattgaaaaaagaaacactgctgacttccatgaaggccattcgtgagtcaatggtgaataaaggtttaatgcgctttatgttgtatgtggaagcaccaaaataggctttcggtagcctaaattgctactaaatggcttgatcaatacttgaagaccatgtggaaagttataagaacatattctttatagttcaaactaccctttaggaatatgaatctcaagtattggcaattttaaacgaacacttcaggcacggtatctgacgggtattgtttctgcagtgtggtgtaggaggacagatgagcttgtagatgggccaaacgccaactacattacaccaacagctttggaccggtgggagaagagacttgaggatctgttcacgggacgtccttacgacatgcttgatgccgctctctctgataccatctcaaggttccccatagacattcagccattcagggacatgattgaagggatgaggagtgatcttaggaagacaaggtataacaacttcgacgagctctacatgtactgctactatgttgctggaactgtcgggttaatgagcgtacctgtgatgggcatcgcaaccgagtctaaagcaacaactgaaagcgtatacagtgctgccttggctctgggaattgcgaaccaactcacgaacatactccgggatgttggagaggatgctagaagaggaaggatatatttaccacaagatgagcttgcacaggcagggctctctgatgaggacatcttcaaaggggtcgtcacgaaccggtggagaaacttcatgaagaggcagatcaagagggccaggatgttttttgaggaggcagagagaggggtaactgagctctcacaggctagcagatggccagtatgggcttccctgttgttgtacaggcagatcctggatgagatcgaagccaacgactacaacaacttcacgaagagggcgtatgttggtaaagggaagaagttgctagcacttcctgtggcatatggaaaatcgctactgctcccatgttcattgagaaatggccagacctagccaccagagaagctgcaatgcaaggttcaggttaggctagatagaaagttaaatggggcaacatcaggaggccttgatgaaaaacagacaacctggtgaattgttgttgggatcaggcacagaacagataagagccgcgcagccaacctagggcatgtttggtttcaattagttctaggactaaactttagtcctaggactaaactttagtccctatatgtttggttctagggactaaatagattctaaagtcattaaatacattgtccaaagactcaaatacccttagaatatactcatgatattagttatctataaaaaggtaagggcaacatgataattatgagcttttagtctcttttagcacctatgtgaaggactaaagactaaatcattttagtccatattttagtcctagtgtttggcaaaaaagggactaaaagggactaaaaactagagactaatctttagtccctctaaccaaacacccccctagatggatacggaacattcgcctcttattcggagcaatatatgtctctcaaggaaagagcccaacatgtatactgccttctttttctcatcccagatttgggggaaaaacaatgtaaatgccaatggtatcgtaggaagattactagaagtaaatgccaatgtaaaaacagatgagttggcatttacatgataggatggtgggatcatcagactgaaaatgataggggattgtgctcccctgcgactccaactattaaacaaggaatccgtcagcagta

SEQ ID NO: 58003 - DNA, 2173 bp, Zea Mays
tacggccgtcactcgtcggcgaaagcaataagcgcgtggcggcgtggggcgtggcgaggccgatcgccgcactcgcctcactcgaatggcggcgattacggaggcggattggcttcgtgttcaactgttcgttcgtggtgggacgactccggtccggtggcggcagcgcggaggttccagccgcgctcccgcctgcacgccgcacgcacgtaaatagttagtctgggccttgaaaaggtcgtgaattgagttggttgggcctgctagcaggtggaggaaggtccggagtttgcgcgcggcctctccttggaaaatggaaatggacacggccggacatgggcatggacatggagatggaaatggatggtaatcaggtccgtgtaggtcgcatgcaagctgggcgacactgcgtgccgggcgtcctccttcctctgctccttccgatccccctcccggcgtggaggtatagcgtccgccatctcccccggccgaccggatccctcacccctctaggtacgtagctagctaggccaggttatcgtcgattcgatagattcaataagcaaaggcgatcaacaacacaattaatggggggcggcggcggcggcaactcgcgggagctggaccagacgccgacatgggcggtggcgtcggtgtgcggcgtgatcgtgctcatctccatcctgctggagaaagggctccaccacgtgggcgagttcttctcccaccgcaagaagaaggccatggtggaggccctggagaaggtgaaggcggagctcatggtgctgggcttcatctccctcctcctcgtgttcggccagaactacatcgtcaaggtgtgcatcagcaaccacgccgccaacactatgctcccctgcaagctcaaggaggccgccgtccctggcaagaagaaggccgccgcagcagcagagcatctcgggggcgtgctggactggccgccgccctactacgcgcacaacggcaggatgctggcggaggcgagcatggcgaccaagtgccccgaggggaaggtgtcgctcatctccatcaacgccttgcaccagctgcacatcttcatcttcttcctcgccgtcttccacgtctcctacagcgccatcaccatggcgctcggcagggccaagatacgcgcgtggaaggagtgggagaaggaagcagcagggcaggactacgagttctctaacgaccctacgcggttcaggttcacccacgagacttcgtttgtgaggcagcatatgaatgtgctcaacaagttcccagcatccttctacatcagcaacttcttccggcagttcttcaggtccgtcaggcgggcagactactgcgcgctgcgccacagctttgtcaacgtccatctggcccctggcaccaagtttgatttccaaaagtacatcaagcggtctctggaggacgacttcaaggatggcacaccatgctctggatctccatcatgccggtggtgatcatcctgtccgtggggacgaagctgcagggcatcatctgccgcatggcgatcgacatcacggagcggcacgccgtgatccagggcatcccgctggtgcaggtcagcgactcctacttctggttcgcacgcccaaccttcgtgctcttcctcatccacttcaccctcttccagaatggcttccagatcatctacttcctctggattctgtatgagtacgggatggactcgtgcttcaacgactccgaagaattcgtctttgcacgtctctgccttggggtggttgttcaggtgctgtgcagctacgtgacgctccctctgtacgcgctcgtctcccagatgggctccaccatgaagcagtccatcttcgacgagcagacctccaaggcgctcaagaactggcgcgccggcgccaagaagaaggcccccaccggctccaagcacggcggcggctccccaaccgccgccggcagccccaccaaggccgacggcgacgcgtaggcgtagctagcagagggtcatcgatcgattgatcgatcgatccagctgttcgttctacatataacctgttacttatttgtatgtaattgtaccaatagcaatcgacacgcgtgcgccgcatgcaatgtaccatgaaactgctgatagctagagagcgacatttttcttgtttggttcgtttctgcaatgctc

SEQ ID NO: 58004 - DNA, 2137 bp, Zea Mays
ggcggcgattacggaggcggattggcttcgtgttcaactgttcgttcgtggtgggacgactccggtccggtggcggcagcgcggaggttccagccgcgctcccgcctgcacgccgcacgcacgtaaatagttagtctgggccttgaaaaggtcgtgaattgagttggttgggcctgctagcaggtggaggaaggtccggagtttgcgcgcggcctctccttggaaaatggaaatggacacggccggacatgggcatggacatggagatggaaatggatggtaatcaggtccgtgtaggtcgcatgcaagctgggcgacactgcgtgccgggcgtcctccttcctctgctccttccgatccccctcccggcgtggaggtatagcgtccgccatctcccccggccgaccggatccctcacccctctaggtacgtagctagctaggccaggttatcgtcgattcgatagattcaataagcaaaggcgatcaacaacacaattaatggggggcggcggcggcggcaactcgcgggagctggaccagacgccgacatgggcggtggcgtcggtgtgcggcgtgatcgtgctcatctccatcctgctggagaaagggctccaccacgtgggcgagttcttctcccaccgcaagaagaaggccatggtggaggccctggagaaggtgaaggcggagctcatggtgctgggcttcatctccctcctcctcgtgttcggccagaactacatcgtcaaggtgtgcatcagcaaccacgccgccaacactatgctcccctgcaagctcaaggaggccgccgtccctggcaagaagaaggccgccgcagcagcagagcatctcgggggcgtgctggactggccgccgccctactacgcgcacaacggcaggatgctggcggaggcgagcatggcgaccaagtgccccgaggggaaggtgtcgctcatctccatcaacgccttgcaccagctgcacatcttcatcttcttcctcgccgtcttccacgtctcctacagcgccatcaccatggcgctcggcagggccaagatacgcgcgtggaaggagtgggagaaggaagcagcagggcaggactacgagttctctaacggttcacccacgagacttcgtttgtgaggcagcatatgaatgtgctcaacaagttcccagcatccttctacatcagcaacttcttccggcagttcttcaggtccgtcaggcgggcagactactgcgcgctgcgccacagctttgtcaacgtccatctggcccctggcaccaagtttgatttccaaaagtacatcaagcggtctctggaggacgacttcaaggtgatcgtggggatcagccctcctttgtgggcttctgctctcatcttcctattcctcaatgtcaatggatggcacaccatgctctggatctccatcatgccggtggtgatcatcctgtccgtggggacgaagctgcagggcatcatctgccgcatggcgatcgacatcacggagcggcacgccgtgatccagggcatcccgctggtgcaggtcagcgactcctacttctggttcgcacgcccaaccttcgtgctcttcctcatccacttcaccctcttccagaatggcttccagatcatctacttcctctggattctgtatgagtacgggatggactcgtgcttcaacgactccgaagaattcgtctttgcacgtctctgccttggggtggttgttcaggtgctgtgcagctacgtgacgctccctctgtacgcgctcgtctcccagatgggctccaccatgaagcagtccatcttcgacgagcagacctccaaggcgctcaagaactggcgcgccggcgccaagaagaaggcccccaccggctccaagcacggcggcggctccccaaccgccgccggcagccccaccaaggccgacggcgacgcgtaggcgtagctagcagagggtcatcgatcgattgatcgatcgatccagctgttcgttctacatataacctgttacttatttgtatgtaattgtaccaatagcaatcgacacgcgtgcgccgcatgcaatgtaccatgaaactgctgatagctagagagcgacatttttcttgtttggttcgtttctgcaatgctc

SEQ ID NO: 58005 - DNA, 6670 bp, Zea Mays
ataaaccctagtggcaaaatcgtagaaccccaggccgctttgtctctgcccacggtccaaccgaaggaaaaaaaagtttgaaaatcaaacacctttcattccccccatccctcctcctgctcatcactgctgctctctggctgctccctctccctccatccccactgctgctctcttgccaaatctgatctagggtttcgttccatctccacgcgccgtcccagtacctatctactctagactactacagtatccaaaaggcaagcttatctgcggagggagtgagctgacgcattcccgtgctggcgagggacagccagacccagacggggagatccgatccgattccgtgctagctgctgcggagtgagtgaggtgacgcgggagcgggatggcggcgccggggcggaggacggcggacgtgtcctcgtcctcgcccgccccctcgccgtccccttccaccggtaggcgcctcctgcgcacgcagaccgtcggcaacctcggcgagtccatcttcgacagcgaggtcgtgccgtcctcgctcgtcgagatcgcacccatcctccgcgtcgccaacgaggtcgaggccaccaacccgcgcgtcgcctacctctgtcgcttctacgctttcgagaaggctcaccgcctcgacccgacatccagtggccgtggtgttcgtcagtttaagaccgcacttctgcagaggcttgagagggaaaatgatcccacgctcaagggaagggtccaccagagcgatgctcgggagatgcagcgcttctaccgcgaatactacaagaagtacatccaggcactgcagcatgctgctgataaggctgaccgagcactgctcactaaagcgtaccagacagctgctgtcttgtttgaggtcttgagggccgttaatgtctcgcagtccgttgaagtcgatcaagcgattttggatacacacaataaggttgaagaaaagaaaaagttgtacgtaccttataacattctcccgcttgatcctgaaagtactggtcaagccattatgcgatatccagagattcaagctgctgtttatgctcttcgcaatactagaggtctgccatggccaaaggaccaagacaagaagcctggcgagaagaatactgggaaagaccttctcgattggcttcaggctatgtttgggtttcagaaagacaacgtgtccaaccaaagggaacatttggtactgttgcttgcaaatgttcatataatgaaagtacccaaggttgaccaacaaccgaagttggatgacaaagctctggatgctgtaatgaagaagctgtttaagaattataagaagtggtgcaagtaccttggccgcaaaagcagcttatggttgccaaccatccagcaggaagtgcagcagcgtaagcttctttatatgggcctctacctgctgatttggggtgaggcggctaacttgagattcatgccagagtgtatttgttacatctaccatcatatggcttttgaactctacggcatgctggctggaaatgtgagcccaatgacgggtgaaaatgttaaaccagcatatggtggtgatgaagaagcctttttgattaaagttgtgactccaatatacaaagttatagagaaggaagctgaaaggagcaagaccatgaaatcaaagcactcccattggagaaactatgatgatctgaatgagtacttttggtcagttgattgtttccggctaggatggcctatgagagctgatgctgactttttcaaaactccaaaagatgcttatctgaatcttttgaatggagagaacagatctgcaggtaatacccattggatgggaaaagttaattttgtggagatacgttcattttggcacatattccgtagtttcgacagaatgtggatcttcttaatattgtccttacaggccatgataattattgcttggaatggtggaacaccaagtgatatttttgatgctggagtatttaagaaggttttgagcatatttattactgctgcaattttgaagttgggtcaagcaatcctagacctcatatttggttggaaagcaagaagaaacatgtcatttgcagtcaagctgcgatatatcttgaagttaatatgtgctgctgcatgggttgtgattttacctgtgacttacgcgtacacttgggagaatcctactggacttgcaagaacaataaaaagttggcttggtgatggtcagaatcagccatctttgtacatattggccatagtgatatatatggcaccaaacatagttgcttctatgctatttcttttcccatttatgagaagattcttagagagttcaaatgttaaggtcataacgatcataatgtggtggtctcagccccggttatttgttggcagagggatgcatgaaggtgcattctccctcttcaagtataccatgttctgggttcttcttttagcaacgaagctgactgtaagcttctatattgagatcaaacctctggtacagccaaccatagatataatgagggaacctatcaggactttccagtggcacgaatttttccctcatggaactaacaatattggtgttgttatatcactgtgggctccaataattctagtatatttcatggacacccaaatttggtatgcactgttctcgacattaattggtggtatctatggggcttatcgtcgtcttggtgagatacggacattaggaatgttgagatctcgctttgaatctttgcccgaggccttcaatgaacgcttgattccttctgatgcaaataagagtaaaggtcttcgtgctgccttttcaagtagacccaagaaagagaaaagagctgcaaggtttgctcaaatgtggaatgtcattattacaagtttccgtgaagaagacctcatagacaatagggagatggatctgctactggttccatactgtaaagaccgtgagctcgatatatttcaatggccacctttcttacttgctagcaagatcccaatagcactggatatggcagcagacagtggcggaaaagaccgtgatctgacgaagaggataaaatcagatccatacttttcctttgctatcagagaatgctatgcttcattcaagaacatcatcaatactttagtgtttggtcagcgggagaaagatgtcctagcacagattttcgcagttgtggatcagcatatagaagatgaaactctgataaaggatctcaatatgaggaaccttcctgcactgagcaagaagtttgttgaattacttgaattactgcaaaaaaacaaggaggaagacttgggtcaggtagtcattttgttccaagatatgcttgaggtggtcacaagggatataatggaggaacaggaccagctcggcacactgttggaatctgcacatggtgcaaatagtagaaaacatgaaggaattacaccgctagatcagcaagaccagttgtttgctaaagctattaagttccctgtggatgaatcaattgcatggactgaaaagataaagaggcttcatcttctgttaactgtgaaggagtctgctatggatgttcctactaatcttgatgctaggcggcggatatcattctttgcaaattctttatttatggatatgcccaatgctccaaaagttcggaacatgttggccttctctatcttgactccttattacaaggaagatgttctgttctcattacaaaatctagaagagccaaatgaggatggagtttccattcttttctacttacaaaaaatttacccagatgaatggaaaaatttcctcgaaagggttggctgcaagaatgaagagggactccgtgaagatgaagaactagaagagaagcttcgtctttgggcgtcgtatagggggcagacattaacaagaactgtaagagggatgatgtactatcgaaaagctttggagcttcaggcttttcttgatatggcggaagatgatgatcttatggaaggttacagagcaacagaagtaatgcccgaggactcgcaattaatgactcaatgcaaggctatagctgacatgaagtttacatatgttgtctcatgccaacaatatggaattcagaagcgttctaatgagccttgcgcacatgatattttgagactaatgacggaatatccatcacttcgggtcgcctatattgatgaagttgaagcgcctagccaagatagaaacaagaagattgaaaaggtttactactcagtgttggtgaaggcttctgttacaaaacctgatgagcctggtcagagccttgatcaggtcatctacaagataaagctaccaggtaatgccattttaggtgaaggaaagccagaaaatcagaaccatgcaataatattcaccagaggcgaatgcctccaaactatagatatgaatcaggagcactatatggaggaggctttgaaaatgagaaatctgctgcaagagtttgagaagaaacatggagtgagatatccatcgatacttggagtcagagaacacatatttacgggcagtgtgtcatcccttgcatggttcatgtcaaatcaggaaactagtttcgtaacaattggacaacgagtgcttgccaatccgttgagggttcgttttcattatggtcatcctgatatcttcgatcgccttttccacattacgaggggtggtgtgagtaaagcatccaaaattatcaatctcagtgaggacatatttgcaggattcaattccacattgcgtgaaggcaatgttactcaccacgagtacatgcaagttggcaagggaagggatgtgggtctcaatcaaatatctctgtttgaggcaaagatagcaaatggcaatggcgaacagacgctgagccgtgacatctaccggctgggtcatcgctttgatttcttcagaatgctatcttgctactatacaacaattggtttctacttcagtacaatgattacagtgtggactgtatatgttttcctctatgggcggttatatcttgtacttagtggacttgatgaagcgctggctactggaaggaggtttgtgcacaatgcacctctccaggttgcgcttgcatcggagtcttttgtgcagcttgggtttttgatggcgctacccatgatgatggaaatcggtttggagagaggattcagaacagcattgagtgacttcatactgatgcagcttcagttggcctcagttttcttcacgttctcattgggaacaaaaactcattactacggaaggacattactccatggaggagctgaatacagagccactggacgtgggtttgtggtgttccatgcgaaatttgctgacaactatcgactctattcccgtagccattttgtcaagggcattgagctgatgattctactagttgtgtatgaaatatttagccagccatatagaggggctgtaacttacatcttcatcaccgtgtccatgtggttcatggtgggcacttggctctttgcaccattcctgttcaatccttctggatttgagtggcagaagattgtggacgactggaccgattggcacaagtggatcagcaatcgtggaggtatcggtgtagcaccagagaaaagctgggagtcatggtgggaaaaggagcaagagccccttcgatactccgggaagcgcggtactgttgttgaaatactgcttgcgctgcgtttctttatctaccagtacggacttgtgtatcatctgaatataacgaagaagataactaaggacaaccagagtgtgctggtttattgcttctcatgggttgtaatttttgtgattttgctcgttatgaagaccgtatcagtgggcaggagaaggttcagtgcagagttccagctagtgttccggttgatcaagggtctgatatttataacatttacagccatcgtggtaatcctaatagcgatccctggcatgacggtgctggacatatttgtttgcatccttgctttcatgcccactggatggggtttgctgctgattgcccaagcgatccggcctgtgatccacaagactgggctctggggctcgatcaaggctcttgcccggggctacgagatcctgatgggacttctcctgttcacgcccatcgccttcctcgcctggttcccgttcgtgtcggaattccagaccaggatgctgttcaaccaggcgttcagcagaggtctgcagatctcccgtatcctgggaggacacaagaaagaccgagggacccggaacaaagaatagggctgggctgctgctgattcaaggtttgtgtgcgccactagtatttatgtgtgaatgggtgggtagcatatggctcgagagtatctcctgaatggagattgattgatcctgaagagtagaagagactcgagtgatgtaagatgctgcaggcttgttgctttgttacctaggcgttaggcagaacagatgttttcaggatctctggcctgttaaccacatcttcccctgttcagagtgaattaattcctaatggaaactgatttgtgaattacttcctaatagaggagtgcttccaaactgatttcatgtgtgtgctgtgatattgtttagcatatagtattttaaatgtagctttgaattttcattctttcgcaacaaaaaatgaataggacaagctggtcaaacttgaaaaaaaaa

SEQ ID NO: 58006 - DNA, 6819 bp, Zea Mays
ataaaccctagtggcaaaatcgtagaaccccaggccgctttgtctctgcccacggtccaaccgaaggaaaaaaaagtttgaaaatcaaacacctttcattccccccatccctcctcctgctcatcactgctgctctctggctgctccctctccctccatccccactgctgctctcttgccaaatctgatctagggtttcgttccatctccacgcgccgtcccagtacctatctactctagactactacagtatccaaaaggcaagcttatctgcggagggagtgagctgacgcattcccgtgctggcgagggacagccagacccagacggggagatccgatccgattccgtgctagctgctgcggagtgagtgaggtgacgcgggagcgggatggcggcgccggggcggaggacggcggacgtgtcctcgtcctcgcccgccccctcgccgtccccttccaccggtaggcgcctcctgcgcacgcagaccgtcggcaacctcggcgagtccatcttcgacagcgaggtcgtgccgtcctcgctcgtcgagatcgcacccatcctccgcgtcgccaacgaggtcgaggccaccaacccgcgcgtcgcctacctctgtcgcttctacgctttcgagaaggctcaccgcctcgacccgacatccagtggccgtggtgttcgtcagtttaagaccgcacttctgcagaggcttgagagggaaaatgatcccacgctcaagggaagggtccaccagagcgatgctcgggagatgcagcgcttctaccgcgaatactacaagaagtacatccaggcactgcagcatgctgctgataaggctgaccgagcactgctcactaaagcgtaccagacagctgctgtcttgtttgaggtcttgagggccgttaatgtctcgcagtccgttgaagtcgatcaagcgattttggatacacacaataaggttgaagaaaagaaaaagttgtacgtaccttataacattctcccgcttgatcctgaaagtactggtcaagccattatgcgatatccagagattcaagctgctgtttatgctcttcgcaatactagaggtctgccatggccaaaggaccaagacaagaagcctggcgagaagaatactgggaaagaccttctcgattggcttcaggctatgtttgggtttcagaaagacaacgtgtccaaccaaagggaacatttggtactgttgcttgcaaatgttcatataatgaaagtacccaaggttgaccaacaaccgaagttggatgacaaagctctggatgctgtaatgaagaagctgtttaagaattataagaagtggtgcaagtaccttggccgcaaaagcagcttatggttgccaaccatccagcaggaagtgcagcagcgtaagcttctttatatgggcctctacctgctgatttggggtgaggcggctaacttgagattcatgccagagtgtatttgttacatctaccatcatatggcttttgaactctacggcatgctggctggaaatgtgagcccaatgacgggtgaaaatgttaaaccagcatatggtggtgatgaagaagcctttttgattaaagttgtgactccaatatacaaagttatagagaaggaagctgaaaggagcaagaccatgaaatcaaagcactcccattggagaaactatgatgatctgaatgagtacttttggtcagttgattgtttccggctaggatggcctatgagagctgatgctgactttttcaaaactccaaaagatgcttatctgaatcttttgaatggagagaacagatctgcaggtaatacccattggatgggaaaagttaattttgtggagatacgttcattttggcacatattccgtagtttcgacagaatgtggatcttcttaatattgtccttacaggccatgataattattgcttggaatggtggaacaccaagtgatatttttgatgctggagtatttaagaaggttttgagcatatttattactgctgcaattttgaagttgggtcaagcaatcctagacctcatatttggttggaaagcaagaagaaacatgtcatttgcagtcaagctgcgatatatcttgaagttaatatgtgctgctgcatgggttgtgattttacctgtgacttacgcgtacacttgggagaatcctactggacttgcaagaacaataaaaagttggcttggtgatggtcagaatcagccatctttgtacatattggccatagtgatatatatggcaccaaacatagttgcttctatgctatttcttttcccatttatgagaagattcttagagagttcaaatgttaaggtcataacgatcataatgtggtggtctcagccccggttatttgttggcagagggatgcatgaaggtgcattctccctcttcaagtataccatgttctgggttcttcttttagcaacgaagctgactgtaagcttctatattgagatcaaacctctggtacagccaaccatagatataatgagggaacctatcaggactttccagtggcacgaatttttccctcatggaactaacaatattggtgttgttatatcactgtgggctccaataattctagtatatttcatggacacccaaatttggtatgcactgttctcgacattaattggtggtatctatggggcttatcgtcgtcttggtgagatacggacattaggaatgttgagatctcgctttgaatctttgcccgaggccttcaatgaacgcttgattccttctgatgcaaataagagtaaaggtcttcgtgctgccttttcaagtagacccaagttttttaggcttctggtgacgaaagacagaaagagaaaagagctgcaaggtttgctcaaatgtggaatgtcattattacaagtttccgtgaagaagacctcatagacaatagggagatggatctgctactggttccatactgtaaagaccgtgagctcgatatatttcaatggccacctttcttacttgctagcaagatcccaatagcactggatatggcagcagacagtggcggaaaagaccgtgatctgacgaagaggataaaatcagatccatacttttcctttgctatcagagaatgctatgcttcattcaagaacatcatcaatactttagtgtttggtcagcgggagaaagatgtcctagcacagattttcgcagttgtggatcagcatatagaagatgaaactctgataaaggatctcaatatgaggaaccttcctgcactgagcaagaagtttgttgaattacttgaattactgcaaaaaaacaaggaggaagacttgggtcaggtagtcattttgttccaagatatgcttgaggtggtcacaagggatataatggaggaacaggaccagctcggcacactgttggaatctgcacatggtgcaaatagtagaaaacatgaaggaattacaccgctagatcagcaagaccagttgtttgctaaagctattaagttccctgtggatgaatcaattgcatggactgaaaagataaagaggcttcatcttctgttaactgtgaaggagtctgctatggatgttcctactaatcttgatgctaggcggcggatatcattctttgcaaattctttatttatggatatgcccaatgctccaaaagttcggaacatgttggccttctctatcttgactccttattacaaggaagatgttctgttctcattacaaaatctagaagagccaaatgaggatggagtttccattcttttctacttacaaaaaatttacccagatgaatggaaaaatttcctcgaaagggttggctgcaagaatgaagagggactccgtgaagatgaagaactagaagagaagcttcgtctttgggcgtcgtatagggggcagacattaacaagaactgtaagagggatgatgtactatcgaaaagctttggagcttcaggcttttcttgatatggcggaagatgatgatcttatggaaggttacagagcaacagaagtaatgcccgaggactcgcaattaatgactcaatgcaaggctatagctgacatgaagtttacatatgttgtctcatgccaacaatatggaattcagaagcgttctaatgagccttgcgcacatgatattttgagactaatgacggaatatccatcacttcgggtcgcctatattgatgaagttgaagcgcctagccaagatagaaacaagaagattgaaaaggtttactactcagtgttggtgaaggcttctgttacaaaacctgatgagcctggtcagagccttgatcaggtcatctacaagataaagctaccaggtaatgccattttaggtgaaggaaagccagaaaatcagaaccatgcaataatattcaccagaggcgaatgcctccaaactatagatatgaatcaggagcactatatggaggaggctttgaaaatgagaaatctgctgcaagagtttgagaagaaacatggagtgagatatccatcgatacttggagtcagagaacacatatttacgggcagtgtgtcatcccttgcatggttcatgtcaaatcaggaaactagtttcgtaacaattggacaacgagtgcttgccaatccgttgagggttcgttttcattatggtcatcctgatatcttcgatcgccttttccacattacgaggggtggtgtgagtaaagcatccaaaattatcaatctcagtgaggacatatttgcaggattcaattccacattgcgtgaaggcaatgttactcaccacgagtacatgcaagttggcaagggaagggatgtgggtctcaatcaaatatctctgtttgaggcaaagatagcaaatggcaatggcgaacagacgctgagccgtgacatctaccggctgggtcatcgctttgatttcttcagaatgctatcttgctactatacaacaattggtttctacttcagtacaatggtattttggtgacctgagtttttgaactgttcttgtccgttcattggttaacctttcttgcattttctgacttgttcgttgtttcaccttaacacctctgttatttctgcatgcacttagattacagtgtggactgtatatgttttcctctatgggcggttatatcttgtacttagtggacttgatgaagcgctggctactggaaggaggtttgtgcacaatgcacctctccaggttgcgcttgcatcggagtcttttgtgcagcttgggtttttgatggcgctacccatgatgatggaaatcggtttggagagaggattcagaacagcattgagtgacttcatactgatgcagcttcagttggcctcagttttcttcacgttctcattgggaacaaaaactcattactacggaaggacattactccatggaggagctgaatacagagccactggacgtgggtttgtggtgttccatgcgaaatttgctgacaactatcgactctattcccgtagccattttgtcaagggcattgagctgatgattctactagttgtgtatgaaatatttagccagccatatagaggggctgtaacttacatcttcatcaccgtgtccatgtggttcatggtgggcacttggctctttgcaccattcctgttcaatccttctggatttgagtggcagaagattgtggacgactggaccgattggcacaagtggatcagcaatcgtggaggtatcggtgtagcaccagagaaaagctgggagtcatggtgggaaaaggagcaagagccccttcgatactccgggaagcgcggtactgttgttgaaatactgcttgcgctgcgtttctttatctaccagtacggacttgtgtatcatctgaatataacgaagaagataactaaggacaaccagagtgtgctggtttattgcttctcatgggttgtaatttttgtgattttgctcgttatgaagaccgtatcagtgggcaggagaaggttcagtgcagagttccagctagtgttccggttgatcaagggtctgatatttataacatttacagccatcgtggtaatcctaatagcgatccctggcatgacggtgctggacatatttgtttgcatccttgctttcatgcccactggatggggtttgctgctgattgcccaagcgatccggcctgtgatccacaagactgggctctggggctcgatcaaggctcttgcccggggctacgagatcctgatgggacttctcctgttcacgcccatcgccttcctcgcctggttcccgttcgtgtcggaattccagaccaggatgctgttcaaccaggcgttcagcagaggtctgcagatctcccgtatcctgggaggacacaagaaagaccgagggacccggaacaaagaatagggctgggctgctgctgattcaaggtttgtgtgcgccactagtatttatgtgtgaatgggtgggtagcatatggctcgagagtatctcctgaatggagattgattgatcctgaagagtagaagagactcgagtgatgtaagatgctgcaggcttgttgctttgttacctaggcgttaggcagaacagatgttttcaggatctctggcctgttaaccacatcttcccctgttcagagtgaattaattcctaatggaaactgatttgtgaattacttcctaatagaggagtgcttccaaactgatttcatgtgtgtgctgtgatattgtttagcatatagtattttaaatgtagctttgaattttcattctttcgcaacaaaaaatgaataggacaagctggtcaaacttgaaaaaaaaa

SEQ ID NO: 58007 - DNA, 6687 bp, Zea Mays
ataaaccctagtggcaaaatcgtagaaccccaggccgctttgtctctgcccacggtccaaccgaaggaaaaaaaagtttgaaaatcaaacacctttcattccccccatccctcctcctgctcatcactgctgctctctggctgctccctctccctccatccccactgctgctctcttgccaaatctgatctagggtttcgttccatctccacgcgccgtcccagtacctatctactctagactactacagtatccaaaaggcaagcttatctgcggagggagtgagctgacgcattcccgtgctggcgagggacagccagacccagacggggagatccgatccgattccgtgctagctgctgcggagtgagtgaggtgacgcgggagcgggatggcggcgccggggcggaggacggcggacgtgtcctcgtcctcgcccgccccctcgccgtccccttccaccggtaggcgcctcctgcgcacgcagaccgtcggcaacctcggcgagtccatcttcgacagcgaggtcgtgccgtcctcgctcgtcgagatcgcacccatcctccgcgtcgccaacgaggtcgaggccaccaacccgcgcgtcgcctacctctgtcgcttctacgctttcgagaaggctcaccgcctcgacccgacatccagtggccgtggtgttcgtcagtttaagaccgcacttctgcagaggcttgagagggaaaatgatcccacgctcaagggaagggtccaccagagcgatgctcgggagatgcagcgcttctaccgcgaatactacaagaagtacatccaggcactgcagcatgctgctgataaggctgaccgagcactgctcactaaagcgtaccagacagctgctgtcttgtttgaggtcttgagggccgttaatgtctcgcagtccgttgaagtcgatcaagcgattttggatacacacaataaggttgaagaaaagaaaaagttgtacgtaccttataacattctcccgcttgatcctgaaagtactggtcaagccattatgcgatatccagagattcaagctgctgtttatgctcttcgcaatactagaggtctgccatggccaaaggaccaagacaagaagcctggcgagaagaatactgggaaagaccttctcgattggcttcaggctatgtttgggtttcagaaagacaacgtgtccaaccaaagggaacatttggtactgttgcttgcaaatgttcatataatgaaagtacccaaggttgaccaacaaccgaagttggatgacaaagctctggatgctgtaatgaagaagctgtttaagaattataagaagtggtgcaagtaccttggccgcaaaagcagcttatggttgccaaccatccagcaggaagtgcagcagcgtaagcttctttatatgggcctctacctgctgatttggggtgaggcggctaacttgagattcatgccagagtgtatttgttacatctaccatcatatggcttttgaactctacggcatgctggctggaaatgtgagcccaatgacgggtgaaaatgttaaaccagcatatggtggtgatgaagaagcctttttgattaaagttgtgactccaatatacaaagttatagagaaggaagctgaaaggagcaagaccatgaaatcaaagcactcccattggagaaactatgatgatctgaatgagtacttttggtcagttgattgtttccggctaggatggcctatgagagctgatgctgactttttcaaaactccaaaagatgcttatctgaatcttttgaatggagagaacagatctgcaggtaatacccattggatgggaaaagttaattttgtggagatacgttcattttggcacatattccgtagtttcgacagaatgtggatcttcttaatattgtccttacaggccatgataattattgcttggaatggtggaacaccaagtgatatttttgatgctggagtatttaagaaggttttgagcatatttattactgctgcaattttgaagttgggtcaagcaatcctagacctcatatttggttggaaagcaagaagaaacatgtcatttgcagtcaagctgcgatatatcttgaagttaatatgtgctgctgcatgggttgtgattttacctgtgacttacgcgtacacttgggagaatcctactggacttgcaagaacaataaaaagttggcttggtgatggtcagaatcagccatctttgtacatattggccatagtgatatatatggcaccaaacatagttgcttctatgctatttcttttcccatttatgagaagattcttagagagttcaaatgttaaggtcataacgatcataatgtggtggtctcagccccggttatttgttggcagagggatgcatgaaggtgcattctccctcttcaagtataccatgttctgggttcttcttttagcaacgaagctgactgtaagcttctatattgagatcaaacctctggtacagccaaccatagatataatgagggaacctatcaggactttccagtggcacgaatttttccctcatggaactaacaatattggtgttgttatatcactgtgggctccaataattctagtatatttcatggacacccaaatttggtatgcactgttctcgacattaattggtggtatctatggggcttatcgtcgtcttggtgagatacggacattaggaatgttgagatctcgctttgaatctttgcccgaggccttcaatgaacgcttgattccttctgatgcaaataagagtaaaggtcttcgtgctgccttttcaagtagacccaaggcttctggtgacgaaagacagaaagagaaaagagctgcaaggtttgctcaaatgtggaatgtcattattacaagtttccgtgaagaagacctcatagacaatagggagatggatctgctactggttccatactgtaaagaccgtgagctcgatatatttcaatggccacctttcttacttgctagcaagatcccaatagcactggatatggcagcagacagtggcggaaaagaccgtgatctgacgaagaggataaaatcagatccatacttttcctttgctatcagagaatgctatgcttcattcaagaacatcatcaatactttagtgtttggtcagcgggagaaagatgtcctagcacagattttcgcagttgtggatcagcatatagaagatgaaactctgataaaggatctcaatatgaggaaccttcctgcactgagcaagaagtttgttgaattacttgaattactgcaaaaaaacaaggaggaagacttgggtcaggtagtcattttgttccaagatatgcttgaggtggtcacaagggatataatggaggaacaggaccagctcggcacactgttggaatctgcacatggtgcaaatagtagaaaacatgaaggaattacaccgctagatcagcaagaccagttgtttgctaaagctattaagttccctgtggatgaatcaattgcatggactgaaaagataaagaggcttcatcttctgttaactgtgaaggagtctgctatggatgttcctactaatcttgatgctaggcggcggatatcattctttgcaaattctttatttatggatatgcccaatgctccaaaagttcggaacatgttggccttctctatcttgactccttattacaaggaagatgttctgttctcattacaaaatctagaagagccaaatgaggatggagtttccattcttttctacttacaaaaaatttacccagatgaatggaaaaatttcctcgaaagggttggctgcaagaatgaagagggactccgtgaagatgaagaactagaagagaagcttcgtctttgggcgtcgtatagggggcagacattaacaagaactgtaagagggatgatgtactatcgaaaagctttggagcttcaggcttttcttgatatggcggaagatgatgatcttatggaaggttacagagcaacagaagtaatgcccgaggactcgcaattaatgactcaatgcaaggctatagctgacatgaagtttacatatgttgtctcatgccaacaatatggaattcagaagcgttctaatgagccttgcgcacatgatattttgagactaatgacggaatatccatcacttcgggtcgcctatattgatgaagttgaagcgcctagccaagatagaaacaagaagattgaaaaggtttactactcagtgttggtgaaggcttctgttacaaaacctgatgagcctggtcagagccttgatcaggtcatctacaagataaagctaccaggtaatgccattttaggtgaaggaaagccagaaaatcagaaccatgcaataatattcaccagaggcgaatgcctccaaactatagatatgaatcaggagcactatatggaggaggctttgaaaatgagaaatctgctgcaagagtttgagaagaaacatggagtgagatatccatcgatacttggagtcagagaacacatatttacgggcagtgtgtcatcccttgcatggttcatgtcaaatcaggaaactagtttcgtaacaattggacaacgagtgcttgccaatccgttgagggttcgttttcattatggtcatcctgatatcttcgatcgccttttccacattacgaggggtggtgtgagtaaagcatccaaaattatcaatctcagtgaggacatatttgattcaattccacattgcgtgaaggcaatgttactcaccacgagtacatgcaagttggcaagggaagggatgtgggtctcaatcaaatatctctgtttgaggcaaagatagcaaatggcaatggcgaacagacgctgagccgtgacatctaccggctgggtcatcgctttgatttcttcagaatgctatcttgctactatacaacaattggtttctacttcagtacaatgattacagtgtggactgtatatgttttcctctatgggcggttatatcttgtacttagtggacttgatgaagcgctggctactggaaggaggtttgtgcacaatgcacctctccaggttgcgcttgcatcggagtcttttgtgcagcttgggtttttgatggcgctacccatgatgatggaaatcggtttggagagaggattcagaacagcattgagtgacttcatactgatgcagcttcagttggcctcagttttcttcacgttctcattgggaacaaaaactcattactacggaaggacattactccatggaggagctgaatacagagccactggacgtgggtttgtggtgttccatgcgaaatttgctgacaactatcgactctattcccgtagccattttgtcaagggcattgagctgatgattctactagttgtgtatgaaatatttagccagccatatagaggggctgtaacttacatcttcatcaccgtgtccatgtggttcatggtgggcacttggctctttgcaccattcctgttcaatccttctggatttgagtggcagaagattgtggacgactggaccgattggcacaagtggatcagcaatcgtggaggtatcggtgtagcaccagagaaaagctgggagtcatggtgggaaaaggagcaagagccccttcgatactccgggaagcgcggtactgttgttgaaatactgcttgcgctgcgtttctttatctaccagtacggacttgtgtatcatctgaatataacgaagaagataactaaggacaaccagagtgtgctggtttattgcttctcatgggttgtaatttttgtgattttgctcgttatgaagaccgtatcagtgggcaggagaaggttcagtgcagagttccagctagtgttccggttgatcaagggtctgatatttataacatttacagccatcgtggtaatcctaatagcgatccctggcatgacggtgctggacatatttgtttgcatccttgctttcatgcccactggatggggtttgctgctgattgcccaagcgatccggcctgtgatccacaagactgggctctggggctcgatcaaggctcttgcccggggctacgagatcctgatgggacttctcctgttcacgcccatcgccttcctcgcctggttcccgttcgtgtcggaattccagaccaggatgctgttcaaccaggcgttcagcagaggtctgcagatctcccgtatcctgggaggacacaagaaagaccgagggacccggaacaaagaatagggctgggctgctgctgattcaaggtttgtgtgcgccactagtatttatgtgtgaatgggtgggtagcatatggctcgagagtatctcctgaatggagattgattgatcctgaagagtagaagagactcgagtgatgtaagatgctgcaggcttgttgctttgttacctaggcgttaggcagaacagatgttttcaggatctctggcctgttaaccacatcttcccctgttcagagtgaattaattcctaatggaaactgatttgtgaattacttcctaatagaggagtgcttccaaactgatttcatgtgtgtgctgtgatattgtttagcatatagtattttaaatgtagctttgaattttcattctttcgcaacaaaaaatgaataggacaagctggtcaaacttgaaaaaaaaa

SEQ ID NO: 58008 - DNA, 6848 bp, Zea Mays
ataaaccctagtggcaaaatcgtagaaccccaggccgctttgtctctgcccacggtccaaccgaaggaaaaaaaagtttgaaaatcaaacacctttcattccccccatccctcctcctgctcatcactgctgctctctggctgctccctctccctccatccccactgctgctctcttgccaaatctgatctagggtttcgttccatctccacgcgccgtcccagtacctatctactctagactactacagtatccaaaaggcaagcttatctgcggagggagtgagctgacgcattcccgtgctggcgagggacagccagacccagacggggagatccgatccgattccgtgctagctgctgcggagtgagtgaggtgacgcgggagcgggatggcggcgccggggcggaggacggcggacgtgtcctcgtcctcgcccgccccctcgccgtccccttccaccggtaggcgcctcctgcgcacgcagaccgtcggcaacctcggcgagtccatcttcgacagcgaggtcgtgccgtcctcgctcgtcgagatcgcacccatcctccgcgtcgccaacgaggtcgaggccaccaacccgcgcgtcgcctacctctgtcgcttctacgctttcgagaaggctcaccgcctcgacccgacatccagtggccgtggtgttcgtcagtttaagaccgcacttctgcagaggcttgagagggaaaatgatcccacgctcaagggaagggtccaccagagcgatgctcgggagatgcagcgcttctaccgcgaatactacaagaagtacatccaggcactgcagcatgctgctgataaggctgaccgagcactgctcactaaagcgtaccagacagctgctgtcttgtttgaggtcttgagggccgttaatgtctcgcagtccgttgaagtcgatcaagcgattttggatacacacaataaggttgaagaaaagaaaaagttgtacgtaccttataacattctcccgcttgatcctgaaagtactggtcaagccattatgcgatatccagagattcaagctgctgtttatgctcttcgcaatactagaggtctgccatggccaaaggaccaagacaagaagcctggcgagaagaatactgggaaagaccttctcgattggcttcaggctatgtttgggtttcagaaagacaacgtgtccaaccaaagggaacatttggtactgttgcttgcaaatgttcatataatgaaagtacccaaggttgaccaacaaccgaagttggatgacaaagctctggatgctgtaatgaagaagctgtttaagaattataagaagtggtgcaagtaccttggccgcaaaagcagcttatggttgccaaccatccagcaggaagtgcagcagcgtaagcttctttatatgggcctctacctgctgatttggggtgaggcggctaacttgagattcatgccagagtgtatttgttacatctaccatcatatggcttttgaactctacggcatgctggctggaaatgtgagcccaatgacgggtgaaaatgttaaaccagcatatggtggtgatgaagaagcctttttgattaaagttgtgactccaatatacaaagttatagagaaggaagctgaaaggagcaagaccatgaaatcaaagcactcccattggagaaactatgatgatctgaatgagtacttttggtcagttgattgtttccggctaggatggcctatgagagctgatgctgactttttcaaaactccaaaagatgcttatctgaatcttttgaatggagagaacagatctgcaggtaatacccattggatgggaaaagttaattttgtggagatacgttcattttggcacatattccgtagtttcgacagaatgtggatcttcttaatattgtccttacaggccatgataattattgcttggaatggtggaacaccaagtgatatttttgatgctggagtatttaagaaggttttgagcatatttattactgctgcaattttgaagttgggtcaagcaatcctagacctcatatttggttggaaagcaagaagaaacatgtcatttgcagtcaagctgcgatatatcttgaagttaatatgtgctgctgcatgggttgtgattttacctgtgacttacgcgtacacttgggagaatcctactggacttgcaagaacaataaaaagttggcttggtgatggtcagaatcagccatctttgtacatattggccatagtgatatatatggcaccaaacatagttgcttctatgctatttcttttcccatttatgagaagattcttagagagttcaaatgttaaggtcataacgatcataatgtggtggtctcagccccggttatttgttggcagagggatgcatgaaggtgcattctccctcttcaagtataccatgttctgggttcttcttttagcaacgaagctgactgtaagcttctatattgagatcaaacctctggtacagccaaccatagatataatgagggaacctatcaggactttccagtggcacgaatttttccctcatggaactaacaatattggtgttgttatatcactgtgggctccaataattctagtatatttcatggacacccaaatttggtatgcactgttctcgacattaattggtggtatctatggggcttatcgtcgtcttggtgagatacggacattaggaatgttgagatctcgctttgaatctttgcccgaggccttcaatgaacgcttgattccttctgatgcaaataagagtaaaggtcttcgtgctgccttttcaagtagacccaaggcttctggtgacgaaagacagaaagagaaaagagctgcaaggtttgctcaaatgtggaatgtcattattacaagtttccgtgaagaagacctcatagacaatagggagatggatctgctactggttccatactgtaaagaccgtgagctcgatatatttcaatggccacctttcttacttgctagcaagatcccaatagcactggatatggcagcagacagtggcggaaaagaccgtgatctgacgaagaggataaaatcagatccatacttttcctttgctatcagagaatgctatgcttcattcaagaacatcatcaatactttagtgtttggtcagcgggagaaagatgtcctagcacagattttcgcagttgtggatcagcatatagaagatgaaactctgataaaggatctcaatatgaggaaccttcctgcactgagcaagaagtttgttgaattacttgaattactgcaaaaaaacaaggaggaagacttgggtcaggtagtcattttgttccaagatatgcttgaggtggtcacaagggatataatggaggaacaggaccagctcggcacactgttggaatctgcacatggtgcaaatagtagaaaacatgaaggaattacaccgctagatcagcaagaccagttgtttgctaaagctattaagttccctgtggatgaatcaattgcatggactgaaaagataaagaggcttcatcttctgttaactgtgaaggagtctgctatggatgttcctactaatcttgatgctaggcggcggatatcattctttgcaaattctttatttatggatatgcccaatgctccaaaagttcggaacatgttggccttctctatcttgactccttattacaaggaagatgttctgttctcattacaaaatctagaagagccaaatgaggatggagtttccattcttttctacttacaaaaaatttacccagatgaatggaaaaatttcctcgaaagggttggctgcaagaatgaagagggactccgtgaagatgaagaactagaagagaagcttcgtctttgggcgtcgtatagggggcagacattaacaagaactgtaagagggatgatgtactatcgaaaagctttggagcttcaggcttttcttgatatggcggaagatgatgatcttatggaaggttacagagcaacagaagtaatgcccgaggactcgcaattaatgactcaatgcaaggctatagctgacatgaagtttacatatgttgtctcatgccaacaatatggaattcagaagcgttctaatgagccttgcgcacatgatattttgagactaatgacggagtgttagtaatgtaacaggatgatgcaaattgttcagatatccatcacttcgggtcgcctatattgatgaagttgaagcgcctagccaagatagaaacaagaagattgaaaaggtttactactcagtgttggtgaaggcttctgttacaaaacctgatgagcctggtcagagccttgatcaggtcatctacaagataaagctaccaggtaatgccattttaggtgaaggaaagccagaaaatcagaaccatgcaataatattcaccagaggcgaatgcctccaaactatagatatgaatcaggagcactatatggaggaggctttgaaaatgagaaatctgctgcaagagtttgagaagaaacatggagtgagatatccatcgatacttggagtcagagaacacatatttacgggcagtgtgtcatcccttgcatggttcatgtcaaatcaggaaactagtttcgtaacaattggacaacgagtgcttgccaatccgttgagggttcgttttcattatggtcatcctgatatcttcgatcgccttttccacattacgaggggtggtgtgagtaaagcatccaaaattatcaatctcagtgaggacatatttgcaggattcaattccacattgcgtgaaggcaatgttactcaccacgagtacatgcaagttggcaagggaagggatgtgggtctcaatcaaatatctctgtttgaggcaaagatagcaaatggcaatggcgaacagacgctgagccgtgacatctaccggctgggtcatcgctttgatttcttcagaatgctatcttgctactatacaacaattggtttctacttcagtacaatggtattttggtgacctgagtttttgaactgttcttgtccgttcattggttaacctttcttgcattttctgacttgttcgttgtttcaccttaacacctctgttatttctgcatgcacttagattacagtgtggactgtatatgttttcctctatgggcggttatatcttgtacttagtggacttgatgaagcgctggctactggaaggaggtttgtgcacaatgcacctctccaggttgcgcttgcatcggagtcttttgtgcagcttgggtttttgatggcgctacccatgatgatggaaatcggtttggagagaggattcagaacagcattgagtgacttcatactgatgcagcttcagttggcctcagttttcttcacgttctcattgggaacaaaaactcattactacggaaggacattactccatggaggagctgaatacagagccactggacgtgggtttgtggtgttccatgcgaaatttgctgacaactatcgactctattcccgtagccattttgtcaagggcattgagctgatgattctactagttgtgtatgaaatatttagccagccatatagaggggctgtaacttacatcttcatcaccgtgtccatgtggttcatggtgggcacttggctctttgcaccattcctgttcaatccttctggatttgagtggcagaagattgtggacgactggaccgattggcacaagtggatcagcaatcgtggaggtatcggtgtagcaccagagaaaagctgggagtcatggtgggaaaaggagcaagagccccttcgatactccgggaagcgcggtactgttgttgaaatactgcttgcgctgcgtttctttatctaccagtacggacttgtgtatcatctgaatataacgaagaagataactaaggacaaccagagtgtgctggtttattgcttctcatgggttgtaatttttgtgattttgctcgttatgaagaccgtatcagtgggcaggagaaggttcagtgcagagttccagctagtgttccggttgatcaagggtctgatatttataacatttacagccatcgtggtaatcctaatagcgatccctggcatgacggtgctggacatatttgtttgcatccttgctttcatgcccactggatggggtttgctgctgattgcccaagcgatccggcctgtgatccacaagactgggctctggggctcgatcaaggctcttgcccggggctacgagatcctgatgggacttctcctgttcacgcccatcgccttcctcgcctggttcccgttcgtgtcggaattccagaccaggatgctgttcaaccaggcgttcagcagaggtctgcagatctcccgtatcctgggaggacacaagaaagaccgagggacccggaacaaagaatagggctgggctgctgctgattcaaggtttgtgtgcgccactagtatttatgtgtgaatgggtgggtagcatatggctcgagagtatctcctgaatggagattgattgatcctgaagagtagaagagactcgagtgatgtaagatgctgcaggcttgttgctttgttacctaggcgttaggcagaacagatgttttcaggatctctggcctgttaaccacatcttcccctgttcagagtgaattaattcctaatggaaactgatttgtgaattacttcctaatagaggagtgcttccaaactgatttcatgtgtgtgctgtgatattgtttagcatatagtattttaaatgtagctttgaattttcattctttcgcaacaaaaaatgaataggacaagctggtcaaacttgaaaaaaaaa

SEQ ID NO: 58009 - DNA, 6756 bp, Zea Mays
ataaaccctagtggcaaaatcgtagaaccccaggccgctttgtctctgcccacggtccaaccgaaggaaaaaaaagtttgaaaatcaaacacctttcattccccccatccctcctcctgctcatcactgctgctctctggctgctccctctccctccatccccactgctgctctcttgccaaatctgatctagggtttcgttccatctccacgcgccgtcccagtacctatctactctagactactacagtatccaaaaggcaagcttatctgcggagggagtgagctgacgcattcccgtgctggcgagggacagccagacccagacggggagatccgatccgattccgtgctagctgctgcggagtgagtgaggtgacgcgggagcgggatggcggcgccggggcggaggacggcggacgtgtcctcgtcctcgcccgccccctcgccgtccccttccaccggtaggcgcctcctgcgcacgcagaccgtcggcaacctcggcgagtccatcttcgacagcgaggtcgtgccgtcctcgctcgtcgagatcgcacccatcctccgcgtcgccaacgaggtcgaggccaccaacccgcgcgtcgcctacctctgtcgcttctacgctttcgagaaggctcaccgcctcgacccgacatccagtggccgtggtgttcgtcagtttaagaccgcacttctgcagaggcttgagagggaaaatgatcccacgctcaagggaagggtccaccagagcgatgctcgggagatgcagcgcttctaccgcgaatactacaagaagtacatccaggcactgcagcatgctgctgataaggctgaccgagcactgctcactaaagcgtaccagacagctgctgtcttgtttgaggtcttgagggccgttaatgtctcgcagtccgttgaagtcgatcaagcgattttggatacacacaataaggttgaagaaaagaaaaagttgtacgtaccttataacattctcccgcttgatcctgaaagtactggtcaagccattatgcgatatccagagattcaagctgctgtttatgctcttcgcaatactagaggtctgccatggccaaaggaccaagacaagaagcctggcgagaagaatactgggaaagaccttctcgattggcttcaggctatgtttgggtttcagaaagacaacgtgtccaaccaaagggaacatttggtactgttgcttgcaaatgttcatataatgaaagtacccaaggttgaccaacaaccgaagttggatgacaaagctctggatgctgtaatgaagaagctgtttaagaattataagaagtggtgcaacagcgtaagcttctttatatgggcctctacctgctgatttggggtgaggcggctaacttgagattcatgccagagtgtatttgttacatctaccatcatatggcttttgaactctacggcatgctggctggaaatgtgagcccaatgacgggtgaaaatgttaaaccagcatatggtggtgatgaagaagcctttttgattaaagttgtgactccaatatacaaagttatagagaaggaagctgaaaggagcaagaccatgaaatcaaagcactcccattggagaaactatgatgatctgaatgagtacttttggtcagttgattgtttccggctaggatggcctatgagagctgatgctgactttttcaaaactccaaaagatgcttatctgaatcttttgaatggagagaacagatctgcaggtaatacccattggatgggaaaagttaattttgtggagatacgttcattttggcacatattccgtagtttcgacagaatgtggatcttcttaatattgtccttacaggccatgataattattgcttggaatggtggaacaccaagtgatatttttgatgctggagtatttaagaaggttttgagcatatttattactgctgcaattttgaagttgggtcaagcaatcctagacctcatatttggttggaaagcaagaagaaacatgtcatttgcagtcaagctgcgatatatcttgaagttaatatgtgctgctgcatgggttgtgattttacctgtgacttacgcgtacacttgggagaatcctactggacttgcaagaacaataaaaagttggcttggtgatggtcagaatcagccatctttgtacatattggccatagtgatatatatggcaccaaacatagttgcttctatgctatttcttttcccatttatgagaagattcttagagagttcaaatgttaaggtcataacgatcataatgtggtggtctcagccccggttatttgttggcagagggatgcatgaaggtgcattctccctcttcaagtataccatgttctgggttcttcttttagcaacgaagctgactgtaagcttctatattgagatcaaacctctggtacagccaaccatagatataatgagggaacctatcaggactttccagtggcacgaatttttccctcatggaactaacaatattggtgttgttatatcactgtgggctccaataattctagtatatttcatggacacccaaatttggtatgcactgttctcgacattaattggtggtatctatggggcttatcgtcgtcttggtgagatacggacattaggaatgttgagatctcgctttgaatctttgcccgaggccttcaatgaacgcttgattccttctgatgcaaataagagtaaaggtcttcgtgctgccttttcaagtagacccaaggcttctggtgacgaaagacagaaagagaaaagagctgcaaggtttgctcaaatgtggaatgtcattattacaagtttccgtgaagaagacctcatagacaatagggagatggatctgctactggttccatactgtaaagaccgtgagctcgatatatttcaatggccacctttcttacttgctagcaagatcccaatagcactggatatggcagcagacagtggcggaaaagaccgtgatctgacgaagaggataaaatcagatccatacttttcctttgctatcagagaatgctatgcttcattcaagaacatcatcaatactttagtgtttggtcagcgggagaaagatgtcctagcacagattttcgcagttgtggatcagcatatagaagatgaaactctgataaaggatctcaatatgaggaaccttcctgcactgagcaagaagtttgttgaattacttgaattactgcaaaaaaacaaggaggaagacttgggtcaggtagtcattttgttccaagatatgcttgaggtggtcacaagggatataatggaggaacaggaccagctcggcacactgttggaatctgcacatggtgcaaatagtagaaaacatgaaggaattacaccgctagatcagcaagaccagttgtttgctaaagctattaagttccctgtggatgaatcaattgcatggactgaaaagataaagaggcttcatcttctgttaactgtgaaggagtctgctatggatgttcctactaatcttgatgctaggcggcggatatcattctttgcaaattctttatttatggatatgcccaatgctccaaaagttcggaacatgttggccttctctatcttgactccttattacaaggaagatgttctgttctcattacaaaatctagaagagccaaatgaggatggagtttccattcttttctacttacaaaaaatttacccagatgaatggaaaaatttcctcgaaagggttggctgcaagaatgaagagggactccgtgaagatgaagaactagaagagaagcttcgtctttgggcgtcgtatagggggcagacattaacaagaactgtaagagggatgatgtactatcgaaaagctttggagcttcaggcttttcttgatatggcggaagatgatgatcttatggaaggttacagagcaacagaagtaatgcccgaggactcgcaattaatgactcaatgcaaggctatagctgacatgaagtttacatatgttgtctcatgccaacaatatggaattcagaagcgttctaatgagccttgcgcacatgatattttgagactaatgacggaatatccatcacttcgggtcgcctatattgatgaagttgaagcgcctagccaagatagaaacaagaagattgaaaaggtttactactcagtgttggtgaaggcttctgttacaaaacctgatgagcctggtcagagccttgatcaggtcatctacaagataaagctaccaggtaatgccattttaggtgaaggaaagccagaaaatcagaaccatgcaataatattcaccagaggcgaatgcctccaaactatagatatgaatcaggagcactatatggaggaggctttgaaaatgagaaatctgctgcaagagtttgagaagaaacatggagtgagatatccatcgatacttggagtcagagaacacatatttacgggcagtgtgtcatcccttgcatggttcatgtcaaatcaggaaactagtttcgtaacaattggacaacgagtgcttgccaatccgttgagggttcgttttcattatggtcatcctgatatcttcgatcgccttttccacattacgaggggtggtgtgagtaaagcatccaaaattatcaatctcagtgaggacatatttgcaggattcaattccacattgcgtgaaggcaatgttactcaccacgagtacatgcaagttggcaagggaagggatgtgggtctcaatcaaatatctctgtttgaggcaaagatagcaaatggcaatggcgaacagacgctgagccgtgacatctaccggctgggtcatcgctttgatttcttcagaatgctatcttgctactatacaacaattggtttctacttcagtacaatggtattttggtgacctgagtttttgaactgttcttgtccgttcattggttaacctttcttgcattttctgacttgttcgttgtttcaccttaacacctctgttatttctgcatgcacttagattacagtgtggactgtatatgttttcctctatgggcggttatatcttgtacttagtggacttgatgaagcgctggctactggaaggaggtttgtgcacaatgcacctctccaggttgcgcttgcatcggagtcttttgtgcagcttgggtttttgatggcgctacccatgatgatggaaatcggtttggagagaggattcagaacagcattgagtgacttcatactgatgcagcttcagttggcctcagttttcttcacgttctcattgggaacaaaaactcattactacggaaggacattactccatggaggagctgaatacagagccactggacgtgggtttgtggtgttccatgcgaaatttgctgacaactatcgactctattcccgtagccattttgtcaagggcattgagctgatgattctactagttgtgtatgaaatatttagccagccatatagaggggctgtaacttacatcttcatcaccgtgtccatgtggttcatggtgggcacttggctctttgcaccattcctgttcaatccttctggatttgagtggcagaagattgtggacgactggaccgattggcacaagtggatcagcaatcgtggaggtatcggtgtagcaccagagaaaagctgggagtcatggtgggaaaaggagcaagagccccttcgatactccgggaagcgcggtactgttgttgaaatactgcttgcgctgcgtttctttatctaccagtacggacttgtgtatcatctgaatataacgaagaagataactaaggacaaccagagtgtgctggtttattgcttctcatgggttgtaatttttgtgattttgctcgttatgaagaccgtatcagtgggcaggagaaggttcagtgcagagttccagctagtgttccggttgatcaagggtctgatatttataacatttacagccatcgtggtaatcctaatagcgatccctggcatgacggtgctggacatatttgtttgcatccttgctttcatgcccactggatggggtttgctgctgattgcccaagcgatccggcctgtgatccacaagactgggctctggggctcgatcaaggctcttgcccggggctacgagatcctgatgggacttctcctgttcacgcccatcgccttcctcgcctggttcccgttcgtgtcggaattccagaccaggatgctgttcaaccaggcgttcagcagaggtctgcagatctcccgtatcctgggaggacacaagaaagaccgagggacccggaacaaagaatagggctgggctgctgctgattcaaggtttgtgtgcgccactagtatttatgtgtgaatgggtgggtagcatatggctcgagagtatctcctgaatggagattgattgatcctgaagagtagaagagactcgagtgatgtaagatgctgcaggcttgttgctttgttacctaggcgttaggcagaacagatgttttcaggatctctggcctgttaaccacatcttcccctgttcagagtgaattaattcctaatggaaactgatttgtgaattacttcctaatagaggagtgcttccaaactgatttcatgtgtgtgctgtgatattgtttagcatatagtattttaaatgtagctttgaattttcattctttcgcaacaaaaaatgaataggacaagctggtcaaacttgaaaaaaaaa

SEQ ID NO: 58010 - DNA, 6660 bp, Zea Mays
ataaaccctagtggcaaaatcgtagaaccccaggccgctttgtctctgcccacggtccaaccgaaggaaaaaaaagtttgaaaatcaaacacctttcattccccccatccctcctcctgctcatcactgctgctctctggctgctccctctccctccatccccactgctgctctcttgccaaatctgatctagggtttcgttccatctccacgcgccgtcccagtacctatctactctagactactacagtatccaaaaggcaagcttatctgcggagggagtgagctgacgcattcccgtgctggcgagggacagccagacccagacggggagatccgatccgattccgtgctagctgctgcggagtgagtgaggtgacgcgggagcgggatggcggcgccggggcggaggacggcggacgtgtcctcgtcctcgcccgccccctcgccgtccccttccaccggtaggcgcctcctgcgcacgcagaccgtcggcaacctcggcgagtccatcttcgacagcgaggtcgtgccgtcctcgctcgtcgagatcgcacccatcctccgcgtcgccaacgaggtcgaggccaccaacccgcgcgtcgcctacctctgtcgcttctacgctttcgagaaggctcaccgcctcgacccgacatccagtggccgtggtgttcgtcagtttaagaccgcacttctgcagaggcttgagagggaaaatgatcccacgctcaagggaagggtccaccagagcgatgctcgggagatgcagcgcttctaccgcgaatactacaagaagtacatccaggcactgcagcatgctgctgataaggctgaccgagcactgctcactaaagcgtaccagacagctgctgtcttgtttgaggtcttgagggccgttaatgtctcgcagtccgttgaagtcgatcaagcgattttggatacacacaataaggttgaagaaaagaaaaagttgtacgtaccttataacattctcccgcttgatcctgaaagtactggtcaagccattatgcgatatccagagattcaagctgctgtttatgctcttcgcaatactagaggtctgccatggccaaaggaccaagacaagaagcctggcgagaagaatactgggaaagaccttctcgattggcttcaggctatgtttgggtttcagaaagacaacgtgtccaaccaaagggaacatttggtactgttgcttgcaaatgttcatataatgaaagtacccaaggttgaccaacaaccgaagttggatgacaaagctctggatgctgtaatgaagaagctgtttaagaattataagaagtggtgcaagtaccttggccgcaaaagcagcttatggttgccaaccatccagcaggaagtgcagcagcgtaagcttctttatatgggcctctacctgctgatttggggtgaggcggctaacttgagattcatgccagagtgtatttgttacatctaccatcatatggcttttgaactctacggcatgctggctggaaatgtgagcccaatgacgggtgaaaatgttaaaccagcatatggtggtgatgaagaagcctttttgattaaagttgtgactccaatatacaaagttatagagaaggaagctgaaaggagcaagaccatgaaatcaaagcactcccattggagaaactatgatgatctgaatgagtacttttggtcagttgattgtttccggctaggatggcctatgagagctgatgctgactttttcaaaactccaaaagatgcttatctgaatcttttgaatggagagaacagatctgcaggtaatacccattggatgggaaaagttaattttgtggagatacgttcattttggcacatattccgtagtttcgacagaatgtggatcttcttaatattgtccttacaggccatgataattattgcttggaatggtggaacaccaagtgatatttttgatgctggagtatttaagaaggttttgagcatatttattactgctgcaattttgaagttgggtcaagcaatcctagacctcatatttggttggaaagcaagaagaaacatgtcatttgcagtcaagctgcgatatatcttgaagttaatatgtgctgctgcatgggttgtgattttacctgtgacttacgcgtacacttgggagaatcctactggacttgcaagaacaataaaaagttggcttggtgatggtcagaatcagccatctttgtacatattggccatagtgatatatatggcaccaaacatagttgcttctatgctatttcttttcccatttatgagaagattcttagagagttcaaatgttaaggtcataacgatcataatgtggtggtctcagccccggttatttgttggcagagggatgcatgaaggtgcattctccctcttcaagtataccatgttctgggttcttcttttagcaacgaagctgactgtaagcttctatattgagatcaaacctctggtacagccaaccatagatataatgagggaacctatcaggactttccagtggcacgaatttttccctcatggaactaacaatattggtgttgttatatcactgtgggctccaataattctagtatatttcatggacacccaaatttggtatgcactgttctcgacattaattggtggtatctatggggcttatcgtcgtcttggtgagatacggacattaggaatgttgagatctcgctttgaatctttgcccgaggccttcaatgaacgcttgattccttctgatgcaaataagagtaaaggtcttcgtgctgccttttcaagtagacccaagaaagagaaaagagctgcaaggtttgctcaaatgtggaatgtcattattacaagtttccgtgaagaagacctcatagacaatagggagatggatctgctactggttccatactgtaaagaccgtgagctcgatatatttcaatggccacctttcttacttgctagcaagatcccaatagcactggatatggcagcagacagtggcggaaaagaccgtgatctgacgaagaggataaaatcagatccatacttttcctttgctatcagagaatgctatgcttcattcaagaacatcatcaatactttagtgtttggtcagcgggagaaagatgtcctagcacagattttcgcagttgtggatcagcatatagaagatgaaactctgataaaggatctcaatatgaggaaccttcctgcactgagcaagaagtttgttgaattacttgaattactgcaaaaaaacaaggaggaagacttgggtcaggtagtcattttgttccaagatatgcttgaggtggtcacaagggatataatggaggaacaggaccagctcggcacataaagaggcttcatcttctgttaactgtgaaggagtctgctatggatgttcctactaatcttgatgctaggcggcggatatcattctttgcaaattctttatttatggatatgcccaatgctccaaaagttcggaacatgttggccttctctatcttgactccttattacaaggaagatgttctgttctcattacaaaatctagaagagccaaatgaggatggagtttccattcttttctacttacaaaaaatttacccagatgaatggaaaaatttcctcgaaagggttggctgcaagaatgaagagggactccgtgaagatgaagaactagaagagaagcttcgtctttgggcgtcgtatagggggcagacattaacaagaactgtaagagggatgatgtactatcgaaaagctttggagcttcaggcttttcttgatatggcggaagatgatgatcttatggaaggttacagagcaacagaagtaatgcccgaggactcgcaattaatgactcaatgcaaggctatagctgacatgaagtttacatatgttgtctcatgccaacaatatggaattcagaagcgttctaatgagccttgcgcacatgatattttgagactaatgacggaatatccatcacttcgggtcgcctatattgatgaagttgaagcgcctagccaagatagaaacaagaagattgaaaaggtttactactcagtgttggtgaaggcttctgttacaaaacctgatgagcctggtcagagccttgatcaggtcatctacaagataaagctaccaggtaatgccattttaggtgaaggaaagccagaaaatcagaaccatgcaataatattcaccagaggcgaatgcctccaaactatagatatgaatcaggagcactatatggaggaggctttgaaaatgagaaatctgctgcaagagtttgagaagaaacatggagtgagatatccatcgatacttggagtcagagaacacatatttacgggcagtgtgtcatcccttgcatggttcatgtcaaatcaggaaactagtttcgtaacaattggacaacgagtgcttgccaatccgttgagggttcgttttcattatggtcatcctgatatcttcgatcgccttttccacattacgaggggtggtgtgagtaaagcatccaaaattatcaatctcagtgaggacatatttgcaggattcaattccacattgcgtgaaggcaatgttactcaccacgagtacatgcaagttggcaagggaagggatgtgggtctcaatcaaatatctctgtttgaggcaaagatagcaaatggcaatggcgaacagacgctgagccgtgacatctaccggctgggtcatcgctttgatttcttcagaatgctatcttgctactatacaacaattggtttctacttcagtacaatggtattttggtgacctgagtttttgaactgttcttgtccgttcattggttaacctttcttgcattttctgacttgttcgttgtttcaccttaacacctctgttatttctgcatgcacttagattacagtgtggactgtatatgttttcctctatgggcggttatatcttgtacttagtggacttgatgaagcgctggctactggaaggaggtttgtgcacaatgcacctctccaggttgcgcttgcatcggagtcttttgtgcagcttgggtttttgatggcgctacccatgatgatggaaatcggtttggagagaggattcagaacagcattgagtgacttcatactgatgcagcttcagttggcctcagttttcttcacgttctcattgggaacaaaaactcattactacggaaggacattactccatggaggagctgaatacagagccactggacgtgggtttgtggtgttccatgcgaaatttgctgacaactatcgactctattcccgtagccattttgtcaagggcattgagctgatgattctactagttgtgtatgaaatatttagccagccatatagaggggctgtaacttacatcttcatcaccgtgtccatgtggttcatggtgggcacttggctctttgcaccattcctgttcaatccttctggatttgagtggcagaagattgtggacgactggaccgattggcacaagtggatcagcaatcgtggaggtatcggtgtagcaccagagaaaagctgggagtcatggtgggaaaaggagcaagagccccttcgatactccgggaagcgcggtactgttgttgaaatactgcttgcgctgcgtttctttatctaccagtacggacttgtgtatcatctgaatataacgaagaagataactaaggacaaccagagtgtgctggtttattgcttctcatgggttgtaatttttgtgattttgctcgttatgaagaccgtatcagtgggcaggagaaggttcagtgcagagttccagctagtgttccggttgatcaagggtctgatatttataacatttacagccatcgtggtaatcctaatagcgatccctggcatgacggtgctggacatatttgtttgcatccttgctttcatgcccactggatggggtttgctgctgattgcccaagcgatccggcctgtgatccacaagactgggctctggggctcgatcaaggctcttgcccggggctacgagatcctgatgggacttctcctgttcacgcccatcgccttcctcgcctggttcccgttcgtgtcggaattccagaccaggatgctgttcaaccaggcgttcagcagaggtctgcagatctcccgtatcctgggaggacacaagaaagaccgagggacccggaacaaagaatagggctgggctgctgctgattcaaggtttgtgtgcgccactagtatttatgtgtgaatgggtgggtagcatatggctcgagagtatctcctgaatggagattgattgatcctgaagagtagaagagactcgagtgatgtaagatgctgcaggcttgttgctttgttacctaggcgttaggcagaacagatgttttcaggatctctggcctgttaaccacatcttcccctgttcagagtgaattaattcctaatggaaactgatttgtgaattacttcctaatagaggagtgcttccaaactgatttcatgtgtgtgctgtgatattgtttagcatatagtattttaaatgtagctttgaattttcattctttcgcaacaaaaaatgaataggacaagctggtcaaacttgaaaaaaaaa

SEQ ID NO: 58011 - DNA, 6597 bp, Zea Mays
ataaaccctagtggcaaaatcgtagaaccccaggccgctttgtctctgcccacggtccaaccgaaggaaaaaaaagtttgaaaatcaaacacctttcattccccccatccctcctcctgctcatcactgctgctctctggctgctccctctccctccatccccactgctgctctcttgccaaatctgatctagggtttcgttccatctccacgcgccgtcccagtacctatctactctagactactacagtatccaaaaggcaagcttatctgcggagggagtgagctgacgcattcccgtgctggcgagggacagccagacccagacggggagatccgatccgattccgtgctagctgctgcggagtgagtgaggtgacgcgggagcgggatggcggcgccggggcggaggacggcggacgtgtcctcgtcctcgcccgccccctcgccgtccccttccaccggtaggcgcctcctgcgcacgcagaccgtcggcaacctcggcgagtccatcttcgacagcgaggtcgtgccgtcctcgctcgtcgagatcgcacccatcctccgcgtcgccaacgaggtcgaggccaccaacccgcgcgtcgcctacctctgtcgcttctacgctttcgagaaggctcaccgcctcgacccgacatccagtggccgtggtgttcgtcagtttaagaccgcacttctgcagaggcttgagagggaaaatgatcccacgctcaagggaagggtccaccagagcgatgctcgggagatgcagcgcttctaccgcgaatactacaagaagtacatccaggcactgcagcatgctgctgataaggctgaccgagcactgctcactaaagcgtaccagacagctgctgtcttgtttgaggtcttgagggccgttaatgtctcgcagtccgttgaagtcgatcaagcgattttggatacacacaataaggttgaagaaaagaaaaagttgtacgtaccttataacattctcccgcttgatcctgaaagtactggtcaagccattatgcgatatccagagattcaagctgctgtttatgctcttcgcaatactagaggtctgccatggccaaaggaccaagacaagaagcctggcgagaagaatactgggaaagaccttctcgattggcttcaggctatgtttgggtttcagaaagacaacgtgtccaaccaaagggaacatttggtactgttgcttgcaaatgttcatataatgaaagtacccaaggttgaccaacaaccgaagttggatgacaaagctctggatgctgtaatgaagaagctgtttaagaattataagaagtggtgcaagtaccttggccgcaaaagcagcttatggttgccaaccatccagcaggaagtgcagcagcgtaagcttctttatatgggcctctacctgctgatttggggtgaggcggctaacttgagattcatgccagagtgtatttgttacatctaccatcatatggcttttgaactctacggcatgctggctggaaatgtgagcccaatgacgggtgaaaatgttaaaccagcatatggtggtgatgaagaagcctttttgattaaagttgtgactccaatatacaaagttatagagaaggaagctgaaaggagcaagaccatgaaatcaaagcactcccattggagaaactatgatgatctgaatgagtacttttggagaacagatctgcaggtaatacccattggatgggaaaagttaattttgtggagatacgttcattttggcacatattccgtagtttcgacagaatgtggatcttcttaatattgtccttacaggccatgataattattgcttggaatggtggaacaccaagtgatatttttgatgctggagtatttaagaaggttttgagcatatttattactgctgcaattttgaagttgggtcaagcaatcctagacctcatatttggttggaaagcaagaagaaacatgtcatttgcagtcaagctgcgatatatcttgaagttaatatgtgctgctgcatgggttgtgattttacctgtgacttacgcgtacacttgggagaatcctactggacttgcaagaacaataaaaagttggcttggtgatggtcagaatcagccatctttgtacatattggccatagtgatatatatggcaccaaacatagttgcttctatgctatttcttttcccatttatgagaagattcttagagagttcaaatgttaaggtcataacgatcataatgtggtggtctcagccccggttatttgttggcagagggatgcatgaaggtgcattctccctcttcaagtataccatgttctgggttcttcttttagcaacgaagctgactgtaagcttctatattgagatcaaacctctggtacagccaaccatagatataatgagggaacctatcaggactttccagtggcacgaatttttccctcatggaactaacaatattggtgttgttatatcactgtgggctccaataattctagtatatttcatggacacccaaatttggtatgcactgttctcgacattaattggtggtatctatggggcttatcgtcgtcttggtgagatacggacattaggaatgttgagatctcgctttgaatctttgcccgaggccttcaatgaacgcttgattccttctgatgcaaataagagtaaaggtcttcgtgctgccttttcaagtagacccaaggcttctggtgacgaaagacagaaagagaaaagagctgcaaggtttgctcaaatgtggaatgtcattattacaagtttccgtgaagaagacctcatagacaatagggagatggatctgctactggttccatactgtaaagaccgtgagctcgatatatttcaatggccacctttcttacttgctagcaagatcccaatagcactggatatggcagcagacagtggcggaaaagaccgtgatctgacgaagaggataaaatcagatccatacttttcctttgctatcagagaatgctatgcttcattcaagaacatcatcaatactttagtgtttggtcagcgggagaaagatgtcctagcacagattttcgcagttgtggatcagcatatagaagatgaaactctgataaaggatctcaatatgaggaaccttcctgcactgagcaagaagtttgttgaattacttgaattactgcaaaaaaacaaggaggaagacttgggtcaggtagtcattttgttccaagatatgcttgaggtggtcacaagggatataatggaggaacaggaccagctcggcacactgttggaatctgcacatggtgcaaatagtagaaaacatgaaggaattacaccgctagatcagcaagaccagttgtttgctaaagctattaagttccctgtggatgaatcaattgcatggactgaaaagataaagaggcttcatcttctgttaactgtgaaggagtctgctatggatgttcctactaatcttgatgctaggcggcggatatcattctttgcaaattctttatttatggatatgcccaatgctccaaaagttcggaacatgttggccttctctatcttgactccttattacaaggaagatgttctgttctcattacaaaatctagaagagccaaatgaggatggagtttccattcttttctacttacaaaaaatttacccagatgaatggaaaaatttcctcgaaagggttggctgcaagaatgaagagggactccgtgaagatgaagaactagaagagaagcttcgtctttgggcgtcgtatagggggcagacattaacaagaactgtaagagggatgatgtactatcgaaaagctttggagcttcaggcttttcttgatatggcggaagatgatgatcttatggaaggttacagagcaacagaagtaatgcccgaggactcgcaattaatgactcaatgcaaggctatagctgacatgaagtttacatatgttgtctcatgccaacaatatggaattcagaagcgttctaatgagccttgcgcacatgatattttgagactaatgacggaatatccatcacttcgggtcgcctatattgatgaagttgaagcgcctagccaagatagaaacaagaagattgaaaaggtttactactcagtgttggtgaaggcttctgttacaaaacctgatgagcctggtcagagccttgatcaggtcatctacaagataaagctaccaggtaatgccattttaggtgaaggaaagccagaaaatcagaaccatgcaataatattcaccagaggcgaatgcctccaaactatagatatgaatcaggagcactatatggaggaggctttgaaaatgagaaatctgctgcaagagtttgagaagaaacatggagtgagatatccatcgatacttggagtcagagaacacatatttacgggcagtgtgtcatcccttgcatggttcatgtcaaatcaggaaactagtttcgtaacaattggacaacgagtgcttgccaatccgttgagggttcgttttcattatggtcatcctgatatcttcgatcgccttttccacattacgaggggtggtgtgagtaaagcatccaaaattatcaatctcagtgaggacatatttgcaggattcaattccacattgcgtgaaggcaatgttactcaccacgagtacatgcaagttggcaagggaagggatgtgggtctcaatcaaatatctctgtttgaggcaaagatagcaaatggcaatggcgaacagacgctgagccgtgacatctaccggctgggtcatcgctttgatttcttcagaatgctatcttgctactatacaacaattggtttctacttcagtacaatgattacagtgtggactgtatatgttttcctctatgggcggttatatcttgtacttagtggacttgatgaagcgctggctactggaaggaggtttgtgcacaatgcacctctccaggttgcgcttgcatcggagtcttttgtgcagcttgggtttttgatggcgctacccatgatgatggaaatcggtttggagagaggattcagaacagcattgagtgacttcatactgatgcagcttcagttggcctcagttttcttcacgttctcattgggaacaaaaactcattactacggaaggacattactccatggaggagctgaatacagagccactggacgtgggtttgtggtgttccatgcgaaatttgctgacaactatcgactctattcccgtagccattttgtcaagggcattgagctgatgattctactagttgtgtatgaaatatttagccagccatatagaggggctgtaacttacatcttcatcaccgtgtccatgtggttcatggtgggcacttggctctttgcaccattcctgttcaatccttctggatttgagtggcagaagattgtggacgactggaccgattggcacaagtggatcagcaatcgtggaggtatcggtgtagcaccagagaaaagctgggagtcatggtgggaaaaggagcaagagccccttcgatactccgggaagcgcggtactgttgttgaaatactgcttgcgctgcgtttctttatctaccagtacggacttgtgtatcatctgaatataacgaagaagataactaaggacaaccagagtgtgctggtttattgcttctcatgggttgtaatttttgtgattttgctcgttatgaagaccgtatcagtgggcaggagaaggttcagtgcagagttccagctagtgttccggttgatcaagggtctgatatttataacatttacagccatcgtggtaatcctaatagcgatccctggcatgacggtgctggacatatttgtttgcatccttgctttcatgcccactggatggggtttgctgctgattgcccaagcgatccggcctgtgatccacaagactgggctctggggctcgatcaaggctcttgcccggggctacgagatcctgatgggacttctcctgttcacgcccatcgccttcctcgcctggttcccgttcgtgtcggaattccagaccaggatgctgttcaaccaggcgttcagcagaggtctgcagatctcccgtatcctgggaggacacaagaaagaccgagggacccggaacaaagaatagggctgggctgctgctgattcaaggtttgtgtgcgccactagtatttatgtgtgaatgggtgggtagcatatggctcgagagtatctcctgaatggagattgattgatcctgaagagtagaagagactcgagtgatgtaagatgctgcaggcttgttgctttgttacctaggcgttaggcagaacagatgttttcaggatctctggcctgttaaccacatcttcccctgttcagagtgaattaattcctaatggaaactgatttgtgaattacttcctaatagaggagtgcttccaaactgatttcatgtgtgtgctgtgatattgtttagcatatagtattttaaatgtagctttgaattttcattctttcgcaacaaaaaatgaataggacaagctggtcaaacttgaaaaaaaaa

SEQ ID NO: 58012 - DNA, 6686 bp, Zea Mays
ataaaccctagtggcaaaatcgtagaaccccaggccgctttgtctctgcccacggtccaaccgaaggaaaaaaaagtttgaaaatcaaacacctttcattccccccatccctcctcctgctcatcactgctgctctctggctgctccctctccctccatccccactgctgctctcttgccaaatctgatctagggtttcgttccatctccacgcgccgtcccagtacctatctactctagactactacagtatccaaaaggcaagcttatctgcggagggagtgagctgacgcattcccgtgctggcgagggacagccagacccagacggggagatccgatccgattccgtgctagctgctgcggagtgagtgaggtgacgcgggagcgggatggcggcgccggggcggaggacggcggacgtgtcctcgtcctcgcccgccccctcgccgtccccttccaccggtaggcgcctcctgcgcacgcagaccgtcggcaacctcggcgagtccatcttcgacagcgaggtcgtgccgtcctcgctcgtcgagatcgcacccatcctccgcgtcgccaacgaggtcgaggccaccaacccgcgcgtcgcctacctctgtcgcttctacgctttcgagaaggctcaccgcctcgacccgacatccagtggccgtggtgttcgtcagtttaagaccgcacttctgcagaggcttgagagggaaaatgatcccacgctcaagggaagggtccaccagagcgatgctcgggagatgcagcgcttctaccgcgaatactacaagaagtacatccaggcactgcagcatgctgctgataaggctgaccgagcactgctcactaaagcgtaccagacagctgctgtcttgtttgaggtcttgagggccgttaatgtctcgcagtccgttgaagtcgatcaagcgattttggatacacacaataaggttgaagaaaagaaaaagttgtacgtaccttataacattctcccgcttgatcctgaaagtactggtcaagccattatgcgatatccagagattcaagctgctgtttatgctcttcgcaatactagaggtctgccatggccaaaggaccaagacaagaagcctggcgagaagaatactgggaaagaccttctcgattggcttcaggctatgtttgggtttcagaaagacaacgtgtccaaccaaagggaacatttggtactgttgcttgcaaatgttcatataatgaaagtacccaaggttgaccaacaaccgaagttggatgacaaagctctggatgctgtaatgaagaagctgtttaagaattataagaagtggtgcaagtaccttggccgcaaaagcagcttatggttgccaaccatccagcaggaagtgcagcagcgtaagcttctttatatgggcctctacctgctgatttggggtgaggcggctaacttgagattcatgccagagtgtatttgttacatctaccatcatatggcttttgaactctacggcatgctggctggaaatgtgagcccaatgacgggtgaaaatgttaaaccagcatatggtggtgatgaagaagcctttttgattaaagttgtgactccaatatacaaagttatagagaaggaagctgaaaggagcaagaccatgaaatcaaagcactcccattggagaaactatgatgatctgaatgagtacttttggtcagttgattgtttccggctaggatggcctatgagagctgatgctgactttttcaaaactccaaaagatgcttatctgaatcttttgaatggagagaacagatctgcaggtaatacccattggatgggaaaagttaattttgtggagatacgttcattttggcacatattccgtagtttcgacagaatgtggatcttcttaatattgtccttacaggccatgataattattgcttggaatggtggaacaccaagtgatatttttgatgctggagtatttaagaaggttttgagcatatttattactgctgcaattttgaagttgggtcaagcaatcctagacctcatatttggttggaaagcaagaagaaacatgtcatttgcagtcaagctgcgatatatcttgaagttaatatgtgctgctgcatgggttgtgattttacctgtgacttacgcgtacacttgggagaatcctactggacttgcaagaacaataaaaagttggcttggtgatggtcagaatcagccatctttgtacatattggccatagtgatatatatggcaccaaacatagttgcttctatgctatttcttttcccatttatgagaagattcttagagagttcaaatgttaaggtcataacgatcataatgtggtggtctcagccccggttatttgttggcagagggatgcatgaaggtgcattctccctcttcaagtataccatgttctgggttcttcttttagcaacgaagctgactgtaagcttctatattgagatcaaacctctggtacagccaaccatagatataatgagggaacctatcaggactttccagtggcacgaatttttccctcatggaactaacaatattggtgttgttatatcactgtgggctccaataattctagtatatttcatggacacccaaatttggtatgcactgttctcgacattaattggtggtatctatggggcttatcgtcgtcttgatacggacattaggaatgttgagatctcgctttgaatctttgcccgaggccttcaatgaacgcttgattccttctgatgcaaataagagtaaaggtcttcgtgctgccttttcaagtagacccaaggcttctggtgacgaaagacagaaagagaaaagagctgcaaggtttgctcaaatgtggaatgtcattattacaagtttccgtgaagaagacctcatagacaatagggagatggatctgctactggttccatactgtaaagaccgtgagctcgatatatttcaatggccacctttcttacttgctagcaagatcccaatagcactggatatggcagcagacagtggcggaaaagaccgtgatctgacgaagaggataaaatcagatccatacttttcctttgctatcagagaatgctatgcttcattcaagaacatcatcaatactttagtgtttggtcagcgggagaaagatgtcctagcacagattttcgcagttgtggatcagcatatagaagatgaaactctgataaaggatctcaatatgaggaaccttcctgcactgagcaagaagtttgttgaattacttgaattactgcaaaaaaacaaggaggaagacttgggtcaggtagtcattttgttccaagatatgcttgaggtggtcacaagggatataatggaggaacaggaccagctcggcacactgttggaatctgcacatggtgcaaatagtagaaaacatgaaggaattacaccgctagatcagcaagaccagttgtttgctaaagctattaagttccctgtggatgaatcaattgcatggactgaaaagataaagaggcttcatcttctgttaactgtgaaggagtctgctatggatgttcctactaatcttgatgctaggcggcggatatcattctttgcaaattctttatttatggatatgcccaatgctccaaaagttcggaacatgttggccttctctatcttgactccttattacaaggaagatgttctgttctcattacaaaatctagaagagccaaatgaggatggagtttccattcttttctacttacaaaaaatttacccagatgaatggaaaaatttcctcgaaagggttggctgcaagaatgaagagggactccgtgaagatgaagaactagaagagaagcttcgtctttgggcgtcgtatagggggcagacattaacaagaactgtaagagggatgatgtactatcgaaaagctttggagcttcaggcttttcttgatatggcggaagatgatgatcttatggaaggttacagagcaacagaagtaatgcccgaggactcgcaattaatgactcaatgcaaggctatagctgacatgaagtttacatatgttgtctcatgccaacaatatggaattcagaagcgttctaatgagccttgcgcacatgatattttgagactaatgacggaatatccatcacttcgggtcgcctatattgatgaagttgaagcgcctagccaagatagaaacaagaagattgaaaaggtttactactcagtgttggtgaaggcttctgttacaaaacctgatgagcctggtcagagccttgatcaggtcatctacaagataaagctaccaggtaatgccattttaggtgaaggaaagccagaaaatcagaaccatgcaataatattcaccagaggcgaatgcctccaaactatagatatgaatcaggagcactatatggaggaggctttgaaaatgagaaatctgctgcaagagtttgagaagaaacatggagtgagatatccatcgatacttggagtcagagaacacatatttacgggcagtgtgtcatcccttgcatggttcatgtcaaatcaggaaactagtttcgtaacaattggacaacgagtgcttgccaatccgttgagggttcgttttcattatggtcatcctgatatcttcgatcgccttttccacattacgaggggtggtgtgagtaaagcatccaaaattatcaatctcagtgaggacatatttgcaggattcaattccacattgcgtgaaggcaatgttactcaccacgagtacatgcaagttggcaagggaagggatgtgggtctcaatcaaatatctctgtttgaggcaaagatagcaaatggcaatggcgaacagacgctgagccgtgacatctaccggctgggtcatcgctttgatttcttcagaatgctatcttgctactatacaacaattggtttctacttcagtacaatgattacagtgtggactgtatatgttttcctctatgggcggttatatcttgtacttagtggacttgatgaagcgctggctactggaaggaggtttgtgcacaatgcacctctccaggttgcgcttgcatcggagtcttttgtgcagcttgggtttttgatggcgctacccatgatgatggaaatcggtttggagagaggattcagaacagcattgagtgacttcatactgatgcagcttcagttggcctcagttttcttcacgttctcattgggaacaaaaactcattactacggaaggacattactccatggaggagctgaatacagagccactggacgtgggtttgtggtgttccatgcgaaatttgctgacaactatcgactctattcccgtagccattttgtcaagggcattgagctgatgattctactagttgtgtatgaaatatttagccagccatatagaggggctgtaacttacatcttcatcaccgtgtccatgtggttcatggtgggcacttggctctttgcaccattcctgttcaatccttctggatttgagtggcagaagattgtggacgactggaccgattggcacaagtggatcagcaatcgtggaggtatcggtgtagcaccagagaaaagctgggagtcatggtgggaaaaggagcaagagccccttcgatactccgggaagcgcggtactgttgttgaaatactgcttgcgctgcgtttctttatctaccagtacggacttgtgtatcatctgaatataacgaagaagataactaaggacaaccagagtgtgctggtttattgcttctcatgggttgtaatttttgtgattttgctcgttatgaagaccgtatcagtgggcaggagaaggttcagtgcagagttccagctagtgttccggttgatcaagggtctgatatttataacatttacagccatcgtggtaatcctaatagcgatccctggcatgacggtgctggacatatttgtttgcatccttgctttcatgcccactggatggggtttgctgctgattgcccaagcgatccggcctgtgatccacaagactgggctctggggctcgatcaaggctcttgcccggggctacgagatcctgatgggacttctcctgttcacgcccatcgccttcctcgcctggttcccgttcgtgtcggaattccagaccaggatgctgttcaaccaggcgttcagcagaggtctgcagatctcccgtatcctgggaggacacaagaaagaccgagggacccggaacaaagaatagggctgggctgctgctgattcaaggtttgtgtgcgccactagtatttatgtgtgaatgggtgggtagcatatggctcgagagtatctcctgaatggagattgattgatcctgaagagtagaagagactcgagtgatgtaagatgctgcaggcttgttgctttgttacctaggcgttaggcagaacagatgttttcaggatctctggcctgttaaccacatcttcccctgttcagagtgaattaattcctaatggaaactgatttgtgaattacttcctaatagaggagtgcttccaaactgatttcatgtgtgtgctgtgatattgtttagcatatagtattttaaatgtagctttgaattttcattctttcgcaacaaaaaatgaataggacaagctggtcaaacttgaaaaaaaaa

SEQ ID NO: 58013 - DNA, 5784 bp, Zea Mays
ataaaccctagtggcaaaatcgtagaaccccaggccgctttgtctctgcccacggtccaaccgaaggaaaaaaaagtttgaaaatcaaacacctttcattccccccatccctcctcctgctcatcactgctgctctctggctgctccctctccctccatccccactgctgctctcttgccaaatctgatctagggtttcgttccatctccacgcgccgtcccagtacctatctactctagactactacagtatccaaaaggcaagcttatctgcggagggagtgagctgacgcattcccgtgctggcgagggacagccagacccagacggggagatccgatccgattccgtgctagctgctgcggagtgagtgaggtgacgcgggagcgggatggcggcgccggggcggaggacggcggacgtgtcctcgtcctcgcccgccccctcgccgtccccttccaccggtaggcgcctcctgcgcacgcagaccgtcggcaacctcggcgagtccatcttcgacagcgaggtcgtgccgtcctcgctcgtcgagatcgcacccatcctccgcgtcgccaacgaggtcgaggccaccaacccgcgcgtcgcctacctctgtcgcttctacgctttcgagaaggctcaccgcctcgacccgacatccagtggccgtggtgttcgtcagtttaagaccgcacttctgcagaggcttgagagggaaaatgatcccacgctcaagggaagggtccaccagagcgatgctcgggagatgcagcgcttctaccgcgaatactacaagaagtacatccaggcactgcagcatgctgctgataaggctgaccgagcactgctcactaaagcgtaccagacagctgctgtcttgtttgaggtcttgagggccgttaatgtctcgcagtccgttgaagtcgatcaagcgattttggatacacacaataaggttgaagaaaagaaaaagttgtacgtaccttataacattctcccgcttgatcctgaaagtactggtcaagccattatgcgatatccagagattcaagctgctgtttatgctcttcgcaatactagaggtctgccatggccaaaggaccaagacaagaagcctggcgagaagaatactgggaaagaccttctcgattggcttcaggctatgtttgggtttcagaaagacaacgtgtccaaccaaagggaacatttggtactgttgcttgcaaatgttcatataatgaaagtacccaaggttgaccaacaaccgaagttggatgacaaagctctggatgctgtaatgaagaagctgtttaagaattataagaagtggtgcaagtaccttggccgcaaaagcagcttatggttgccaaccatccagcaggaagtgcagcagcgtaagcttctttatatgggcctctacctgctgatttggggtgaggcggctaacttgagattcatgccagagtgtatttgttacatctaccatcatatggcttttgaactctacggcatgctggctggaaatgtgagcccaatgacgggtgaaaatgttaaaccagcatatggtggtgatgaagaagcctttttgattaaagttgtgactccaatatacaaagttatagagaaggaagctgaaaggagcaagaccatgaaatcaaagcactcccattggagaaactatgatgatctgaatgagtacttttggtcagttgattgtttccggctaggatggcctatgagagctgatgctgactttttcaaaactccaaaagatgcttatctgaatcttttgaatggagagaacagatctgcaggtaatacccattggatgggaaaagttaattttgtggagatacgttcattttggcacatattccgtagtttcgacagaatgtggatcttcttaatattgtccttacaggccatgataattattgcttggaatggtggaacaccaagtgatatttttgatgctggagtatttaagaaggttttgagcatatttattactgctgcaattttgaagttgggtcaagcaatcctagacctcatatttggttggaaagcaagaagaaacatgtcatttgcagtcaagctgcgatatatcttgaagttaatatgtgctgctgcatgggttgtgattttacctgtgacttacgcgtacacttgggagaatcctactggacttgcaagaacaataaaaagttggcttggtgatggtcagaatcagccatctttgtacatattggccatagtgatatatatggcaccaaacatagttgcttctatgctatttcttttcccatttatgagaagattcttagagagttcaaatgttaaggtcataacgatcataatgtggtggtctcagccccggttatttgttggcagagggatgcatgaaggtgcattctccctcttcaagtataccatgttctgggttcttcttttagcaacgaagctgactgtaagcttctatattgagatcaaacctctggtacagccaaccatagatataatgagggaacctatcaggactttccagtggcacgaatttttccctcatggaactaacaatattggtgttgttatatcactgtgggctccaataattctagtatatttcatggacacccaaatttggtatgcactgttctcgacattaattggtggtatctatggggcttatcgtcgtcttggtgagatacggacattaggaatgttgagatctcgctttgaatctttgcccgaggccttcaatgaacgcttgattccttctgatgcaaataagagtaaaggtcttcgtgctgccttttcaagtagacccaaggcttctggtgacgaaagacagaaagagaaaagagctgcaaggtttgctcaaatgtggaatgtcattattacaagtttccgtgaagaagacctcatagacaatagggagatggatctgctactggttccatactgtaaagaccgtgagctcgatatatttcaatggccacctttcttacttgctagcaagtaagagggatgatgtactatcgaaaagctttggagcttcaggcttttcttgatatggcggaagatgatgatcttatggaaggttacagagcaacagaagtaatgcccgaggactcgcaattaatgactcaatgcaaggctatagctgacatgaagtttacatatgttgtctcatgccaacaatatggaattcagaagcgttctaatgagccttgcgcacatgatattttgagactaatgacggaatatccatcacttcgggtcgcctatattgatgaagttgaagcgcctagccaagatagaaacaagaagattgaaaaggtttactactcagtgttggtgaaggcttctgttacaaaacctgatgagcctggtcagagccttgatcaggtcatctacaagataaagctaccaggtaatgccattttaggtgaaggaaagccagaaaatcagaaccatgcaataatattcaccagaggcgaatgcctccaaactatagatatgaatcaggagcactatatggaggaggctttgaaaatgagaaatctgctgcaagagtttgagaagaaacatggagtgagatatccatcgatacttggagtcagagaacacatatttacgggcagtgtgtcatcccttgcatggttcatgtcaaatcaggaaactagtttcgtaacaattggacaacgagtgcttgccaatccgttgagggttcgttttcattatggtcatcctgatatcttcgatcgccttttccacattacgaggggtggtgtgagtaaagcatccaaaattatcaatctcagtgaggacatatttgcaggattcaattccacattgcgtgaaggcaatgttactcaccacgagtacatgcaagttggcaagggaagggatgtgggtctcaatcaaatatctctgtttgaggcaaagatagcaaatggcaatggcgaacagacgctgagccgtgacatctaccggctgggtcatcgctttgatttcttcagaatgctatcttgctactatacaacaattggtttctacttcagtacaatgattacagtgtggactgtatatgttttcctctatgggcggttatatcttgtacttagtggacttgatgaagcgctggctactggaaggaggtttgtgcacaatgcacctctccaggttgcgcttgcatcggagtcttttgtgcagcttgggtttttgatggcgctacccatgatgatggaaatcggtttggagagaggattcagaacagcattgagtgacttcatactgatgcagcttcagttggcctcagttttcttcacgttctcattgggaacaaaaactcattactacggaaggacattactccatggaggagctgaatacagagccactggacgtgggtttgtggtgttccatgcgaaatttgctgacaactatcgactctattcccgtagccattttgtcaagggcattgagctgatgattctactagttgtgtatgaaatatttagccagccatatagaggggctgtaacttacatcttcatcaccgtgtccatgtggttcatggtgggcacttggctctttgcaccattcctgttcaatccttctggatttgagtggcagaagattgtggacgactggaccgattggcacaagtggatcagcaatcgtggaggtatcggtgtagcaccagagaaaagctgggagtcatggtgggaaaaggagcaagagccccttcgatactccgggaagcgcggtactgttgttgaaatactgcttgcgctgcgtttctttatctaccagtacggacttgtgtatcatctgaatataacgaagaagataactaaggacaaccagagtgtgctggtttattgcttctcatgggttgtaatttttgtgattttgctcgttatgaagaccgtatcagtgggcaggagaaggttcagtgcagagttccagctagtgttccggttgatcaagggtctgatatttataacatttacagccatcgtggtaatcctaatagcgatccctggcatgacggtgctggacatatttgtttgcatccttgctttcatgcccactggatggggtttgctgctgattgcccaagcgatccggcctgtgatccacaagactgggctctggggctcgatcaaggctcttgcccggggctacgagatcctgatgggacttctcctgttcacgcccatcgccttcctcgcctggttcccgttcgtgtcggaattccagaccaggatgctgttcaaccaggcgttcagcagaggtctgcagatctcccgtatcctgggaggacacaagaaagaccgagggacccggaacaaagaatagggctgggctgctgctgattcaaggtttgtgtgcgccactagtatttatgtgtgaatgggtgggtagcatatggctcgagagtatctcctgaatggagattgattgatcctgaagagtagaagagactcgagtgatgtaagatgctgcaggcttgttgctttgttacctaggcgttaggcagaacagatgttttcaggatctctggcctgttaaccacatcttcccctgttcagagtgaattaattcctaatggaaactgatttgtgaattacttcctaatagaggagtgcttccaaactgatttcatgtgtgtgctgtgatattgtttagcatatagtattttaaatgtagctttgaattttcattctttcgcaacaaaaaatgaataggacaagctggtcaaacttgaaaaaaaaa

SEQ ID NO: 58014 - DNA, 6713 bp, Zea Mays
ataaaccctagtggcaaaatcgtagaaccccaggccgctttgtctctgcccacggtccaaccgaaggaaaaaaaagtttgaaaatcaaacacctttcattccccccatccctcctcctgctcatcactgctgctctctggctgctccctctccctccatccccactgctgctctcttgccaaatctgatctagggtttcgttccatctccacgcgccgtcccagtacctatctactctagactactacagtatccaaaaggcaagcttatctgcggagggagtgagctgacgcattcccgtgctggcgagggacagccagacccagacggggagatccgatccgattccgtgctagctgctgcggagtgagtgaggtgacgcgggagcgggatggcggcgccggggcggaggacggcggacgtgtcctcgtcctcgcccgccccctcgccgtccccttccaccggtaggcgcctcctgcgcacgcagaccgtcggcaacctcggcgagtccatcttcgacagcgaggtcgtgccgtcctcgctcgtcgagatcgcacccatcctccgcgtcgccaacgaggtcgaggccaccaacccgcgcgtcgcctacctctgtcgcttctacgctttcgagaaggctcaccgcctcgacccgacatccagtggccgtggtgttcgtcagtttaagaccgcacttctgcagaggcttgagagggaaaatgatcccacgctcaagggaagggtccaccagagcgatgctcgggagatgcagcgcttctaccgcgaatactacaagaagtacatccaggcactgcagcatgctgctgataaggctgaccgagcactgctcactaaagcgtaccagacagctgctgtcttgtttgaggtcttgagggccgttaatgtctcgcagtccgttgaagtcgatcaagcgattttggatacacacaataaggttgaagaaaagaaaaagttgtacgtaccttataacattctcccgcttgatcctgaaagtactggtcaagccattatgcgatatccagagattcaagctgctgtttatgctcttcgcaatactagaggtctgccatggccaaaggaccaagacaagaagcctggcgagaagaatactgggaaagaccttctcgattggcttcaggctatgtttgggtttcagaaagacaacgtgtccaaccaaagggaacatttggtactgttgcttgcaaatgttcatataatgaaagtacccaaggttgaccaacaaccgaagttggatgacaaagctctggatgctgtaatgaagaagctgtttaagaattataagaagtggtgcaagtaccttggccgcaaaagcagcttatggttgccaaccatccagcaggaagtgcagcagcgtaagcttctttatatgggcctctacctgctgatttggggtgaggcggctaacttgagattcatgccagagtgtatttgttacatctaccatcatatggcttttgaactctacggcatgctggctggaaatgtgagcccaatgacgggtgaaaatgttaaaccagcatatggtggtgatgaagaagcctttttgattaaagttgtgactccaatatacaaagttatagagaaggaagctgaaaggagcaagaccatgaaatcaaagcactcccattggagaaactatgatgatctgaatgagtacttttggtcagttgattgtttccggctaggatggcctatgagagctgatgctgactttttcaaaactccaaaagatgcttatctgaatcttttgaatggagtaggttctctcaataatattggagaacagatctgcaggtaatacccattggatgggaaaagttaattttgtggagatacgttcattttggcacatattccgtagtttcgacagaatgtggatcttcttaatattgtccttacaggccatgataattattgcttggaatggtggaacaccaagtgatatttttgatgctggagtatttaagaaggttttgagcatatttattactgctgcaattttgaagttgggtcaagcaatcctagacctcatatttggttggaaagcaagaagaaacatgtcatttgcagtcaagctgcgatatatcttgaagttaatatgtgctgctgcatgggttgtgattttacctgtgacttacgcgtacacttgggagaatcctactggacttgcaagaacaataaaaagttggcttggtgatggtcagaatcagccatctttgtacatattggccatagtgatatatatggcaccaaacatagttgcttctatgctatttcttttcccatttatgagaagattcttagagagttcaaatgttaaggtcataacgatcataatgtggtggtctcagccccggttatttgttggcagagggatgcatgaaggtgcattctccctcttcaagtataccatgttctgggttcttcttttagcaacgaagctgactgtaagcttctatattgagatcaaacctctggtacagccaaccatagatataatgagggaacctatcaggactttccagtggcacgaatttttccctcatggaactaacaatattggtgttgttatatcactgtgggctccaataattctagtatatttcatggacacccaaatttggtatgcactgttctcgacattaattggtggtatctatggggcttatcgtcgtcttggtgagatacggacattaggaatgttgagatctcgctttgaatctttgcccgaggccttcaatgaacgcttgattccttctgatgcaaataagagtaaaggtcttcgtgctgccttttcaagtagacccaaggcttctggtgacgaaagacagaaagagaaaagagctgcaaggtttgctcaaatgtggaatgtcattattacaagtttccgtgaagaagacctcatagacaatagggagatggatctgctactggttccatactgtaaagaccgtgagctcgatatatttcaatggccacctttcttacttgctagcaagatcccaatagcactggatatggcagcagacagtggcggaaaagaccgtgatctgacgaagaggataaaatcagatccatacttttcctttgctatcagagaatgctatgcttcattcaagaacatcatcaatactttagtgtttggtcagcgggagaaagatgtcctagcacagattttcgcagttgtggatcagcatatagaagatgaaactctgataaaggatctcaatatgaggaaccttcctgcactgagcaagaagtttgttgaattacttgaattactgcaaaaaaacaaggaggaagacttgggtcaggtagtcattttgttccaagatatgcttgaggtggtcacaagggatataatggaggaacaggaccagctcggcacactgttggaatctgcacatggtgcaaatagtagaaaacatgaaggaattacaccgctagatcagcaagaccagttgtttgctaaagctattaagttccctgtggatgaatcaattgcatggactgaaaagataaagaggcttcatcttctgttaactgtgaaggagtctgctatggatgttcctactaatcttgatgctaggcggcggatatcattctttgcaaattctttatttatggatatgcccaatgctccaaaagttcggaacatgttggccttctctatcttgactccttattacaaggaagatgttctgttctcattacaaaatctagaagagccaaatgaggatggagtttccattcttttctacttacaaaaaatttacccagatgaatggaaaaatttcctcgaaagggttggctgcaagaatgaagagggactccgtgaagatgaagaactagaagagaagcttcgtctttgggcgtcgtatagggggcagacattaacaagaactgtaagagggatgatgtactatcgaaaagctttggagcttcaggcttttcttgatatggcggaagatgatgatcttatggaaggttacagagcaacagaagtaatgcccgaggactcgcaattaatgactcaatgcaaggctatagctgacatgaagtttacatatgttgtctcatgccaacaatatggaattcagaagcgttctaatgagccttgcgcacatgatattttgagactaatgacggaatatccatcacttcgggtcgcctatattgatgaagttgaagcgcctagccaagatagaaacaagaagattgaaaaggtttactactcagtgttggtgaaggcttctgttacaaaacctgatgagcctggtcagagccttgatcaggtcatctacaagataaagctaccaggtaatgccattttaggtgaaggaaagccagaaaatcagaaccatgcaataatattcaccagaggcgaatgcctccaaactatagatatgaatcaggagcactatatggaggaggctttgaaaatgagaaatctgctgcaagagtttgagaagaaacatggagtgagatatccatcgatacttggagtcagagaacacatatttacgggcagtgtgtcatcccttgcatggttcatgtcaaatcaggaaactagtttcgtaacaattggacaacgagtgcttgccaatccgttgagggttcgttttcattatggtcatcctgatatcttcgatcgccttttccacattacgaggggtggtgtgagtaaagcatccaaaattatcaatctcagtgaggacatatttgcaggattcaattccacattgcgtgaaggcaatgttactcaccacgagtacatgcaagttggcaagggaagggatgtgggtctcaatcaaatatctctgtttgaggcaaagatagcaaatggcaatggcgaacagacgctgagccgtgacatctaccggctgggtcatcgctttgatttcttcagaatgctatcttgctactatacaacaattggtttctacttcagtacaatgattacagtgtggactgtatatgttttcctctatgggcggttatatcttgtacttagtggacttgatgaagcgctggctactggaaggaggtttgtgcacaatgcacctctccaggttgcgcttgcatcggagtcttttgtgcagcttgggtttttgatggcgctacccatgatgatggaaatcggtttggagagaggattcagaacagcattgagtgacttcatactgatgcagcttcagttggcctcagttttcttcacgttctcattgggaacaaaaactcattactacggaaggacattactccatggaggagctgaatacagagccactggacgtgggtttgtggtgttccatgcgaaatttgctgacaactatcgactctattcccgtagccattttgtcaagggcattgagctgatgattctactagttgtgtatgaaatatttagccagccatatagaggggctgtaacttacatcttcatcaccgtgtccatgtggttcatggtgggcacttggctctttgcaccattcctgttcaatccttctggatttgagtggcagaagattgtggacgactggaccgattggcacaagtggatcagcaatcgtggaggtatcggtgtagcaccagagaaaagctgggagtcatggtgggaaaaggagcaagagccccttcgatactccgggaagcgcggtactgttgttgaaatactgcttgcgctgcgtttctttatctaccagtacggacttgtgtatcatctgaatataacgaagaagataactaaggacaaccagagtgtgctggtttattgcttctcatgggttgtaatttttgtgattttgctcgttatgaagaccgtatcagtgggcaggagaaggttcagtgcagagttccagctagtgttccggttgatcaagggtctgatatttataacatttacagccatcgtggtaatcctaatagcgatccctggcatgacggtgctggacatatttgtttgcatccttgctttcatgcccactggatggggtttgctgctgattgcccaagcgatccggcctgtgatccacaagactgggctctggggctcgatcaaggctcttgcccggggctacgagatcctgatgggacttctcctgttcacgcccatcgccttcctcgcctggttcccgttcgtgtcggaattccagaccaggatgctgttcaaccaggcgttcagcagaggtctgcagatctcccgtatcctgggaggacacaagaaagaccgagggacccggaacaaagaatagggctgggctgctgctgattcaaggtttgtgtgcgccactagtatttatgtgtgaatgggtgggtagcatatggctcgagagtatctcctgaatggagattgattgatcctgaagagtagaagagactcgagtgatgtaagatgctgcaggcttgttgctttgttacctaggcgttaggcagaacagatgttttcaggatctctggcctgttaaccacatcttcccctgttcagagtgaattaattcctaatggaaactgatttgtgaattacttcctaatagaggagtgcttccaaactgatttcatgtgtgtgctgtgatattgtttagcatatagtattttaaatgtagctttgaattttcattctttcgcaacaaaaaatgaataggacaagctggtcaaacttgaaaaaaaaa

SEQ ID NO: 58015 - DNA, 6635 bp, Zea Mays
ataaaccctagtggcaaaatcgtagaaccccaggccgctttgtctctgcccacggtccaaccgaaggaaaaaaaagtttgaaaatcaaacacctttcattccccccatccctcctcctgctcatcactgctgctctctggctgctccctctccctccatccccactgctgctctcttgccaaatctgatctagggtttcgttccatctccacgcgccgtcccagtacctatctactctagactactacagtatccaaaaggcaagcttatctgcggagggagtgagctgacgcattcccgtgctggcgagggacagccagacccagacggggagatccgatccgattccgtgctagctgctgcggagtgagtgaggtgacgcgggagcgggatggcggcgccggggcggaggacggcggacgtgtcctcgtcctcgcccgccccctcgccgtccccttccaccggtaggcgcctcctgcgcacgcagaccgtcggcaacctcggcgagtccatcttcgacagcgaggtcgtgccgtcctcgctcgtcgagatcgcacccatcctccgcgtcgccaacgaggtcgaggccaccaacccgcgcgtcgcctacctctgtcgcttctacgctttcgagaaggctcaccgcctcgacccgacatccagtggccgtggtgttcgtcagtttaagaccgcacttctgcagaggcttgagagggaaaatgatcccacgctcaagggaagggtccaccagagcgatgctcgggagatgcagcgcttctaccgcgaatactacaagaagtacatccaggcactgcagcatgctgctgataaggctgaccgagcactgctcactaaagcgtaccagacagctgctgtcttgtttgaggtcttgagggccgttaatgtctcgcagtccgttgaagtcgatcaagcgattttggatacacacaataaggttgaagaaaagaaaaagttgtacgtaccttataacattctcccgcttgatcctgaaagtactggtcaagccattatgcgatatccagagattcaagctgctgtttatgctcttcgcaatactagaggtctgccatggccaaaggaccaagacaagaagcctggcgagaagaatactgggaaagaccttctcgattggcttcaggctatgtttgggtttcagaaagacaacgtgtccaaccaaagggaacatttggtactgttgcttgcaaatgttcatataatgaaagtacccaaggttgaccaacaaccgaagttggatgacaaagctctggatgctgtaatgaagaagctgtttaagaattataagaagtggtgcaagtaccttggccgcaaaagcagcttatggttgccaaccatccagcaggaagtgcagcagcgtaagcttctttatatgggcctctacctgctgatttgggatggcttttgaactctacggcatgctggctggaaatgtgagcccaatgacgggtgaaaatgttaaaccagcatatggtggtgatgaagaagcctttttgattaaagttgtgactccaatatacaaagttatagagaaggaagctgaaaggagcaagaccatgaaatcaaagcactcccattggagaaactatgatgatctgaatgagtacttttggtcagttgattgtttccggctaggatggcctatgagagctgatgctgactttttcaaaactccaaaagatgcttatctgaatcttttgaatggagagaacagatctgcaggtaatacccattggatgggaaaagttaattttgtggagatacgttcattttggcacatattccgtagtttcgacagaatgtggatcttcttaatattgtccttacaggccatgataattattgcttggaatggtggaacaccaagtgatatttttgatgctggagtatttaagaaggttttgagcatatttattactgctgcaattttgaagttgggtcaagcaatcctagacctcatatttggttggaaagcaagaagaaacatgtcatttgcagtcaagctgcgatatatcttgaagttaatatgtgctgctgcatgggttgtgattttacctgtgacttacgcgtacacttgggagaatcctactggacttgcaagaacaataaaaagttggcttggtgatggtcagaatcagccatctttgtacatattggccatagtgatatatatggcaccaaacatagttgcttctatgctatttcttttcccatttatgagaagattcttagagagttcaaatgttaaggtcataacgatcataatgtggtggtctcagccccggttatttgttggcagagggatgcatgaaggtgcattctccctcttcaagtataccatgttctgggttcttcttttagcaacgaagctgactgtaagcttctatattgagatcaaacctctggtacagccaaccatagatataatgagggaacctatcaggactttccagtggcacgaatttttccctcatggaactaacaatattggtgttgttatatcactgtgggctccaataattctagtatatttcatggacacccaaatttggtatgcactgttctcgacattaattggtggtatctatggggcttatcgtcgtcttggtgagatacggacattaggaatgttgagatctcgctttgaatctttgcccgaggccttcaatgaacgcttgattccttctgatgcaaataagagtaaaggtcttcgtgctgccttttcaagtagacccaaggcttctggtgacgaaagacagaaagagaaaagagctgcaaggtttgctcaaatgtggaatgtcattattacaagtttccgtgaagaagacctcatagacaatagggagatggatctgctactggttccatactgtaaagaccgtgagctcgatatatttcaatggccacctttcttacttgctagcaagatcccaatagcactggatatggcagcagacagtggcggaaaagaccgtgatctgacgaagaggataaaatcagatccatacttttcctttgctatcagagaatgctatgcttcattcaagaacatcatcaatactttagtgtttggtcagcgggagaaagatgtcctagcacagattttcgcagttgtggatcagcatatagaagatgaaactctgataaaggatctcaatatgaggaaccttcctgcactgagcaagaagtttgttgaattacttgaattactgcaaaaaaacaaggaggaagacttgggtcaggtagtcattttgttccaagatatgcttgaggtggtcacaagggatataatggaggaacaggaccagctcggcacactgttggaatctgcacatggtgcaaatagtagaaaacatgaaggaattacaccgctagatcagcaagaccagttgtttgctaaagctattaagttccctgtggatgaatcaattgcatggactgaaaagataaagaggcttcatcttctgttaactgtgaaggagtctgctatggatgttcctactaatcttgatgctaggcggcggatatcattctttgcaaattctttatttatggatatgcccaatgctccaaaagttcggaacatgttggccttctctatcttgactccttattacaaggaagatgttctgttctcattacaaaatctagaagagccaaatgaggatggagtttccattcttttctacttacaaaaaatttacccagatgaatggaaaaatttcctcgaaagggttggctgcaagaatgaagagggactccgtgaagatgaagaactagaagagaagcttcgtctttgggcgtcgtatagggggcagacattaacaagaactgtaagagggatgatgtactatcgaaaagctttggagcttcaggcttttcttgatatggcggaagatgatgatcttatggaaggttacagagcaacagaagtaatgcccgaggactcgcaattaatgactcaatgcaaggctatagctgacatgaagtttacatatgttgtctcatgccaacaatatggaattcagaagcgttctaatgagccttgcgcacatgatattttgagactaatgacggaatatccatcacttcgggtcgcctatattgatgaagttgaagcgcctagccaagatagaaacaagaagattgaaaaggtttactactcagtgttggtgaaggcttctgttacaaaacctgatgagcctggtcagagccttgatcaggtcatctacaagataaagctaccaggtaatgccattttaggtgaaggaaagccagaaaatcagaaccatgcaataatattcaccagaggcgaatgcctccaaactatagatatgaatcaggagcactatatggaggaggctttgaaaatgagaaatctgctgcaagagtttgagaagaaacatggagtgagatatccatcgatacttggagtcagagaacacatatttacgggcagtgtgtcatcccttgcatggttcatgtcaaatcaggaaactagtttcgtaacaattggacaacgagtgcttgccaatccgttgagggttcgttttcattatggtcatcctgatatcttcgatcgccttttccacattacgaggggtggtgtgagtaaagcatccaaaattatcaatctcagtgaggacatatttgcaggattcaattccacattgcgtgaaggcaatgttactcaccacgagtacatgcaagttggcaagggaagggatgtgggtctcaatcaaatatctctgtttgaggcaaagatagcaaatggcaatggcgaacagacgctgagccgtgacatctaccggctgggtcatcgctttgatttcttcagaatgctatcttgctactatacaacaattggtttctacttcagtacaatgattacagtgtggactgtatatgttttcctctatgggcggttatatcttgtacttagtggacttgatgaagcgctggctactggaaggaggtttgtgcacaatgcacctctccaggttgcgcttgcatcggagtcttttgtgcagcttgggtttttgatggcgctacccatgatgatggaaatcggtttggagagaggattcagaacagcattgagtgacttcatactgatgcagcttcagttggcctcagttttcttcacgttctcattgggaacaaaaactcattactacggaaggacattactccatggaggagctgaatacagagccactggacgtgggtttgtggtgttccatgcgaaatttgctgacaactatcgactctattcccgtagccattttgtcaagggcattgagctgatgattctactagttgtgtatgaaatatttagccagccatatagaggggctgtaacttacatcttcatcaccgtgtccatgtggttcatggtgggcacttggctctttgcaccattcctgttcaatccttctggatttgagtggcagaagattgtggacgactggaccgattggcacaagtggatcagcaatcgtggaggtatcggtgtagcaccagagaaaagctgggagtcatggtgggaaaaggagcaagagccccttcgatactccgggaagcgcggtactgttgttgaaatactgcttgcgctgcgtttctttatctaccagtacggacttgtgtatcatctgaatataacgaagaagataactaaggacaaccagagtgtgctggtttattgcttctcatgggttgtaatttttgtgattttgctcgttatgaagaccgtatcagtgggcaggagaaggttcagtgcagagttccagctagtgttccggttgatcaagggtctgatatttataacatttacagccatcgtggtaatcctaatagcgatccctggcatgacggtgctggacatatttgtttgcatccttgctttcatgcccactggatggggtttgctgctgattgcccaagcgatccggcctgtgatccacaagactgggctctggggctcgatcaaggctcttgcccggggctacgagatcctgatgggacttctcctgttcacgcccatcgccttcctcgcctggttcccgttcgtgtcggaattccagaccaggatgctgttcaaccaggcgttcagcagaggtctgcagatctcccgtatcctgggaggacacaagaaagaccgagggacccggaacaaagaatagggctgggctgctgctgattcaaggtttgtgtgcgccactagtatttatgtgtgaatgggtgggtagcatatggctcgagagtatctcctgaatggagattgattgatcctgaagagtagaagagactcgagtgatgtaagatgctgcaggcttgttgctttgttacctaggcgttaggcagaacagatgttttcaggatctctggcctgttaaccacatcttcccctgttcagagtgaattaattcctaatggaaactgatttgtgaattacttcctaatagaggagtgcttccaaactgatttcatgtgtgtgctgtgatattgtttagcatatagtattttaaatgtagctttgaattttcattctttcgcaacaaaaaatgaataggacaagctggtcaaacttgaaaaaaaaa

SEQ ID NO: 58016 - DNA, 6508 bp, Zea Mays
ataaaccctagtggcaaaatcgtagaaccccaggccgctttgtctctgcccacggtccaaccgaaggaaaaaaaagtttgaaaatcaaacacctttcattccccccatccctcctcctgctcatcactgctgctctctggctgctccctctccctccatccccactgctgctctcttgccaaatctgatctagggtttcgttccatctccacgcgccgtcccagtacctatctactctagactactacagtatccaaaaggcaagcttatctgcggagggagtgagctgacgcattcccgtgctggcgagggacagccagacccagacggggagatccgatccgattccgtgctagctgctgcggagtgagtgaggtgacgcgggagcgggatggcggcgccggggcggaggacggcggacgtgtcctcgtcctcgcccgccccctcgccgtccccttccaccggtaggcgcctcctgcgcacgcagaccgtcggcaacctcggcgagtccatcttcgacagcgaggtcgtgccgtcctcgctcgtcgagatcgcacccatcctccgcgtcgccaacgaggtcgaggccaccaacccgcgcgtcgcctacctctgtcgcttctacgctttcgagaaggctcaccgcctcgacccgacatccagtggccgtggtgttcgtcagtttaagaccgcacttctgcagaggcttgagagggaaaatgatcccacgctcaagggaagggtccaccagagcgatgctcgggagatgcagcgcttctaccgcgaatactacaagaagtacatccaggcactgcagcatgctgctgataaggctgaccgagcactgctcactaaagcgtaccagacagctgctgtcttgtttgaggtcttgagggccgttaatgtctcgcagtccgttgaagtcgatcaagcgattttggatacacacaataaggttgaagaaaagaaaaagttattcaagctgctgtttatgctcttcgcaatactagaggtctgccatggccaaaggaccaagacaagaagcctggcgagaagaatactgggaaagaccttctcgattggcttcaggctatgtttgggtttcagaaagacaacgtgtccaaccaaagggaacatttggtactgttgcttgcaaatgttcatataatgaaagtacccaaggttgaccaacaaccgaagttggatgacaaagctctggatgctgtaatgaagaagctgtttaagaattataagaagtggtgcaagtaccttggccgcaaaagcagcttatggttgccaaccatccagcaggaagtgcagcagcgtaagcttctttatatgggcctctacctgctgatttggggtgaggcggctaacttgagattcatgccagagtgtatttgttacatctaccatcatatggcttttgaactctacggcatgctggctggaaatgtgagcccaatgacgggtgaaaatgttaaaccagcatatggtggtgatgaagaagcctttttgattaaagttgtgactccaatatacaaagttatagagaaggaagctgaaaggagcaagaccatgaaatcaaagcactcccattggagaaactatgatgatctgaatgagtacttttggtcagttgattgtttccggctaggatggcctatgagagctgatgctgactttttcaaaactccaaaagatgcttatctgaatcttttgaatggagagaacagatctgcaggtaatacccattggatgggaaaagttaattttgtggagatacgttcattttggcacatattccgtagtttcgacagaatgtggatcttcttaatattgtccttacaggccatgataattattgcttggaatggtggaacaccaagtgatatttttgatgctggagtatttaagaaggttttgagcatatttattactgctgcaattttgaagttgggtcaagcaatcctagacctcatatttggttggaaagcaagaagaaacatgtcatttgcagtcaagctgcgatatatcttgaagttaatatgtgctgctgcatgggttgtgattttacctgtgacttacgcgtacacttgggagaatcctactggacttgcaagaacaataaaaagttggcttggtgatggtcagaatcagccatctttgtacatattggccatagtgatatatatggcaccaaacatagttgcttctatgctatttcttttcccatttatgagaagattcttagagagttcaaatgttaaggtcataacgatcataatgtggtggtctcagccccggttatttgttggcagagggatgcatgaaggtgcattctccctcttcaagtataccatgttctgggttcttcttttagcaacgaagctgactgtaagcttctatattgagatcaaacctctggtacagccaaccatagatataatgagggaacctatcaggactttccagtggcacgaatttttccctcatggaactaacaatattggtgttgttatatcactgtgggctccaataattctagtatatttcatggacacccaaatttggtatgcactgttctcgacattaattggtggtatctatggggcttatcgtcgtcttggtgagatacggacattaggaatgttgagatctcgctttgaatctttgcccgaggccttcaatgaacgcttgattccttctgatgcaaataagagtaaaggtcttcgtgctgccttttcaagtagacccaaggcttctggtgacgaaagacagaaagagaaaagagctgcaaggtttgctcaaatgtggaatgtcattattacaagtttccgtgaagaagacctcatagacaatagggagatggatctgctactggttccatactgtaaagaccgtgagctcgatatatttcaatggccacctttcttacttgctagcaagatcccaatagcactggatatggcagcagacagtggcggaaaagaccgtgatctgacgaagaggataaaatcagatccatacttttcctttgctatcagagaatgctatgcttcattcaagaacatcatcaatactttagtgtttggtcagcgggagaaagatgtcctagcacagattttcgcagttgtggatcagcatatagaagatgaaactctgataaaggatctcaatatgaggaaccttcctgcactgagcaagaagtttgttgaattacttgaattactgcaaaaaaacaaggaggaagacttgggtcaggtagtcattttgttccaagatatgcttgaggtggtcacaagggatataatggaggaacaggaccagctcggcacactgttggaatctgcacatggtgcaaatagtagaaaacatgaaggaattacaccgctagatcagcaagaccagttgtttgctaaagctattaagttccctgtggatgaatcaattgcatggactgaaaagataaagaggcttcatcttctgttaactgtgaaggagtctgctatggatgttcctactaatcttgatgctaggcggcggatatcattctttgcaaattctttatttatggatatgcccaatgctccaaaagttcggaacatgttggccttctctatcttgactccttattacaaggaagatgttctgttctcattacaaaatctagaagagccaaatgaggatggagtttccattcttttctacttacaaaaaatttacccagatgaatggaaaaatttcctcgaaagggttggctgcaagaatgaagagggactccgtgaagatgaagaactagaagagaagcttcgtctttgggcgtcgtatagggggcagacattaacaagaactgtaagagggatgatgtactatcgaaaagctttggagcttcaggcttttcttgatatggcggaagatgatgatcttatggaaggttacagagcaacagaagtaatgcccgaggactcgcaattaatgactcaatgcaaggctatagctgacatgaagtttacatatgttgtctcatgccaacaatatggaattcagaagcgttctaatgagccttgcgcacatgatattttgagactaatgacggaatatccatcacttcgggtcgcctatattgatgaagttgaagcgcctagccaagatagaaacaagaagattgaaaaggtttactactcagtgttggtgaaggcttctgttacaaaacctgatgagcctggtcagagccttgatcaggtcatctacaagataaagctaccaggtaatgccattttaggtgaaggaaagccagaaaatcagaaccatgcaataatattcaccagaggcgaatgcctccaaactatagatatgaatcaggagcactatatggaggaggctttgaaaatgagaaatctgctgcaagagtttgagaagaaacatggagtgagatatccatcgatacttggagtcagagaacacatatttacgggcagtgtgtcatcccttgcatggttcatgtcaaatcaggaaactagtttcgtaacaattggacaacgagtgcttgccaatccgttgaggattcaattccacattgcgtgaaggcaatgttactcaccacgagtacatgcaagttggcaagggaagggatgtgggtctcaatcaaatatctctgtttgaggcaaagatagcaaatggcaatggcgaacagacgctgagccgtgacatctaccggctgggtcatcgctttgatttcttcagaatgctatcttgctactatacaacaattggtttctacttcagtacaatgattacagtgtggactgtatatgttttcctctatgggcggttatatcttgtacttagtggacttgatgaagcgctggctactggaaggaggtttgtgcacaatgcacctctccaggttgcgcttgcatcggagtcttttgtgcagcttgggtttttgatggcgctacccatgatgatggaaatcggtttggagagaggattcagaacagcattgagtgacttcatactgatgcagcttcagttggcctcagttttcttcacgttctcattgggaacaaaaactcattactacggaaggacattactccatggaggagctgaatacagagccactggacgtgggtttgtggtgttccatgcgaaatttgctgacaactatcgactctattcccgtagccattttgtcaagggcattgagctgatgattctactagttgtgtatgaaatatttagccagccatatagaggggctgtaacttacatcttcatcaccgtgtccatgtggttcatggtgggcacttggctctttgcaccattcctgttcaatccttctggatttgagtggcagaagattgtggacgactggaccgattggcacaagtggatcagcaatcgtggaggtatcggtgtagcaccagagaaaagctgggagtcatggtgggaaaaggagcaagagccccttcgatactccgggaagcgcggtactgttgttgaaatactgcttgcgctgcgtttctttatctaccagtacggacttgtgtatcatctgaatataacgaagaagataactaaggacaaccagagtgtgctggtttattgcttctcatgggttgtaatttttgtgattttgctcgttatgaagaccgtatcagtgggcaggagaaggttcagtgcagagttccagctagtgttccggttgatcaagggtctgatatttataacatttacagccatcgtggtaatcctaatagcgatccctggcatgacggtgctggacatatttgtttgcatccttgctttcatgcccactggatggggtttgctgctgattgcccaagcgatccggcctgtgatccacaagactgggctctggggctcgatcaaggctcttgcccggggctacgagatcctgatgggacttctcctgttcacgcccatcgccttcctcgcctggttcccgttcgtgtcggaattccagaccaggatgctgttcaaccaggcgttcagcagaggtctgcagatctcccgtatcctgggaggacacaagaaagaccgagggacccggaacaaagaatagggctgggctgctgctgattcaaggtttgtgtgcgccactagtatttatgtgtgaatgggtgggtagcatatggctcgagagtatctcctgaatggagattgattgatcctgaagagtagaagagactcgagtgatgtaagatgctgcaggcttgttgctttgttacctaggcgttaggcagaacagatgttttcaggatctctggcctgttaaccacatcttcccctgttcagagtgaattaattcctaatggaaactgatttgtgaattacttcctaatagaggagtgcttccaaactgatttcatgtgtgtgctgtgatattgtttagcatatagtattttaaatgtagctttgaattttcattctttcgcaacaaaaaatgaataggacaagctggtcaaacttgaaaaaaaaa

SEQ ID NO: 58017 - DNA, 4947 bp, Zea Mays
gtaggttctctcaataatattggagaacagatctgcaggtaatacccattggatgggaaaagttaattttgtggagatacgttcattttggcacatattccgtagtttcgacagaatgtggatcttcttaatattgtccttacaggccatgataattattgcttggaatggtggaacaccaagtgatatttttgatgctggagtatttaagaaggttttgagcatatttattactgctgcaattttgaagttgggtcaagcaatcctagacctcatatttggttggaaagcaagaagaaacatgtcatttgcagtcaagctgcgatatatcttgaagttaatatgtgctgctgcatgggttgtgattttacctgtgacttacgcgtacacttgggagaatcctactggacttgcaagaacaataaaaagttggcttggtgatggtcagaatcagccatctttgtacatattggccatagtgatatatatggcaccaaacatagttgcttctatgctatttcttttcccatttatgagaagattcttagagagttcaaatgttaaggtcataacgatcataatgtggtggtctcagccccggttatttgttggcagagggatgcatgaaggtgcattctccctcttcaagtataccatgttctgggttcttcttttagcaacgaagctgactgtaagcttctatattgagatcaaacctctggtacagccaaccatagatataatgagggaacctatcaggactttccagtggcacgaatttttccctcatggaactaacaatattggtgttgttatatcactgtgggctccaataattctagtatatttcatggacacccaaatttggtatgcactgttctcgacattaattggtggtatctatggggcttatcgtcgtcttggtgagatacggacattaggaatgttgagatctcgctttgaatctttgcccgaggccttcaatgaacgcttgattccttctgatgcaaataagagtaaaggtcttcgtgctgccttttcaagtagacccaagttttttaggcttctggtgacgaaagacagaaagagaaaagagctgcaaggtttgctcaaatgtggaatgtcattattacaagtttccgtgaagaagacctcatagacaatagggagatggatctgctactggttccatactgtaaagaccgtgagctcgatatatttcaatggccacctttcttacttgctagcaagatcccaatagcactggatatggcagcagacagtggcggaaaagaccgtgatctgacgaagaggataaaatcagatccatacttttcctttgctatcagagaatgctatgcttcattcaagaacatcatcaatactttagtgtttggtcagcgggagaaagatgtcctagcacagattttcgcagttgtggatcagcatatagaagatgaaactctgataaaggatctcaatatgaggaaccttcctgcactgagcaagaagtttgttgaattacttgaattactgcaaaaaaacaaggaggaagacttgggtcaggtagtcattttgttccaagatatgcttgaggtggtcacaagggatataatggaggaacaggaccagctcggcacactgttggaatctgcacatggtgcaaatagtagaaaacatgaaggaattacaccgctagatcagcaagaccagttgtttgctaaagctattaagttccctgtggatgaatcaattgcatggactgaaaagataaagaggcttcatcttctgttaactgtgaaggagtctgctatggatgttcctactaatcttgatgctaggcggcggatatcattctttgcaaattctttatttatggatatgcccaatgctccaaaagttcggaacatgttggccttctctatcttgactccttattacaaggaagatgttctgttctcattacaaaatctagaagagccaaatgaggatggagtttccattcttttctacttacaaaaaatttacccagatgaatggaaaaatttcctcgaaagggttggctgcaagaatgaagagggactccgtgaagatgaagaactagaagagaagcttcgtctttgggcgtcgtatagggggcagacattaacaagaactgtaagagggatgatgtactatcgaaaagctttggagcttcaggcttttcttgatatggcggaagatgatgatcttatggaaggttacagagcaacagaaaagcgttctaatgagccttgcgcacatgatattttgagactaatgacggaatatccatcacttcgggtcgcctatattgatgaagttgaagcgcctagccaagatagaaacaagaagattgaaaaggtttactactcagtgttggtgaaggcttctgttacaaaacctgatgagcctggtcagagccttgatcaggtcatctacaagataaagctaccaggtaatgccattttaggtgaaggaaagccagaaaatcagaaccatgcaataatattcaccagaggcgaatgcctccaaactatagatatgaatcaggagcactatatggaggaggctttgaaaatgagaaatctgctgcaagagtttgagaagaaacatggagtgagatatccatcgatacttggagtcagagaacacatatttacgggcagtgtgtcatcccttgcatggttcatgtcaaatcaggaaactagtttcgtaacaattggacaacgagtgcttgccaatccgttgagggttcgttttcattatggtcatcctgatatcttcgatcgccttttccacattacgaggggtggtgtgagtaaagcatccaaaattatcaatctcagtgaggacatatttgcaggattcaattccacattgcgtgaaggcaatgttactcaccacgagtacatgcaagttggcaagggaagggatgtgggtctcaatcaaatatctctgtttgaggcaaagatagcaaatggcaatggcgaacagacgctgagccgtgacatctaccggctgggtcatcgctttgatttcttcagaatgctatcttgctactatacaacaattggtttctacttcagtacaatggtattttggtgacctgagtttttgaactgttcttgtccgttcattggttaacctttcttgcattttctgacttgttcgttgtttcaccttaacacctctgttatttctgcatgcacttagattacagtgtggactgtatatgttttcctctatgggcggttatatcttgtacttagtggacttgatgaagcgctggctactggaaggaggtttgtgcacaatgcacctctccaggttgcgcttgcatcggagtcttttgtgcagcttgggtttttgatggcgctacccatgatgatggaaatcggtttggagagaggattcagaacagcattgagtgacttcatactgatgcagcttcagttggcctcagttttcttcacgttctcattgggaacaaaaactcattactacggaaggacattactccatggaggagctgaatacagagccactggacgtgggtttgtggtgttccatgcgaaatttgctgacaactatcgactctattcccgtagccattttgtcaagggcattgagctgatgattctactagttgtgtatgaaatatttagccagccatatagaggggctgtaacttacatcttcatcaccgtgtccatgtggttcatggtgggcacttggctctttgcaccattcctgttcaatccttctggatttgagtggcagaagattgtggacgactggaccgattggcacaagtggatcagcaatcgtggaggtatcggtgtagcaccagagaaaagctgggagtcatggtgggaaaaggagcaagagccccttcgatactccgggaagcgcggtactgttgttgaaatactgcttgcgctgcgtttctttatctaccagtacggacttgtgtatcatctgaatataacgaagaagataactaaggacaaccagagtgtgctggtttattgcttctcatgggttgtaatttttgtgattttgctcgttatgaagaccgtatcagtgggcaggagaaggttcagtgcagagttccagctagtgttccggttgatcaagggtctgatatttataacatttacagccatcgtggtaatcctaatagcgatccctggcatgacggtgctggacatatttgtttgcatccttgctttcatgcccactggatggggtttgctgctgattgcccaagcgatccggcctgtgatccacaagactgggctctggggctcgatcaaggctcttgcccggggctacgagatcctgatgggacttctcctgttcacgcccatcgccttcctcgcctggttcccgttcgtgtcggaattccagaccaggatgctgttcaaccaggcgttcagcagaggtctgcagatctcccgtatcctgggaggacacaagaaagaccgagggacccggaacaaagaatagggctgggctgctgctgattcaaggtttgtgtgcgccactagtatttatgtgtgaatgggtgggtagcatatggctcgagagtatctcctgaatggagattgattgatcctgaagagtagaagagactcgagtgatgtaagatgctgcaggcttgttgctttgttacctaggcgttaggcagaacagatgttttcaggatctctggcctgttaaccacatcttcccctgttcagagtgaattaattcctaatggaaactgatttgtgaattacttcctaatagaggagtgcttccaaactgatttcatgtgtgtgctgtgatattgtttagcatatagtattttaaatgtagctttgaattttcattctttcgcaacaaaaaatgaataggacaagctggtcaaacttgaaaaaaaaa

SEQ ID NO: 58018 - DNA, 5080 bp, Zea Mays
tattgcttaagtgttatattacaattgcttaagcattatattacaattgcttaagtattctgacgaggagaacagatctgcaggtaatacccattggatgggaaaagttaattttgtggagatacgttcattttggcacatattccgtagtttcgacagaatgtggatcttcttaatattgtccttacaggccatgataattattgcttggaatggtggaacaccaagtgatatttttgatgctggagtatttaagaaggttttgagcatatttattactgctgcaattttgaagttgggtcaagcaatcctagacctcatatttggttggaaagcaagaagaaacatgtcatttgcagtcaagctgcgatatatcttgaagttaatatgtgctgctgcatgggttgtgattttacctgtgacttacgcgtacacttgggagaatcctactggacttgcaagaacaataaaaagttggcttggtgatggtcagaatcagccatctttgtacatattggccatagtgatatatatggcaccaaacatagttgcttctatgctatttcttttcccatttatgagaagattcttagagagttcaaatgttaaggtcataacgatcataatgtggtggtctcagccccggttatttgttggcagagggatgcatgaaggtgcattctccctcttcaagtataccatgttctgggttcttcttttagcaacgaagctgactgtaagcttctatattgagatcaaacctctggtacagccaaccatagatataatgagggaacctatcaggactttccagtggcacgaatttttccctcatggaactaacaatattggtgttgttatatcactgtgggctccaataattctagtatatttcatggacacccaaatttggtatgcactgttctcgacattaattggtggtatctatggggcttatcgtcgtcttggtgagatacggacattaggaatgttgagatctcgctttgaatctttgcccgaggccttcaatgaacgcttgattccttctgatgcaaataagagtaaaggtcttcgtgctgccttttcaagtagacccaaggcttctggtgacgaaagacagaaagagaaaagagctgcaaggtttgctcaaatgtggaatgtcattattacaagtttccgtgaagaagacctcatagacaatagggagatggatctgctactggttccatactgtaaagaccgtgagctcgatatatttcaatggccacctttcttacttgctagcaagatcccaatagcactggatatggcagcagacagtggcggaaaagaccgtgatctgacgaagaggataaaatcagatccatacttttcctttgctatcagagaatgctatgcttcattcaagaacatcatcaatactttagtgtttggtcagcgggagaaagatgtcctagcacagattttcgcagttgtggatcagcatatagaagatgaaactctgataaaggatctcaatatgaggaaccttcctgcactgagcaagaagtttgttgaattacttgaattactgcaaaaaaacaaggaggaagacttgggtcaggtagtcattttgttccaagatatgcttgaggtggtcacaagggatataatggaggaacaggaccagctcggcacactgttggaatctgcacatggtgcaaatagtagaaaacatgaaggaattacaccgctagatcagcaagaccagttgtttgctaaagctattaagttccctgtggatgaatcaattgcatggactgaaaagataaagaggcttcatcttctgttaactgtgaaggagtctgctatggatgttcctactaatcttgatgctaggcggcggatatcattctttgcaaattctttatttatggatatgcccaatgctccaaaagttcggaacatgttggccttctctatcttgactccttattacaaggaagatgttctgttctcattacaaaatctagaagagccaaatgaggatggagtttccattcttttctacttacaaaaaatttacccagatgaatggaaaaatttcctcgaaagggttggctgcaagaatgaagagggactccgtgaagatgaagaactagaagagaagcttcgtctttgggcgtcgtatagggggcagacattaacaagaactgtaagagggatgatgtactatcgaaaagctttggagcttcaggcttttcttgatatggcggaagatgatgatcttatggaaggttacagagcaacagaagtaatgcccgaggactcgcaattaatgactcaatgcaaggctatagctgacatgaagtttacatatgttgtctcatgccaacaatatggaattcagaagcgttctaatgagccttgcgcacatgatattttgagactaatgacggaatatccatcacttcgggtcgcctatattgatgaagttgaagcgcctagccaagatagaaacaagaagattgaaaaggtttactactcagtgttggtgaaggcttctgttacaaaacctgatgagcctggtcagagccttgatcaggtcatctacaagataaagctaccaggtaatgccattttaggtgaaggaaagccagaaaatcagaaccatgcaataatattcaccagaggcgaatgcctccaaactatagatatgaatcaggagcactatatggaggaggctttgaaaatgagaaatctgctgcaagagtttgagaagaaacatggagtgagatatccatcgatacttggagtcagagaacacatatttacgggcagtgtgtcatcccttgcatggttcatgtcaaatcaggaaactagtttcgtaacaattggacaacgagtgcttgccaatccgttgagggttcgttttcattatggtcatcctgatatcttcgatcgccttttccacattacgaggggtggtgtgagtaaagcatccaaaattatcaatctcagtgaggacatatttgcaggattcaattccacattgcgtgaaggcaatgttactcaccacgagtacatgcaagttggcaagggaagggatgtgggtctcaatcaaatatctctgtttgaggcaaagatagcaaatggcaatggcgaacagacgctgagccgtgacatctaccggctgggtcatcgctttgatttcttcagaatgctatcttgctactatacaacaattggtttctacttcagtacaatggtattttggtgacctgagtttttgaactgttcttgtccgttcattggttaacctttcttgcattttctgacttgttcgttgtttcaccttaacacctctgttatttctgcatgcacttagattacagtgtggactgtatatgttttcctctatgggcggttatatcttgtacttagtggacttgatgaagcgctggctactggaaggaggtttgtgcacaatgcacctctccaggttgcgcttgcatcggagtcttttgtgcagcttgggtttttgatggcgctacccatgatgatggaaatcggtttggagagaggattcagaacagcattgagtgacttcatactgatgcagcttcagttggcctcagttttcttcacgttctcattgggaacaaaaactcattactacggaaggacattactccatggaggagctgaatacagagccactggacgtgggtttgtggtgttccatgcgaaatttgctgacaactatcgactctattcccgtagccattttgtcaagggcattgagctgatgattctactagttgtgtatgaaatatttagccagccatatagaggggctgtaacttacatcttcatcaccgtgtccatgtggttcatggtgggcacttggctctttgcaccattcctgttcaatccttctggatttgagtggcagaagattgtggacgactggaccgattggcacaagtggatcagcaatcgtggaggtatcggtgtagcaccagagaaaagctgggagtcatggtgggaaaaggagcaagagccccttcgatactccgggaagcgcggtactgttgttgaaatactgcttgcgctgcgtttctttatctaccagtacggacttgtgtatcatctgaatataacgaagaagataactaaggacaaccagagtgtgctggtttattgcttctcatgggttgtaatttttgtgattttgctcgttatgaagaccgtatcagtgggcaggagaaggttcagtgcagagttccagctagtgttccggttgatcaagggtctgatatttataacatttacagccatcgtggtaatcctaatagcgatccctggcatgacggtgctggacatatttgtttgcatccttgctttcatgcccactggatggggtttgctgctgattgcccaagcgatccggcctgtgatccacaagactgggctctggggctcgatcaaggctcttgcccggggctacgagatcctgatgggacttctcctgttcacgcccatcgccttcctcgcctggttcccgttcgtgtcggaattccagaccaggatgctgttcaaccaggcgttcagcagaggtctgcagatctcccgtatcctgggaggacacaagaaagaccgagggacccggaacaaagaatagggctgggctgctgctgattcaaggtttgtgtgcgccactagtatttatgtgtgaatgggtgggtagcatatggctcgagagtatctcctgaatggagattgattgatcctgaagagtagaagagactcgagtgatgtaagatgctgcaggcttgttgctttgttacctaggcgttaggcagaacagatgttttcaggatctctggcctgttaaccacatcttcccctgttcagagtgaattaattcctaatggaaactgatttgtgaattacttcctaatagaggagtgcttccaaactgatttcatgtgtgtgctgtgatattgtttagcatatagtattttaaatgtagctttgaattttcattctttcgcaacaaaaaatgaataggacaagctggtcaaacttgaaaaaaaaa

SEQ ID NO: 58019 - DNA, 2343 bp, Zea Mays
caggcccgcgccgcttgcaaccctactctgccttgtcttctcccatcattcccaagcgtgagcaaaaccccaccaccgaagactgccccgccgccgacgcccgcctccatcctctcctccagttcctcctagcgccgccgcccgactccctcctccagcgccggcgcccaaatccctcctccagtgccgtcgccgactctccgcccgcgtccatcctccggttccagcttacattggtccatcctctcctctgccccctcctccatccttcatcagattcagacggtgaagcacccagtcccagttcaggttcaaacacaggacgctccgcacgagctggagatggaggtggaggtggccaaatattcacgggggcagggtgctgacctgaaggcgctgggggacaagaagttgaaagggcagctcagtgtaaaagagaagctatatggccaatctgcaaaagctgctgcaaatgccgaaaagtggcttatgcctaatgatggaggtattttagagcctggtcatttggagaaaacatatagattttcacaagaggatatattgacagaggtggatcttttgagttcaagaaaaccatttgatatgatcttacctgtactcggtccttataatataggatacacctcaaacggccgctacatgctagtaggcggacgaaaaggccaccttgcaatgatggatatgttgcatatggatcttatcaaggagtttgaggtgagggaaactgttcgtgacgtgacattcttacacaatgagcagttgtatgcggtcgctcaaaaaaactcattgaacttcttgtacataatctgaatcttgatgatgtgaggtaggacttaggagcagctgagaattgccatttgaggtatccctacatctataatcgacatggtacagaaatacactgtctgaaggaacatggaaaagcactgaagctccaatttctgtctaaacaattcctcttagcatcgataaacagcttcgggcagctccactaccaagatgtgagcactggcgaaatggttgcaaattataggacaggtctgggccgcaccgatgttatgcggggcaatccttacaatgctgtgattggccttgggcatgctggtggcaaagttaccatgtggaagccaaccagtgtgaaaccccttgttaccatgctgtgtcatcatggcccggtgactgctgttgcatttgacaggggtggcaatctcatggcaacagcaggtgttgacaggaagataaagatctgggacctgaggaagtatgaggttgtgcgttcttacccaatgcgcgctcagtctttggattttagccagaaggggctgttagcctgcagcaatggatctcaggtagagatatacagggatttcggtgggcatgactataggctttacatgaagcacaagatagtgaagggctatcaggtcgggaaggttgtgttccgcccctacgaagacattctggggatcgggcactcgatgggcttctcttccatccttgtcccaggatctggtgagccgaacttcgacacctttgttgacaacccgatggaaactaccaagcagaaacgtgagaaggaggtgcatgctctcctggataaactccctccggagaccattatgctgaacccgaacacgatagccactgtacgagctccgaagaagaaagagaagaagaccaaggaggagattgaggaagagatggcagatgccgtggaggcggccaagaacactgagcgcaagaagaagaccaagggcaggagcaaaccgagcaagcgagccaagaagaaagaggaagacgttttcaaggccaagaggcccttcctggagcaatctgataaggtggatgggcgacctgacaagaagcagcggataggtgaactcccaaaggccttgcagaggtttgccaagaaaccacaatcataatcgtcgtcgttaacacagggttgggatttcacattggtatttccaatatgtagaatttccgcgtgagcacagaagaatgtgccgaaattttgtgctgaactattttggtattccagcgagcatggccgtgtcagctgattttttttttggtgttgttttggttctcatagagtttgttgcattttttcattcaggtgtagttaattcctaggtttagtgtggaccgtctaaggtcctggttggttacaacaagataatcactatctactaaatttgtaggtatatttgaaccaaacaatctagctaatgtactagataaaatttagctaaagctcagattccatcacctcttcgatcccaagtaatattaccaatgaatgctacaagagacaaccgc

SEQ ID NO: 58020 - DNA, 619 bp, Zea Mays
tgaagggggctactgggaaatctggaactggaaaaaatattaaaggggcaataggtgagcttctgtaaatctgggagttttccgccaagaaacgatcttcgatccaaaatagcccctaaaaggaaacctgagcaagctcgagcagccggatcacccatggcgacgtcggacgtcgcactaatggatgaccccacggcggtgggcggccgtgtcttcgtcaaattgccaacccacttctccctcaccgtcaccgccggaaaacttgacgaagggaggatccaaaacagaactaaaggaaaggatacaaacctagagaatcggatctgagccggagcaaaccaatgcaggagggatcaacgaaaaccgaccagagggagagcaagactccgcaaacagagagcccaatcaaccggcgcacaagaaaaaacgagctttgcctgcctaggattaattggggttggaagagaaccatggggagcgtggggcttgattacatttacatacagaggattaggtggcggaatcgtacttgtcagggagacagggacggcggggagagaaattgtttctcctgcaccacatgctcgcaacgtctctggttttgtttgcagtcgctgtc

SEQ ID NO: 58021 - DNA, 587 bp, Zea Mays
aacacgttcagtgctgcggttgcaacgtgttccataagttggtcgacaacctgaacctgtttcatgagatgaagtgctatgttggcccagatttccgctacgaaaggggatgctccattcaactaccttgacagaaacgaggatggcgacagtatcttccctcgctaaagcctcccttatgttgcagacttgcagtacccaaaaacaaatgatcggtcctgttctaatttgttcgtgtagctgtacttaataagcagatgtaccttcatgaacctgtaagactagtttatcatacgcatagatgaccagtcactagaatctacactggagttgtaatgtcggtgaccagttagtgtaattttcaattgcctgtcaacttttgggcatataataaaaaatatgacctgcatttcgtcatttgtttcaacaagagcggtgccagttttccctctagacggtaccttacctttttcatttttctcattttctggatcttaagttatgatgctttgtcattaagcatctgaactcttcttttacaaggatataagcggatttacggaaaacagtggtgttgggtatatatg

SEQ ID NO: 58022 - DNA, 1886 bp, Zea Mays
aataccaagtgtggagagtagggtgctgtggacgaggcgagctgaggaagggaagggaaccctcttgaccgccggcggcgaggggagatgccgccggagaggacgaggaagtcgaggacggaggagctgtgggagcgcgaggtcggcggtctcccacccaagcgcttcgccaactccgtcatggcctccaagtctctcaacatccaaaagcggctacggaagcacaggagctgcgtcaacacgataagcttcagcgcggacgggaggctgctcctctccgggtccgacgaccggaccctcgtgctgtgggactgggaggaggcggcgccggccttgtcgctccacactgggttcagcagcaacgtgtaccacgcgctgttcatgcctgtctccggtgacaggagcatcgtctcgtgcgctgctgaaggggatgtgatccattcacagatacaggaaggggggcgtgtggttacacacacacacaaacttgttgagttgggctttgcagtacacaggttggctgttgagccagcaagtcctcacacgttctactgctgctgtcaagatagctccgtgtggctttttgatctcagggcgcgaaatgccatggaattgtttaaatgtagggctgcgaactatcacactgctgaaaatatcgcactctatgctatttccttagacccaaggaagccctgttgttttgcagttgctggatcagatcagtatgtaaggatatatgatacccgtaagatttttgtggatgggaattctagtttcagtcgcccaactgagcacttctgccctccgcatttgattggtcgagtggaagaagaaataactggtttggcctactcacagaccagcgagctattagcgtcctatggtcaagaagatatctaccttttctcaagagagcatggtttacacttcaacaatgttgaggtcaataaacgactcctggaggatatgattgagccttcatttagtgataagttgcctgtacctaagaaattcaagggacaccggaatgaggaaaccgtgaagggggttgacttccttggccccaactgtgattttgttacctctgggtcagactgtggcagcatatttatttggagaaagaaggatgcagaactgatcagagcgatgcgtggagataagcgggttgtaaactgtgtcgaacagcacccttctgggattgttctagcaagtagtggcattgagaatgatatcaagatttgggaacctggtgaaggtgaaaaccgctccatcgttcaagctgacgaggacgatgacaatactgtttggatccacggcagcagtgattctgatgacttctttgacgacaatggtttcggtttgatggtcatggaaccgatccatttatatgaaaacagcgataatgattcatatgaggaggatacatcgtcagaggaacatgacagtgatggtgacagcagtgccggagatgaagattccgatgggggaaacagtgcaggagatgagggcgacgattgatgatcaaggacacggatccatgcctattcccagggagcaaatcttcatccgagaacagctgattcttttgtggttgtggttgtggttgtagccttgtaggttattttgggaggagcaaggcttacccaaaaaaacaaaaaaaaaaacgtttttagttaggattatcatgggttactgtttggtgttcctctgtgtatatatttttcgtcggaattggggtagtctaccgtaccgatgcaaacgtactgtggaagctaatgttcgaacgggagactgaaatggtcatgatgttgaatggcatcaagtattcaaccatttcatacaatagtttggtggaaagtttataaaaaattgtctcctcttcgtgg

SEQ ID NO: 58023 - DNA, 1253 bp, Zea Mays
ccttgtcctgccgtagttaagtgtatggatgtgcccaaattataggtcgttttggcttgcaagttacattagatataatgcatgtctagatacatagcttttgctatgtacctagaaaagccaaaaagacctataaatgggaacggaaaaaattctgcatctgttcaaaatttaagaacttggatatcctagagatgagaaaagagacatcatgttgcaataatctgatgcaattcttctgaatattgaaagaaatgaatactgctgtcaataattactacagttttaccatgggttatatattcttccacaaaattgccatatgtaccattcaaaattgccattttgtgtgtgtgctctatatagatgttggattagatatgtagtgttctttcagtttcagacgcgtcaattgcttaaataattgtagtccatccaatatcaacccaagatgtgtatcttcttttggtgtaaagctcaagcttgcctgtattgtgaattatcatagttctctattaggtttgcggtcatctctggccttgatttttttttctttctatacatggaactccagatctaaattgtttttcacatgtaattagctacgacctatgcgggacaatgatacctgcaagttgttcttttccgcatttgaatgttgtccctttctttcaccgtgctgcggttgcaacgtgttccataagttggtcgacaacctgaacctgtttcatgagatgaagtgctatgttggcccagatttccgctacgaaaggggatgctccattcaactaccttgacagaaacgaggatggcgacagtatcttccctcgctaaagcctcccttatgttgcagacttgcagtacccaaaaacaaatgatcggtcctgttctaatttgttcgtgtagctgtacttaataagcagatgtaccttcatgaacctgtaagactagtttatcatacgcatagatgaccagtcactagaatctacactggagttgtaatgtcggtgaccagttagtgtaattttcaattgcctgtcaacttttgggcatataataaaaaatatgacctgcatttcgtcatttgtttcaacaagagcggtgccagttttccctctagacggtaccttacctttttcatttttctcattttctggatcttaagttatgatgctttgtcattaagcatctgaactcttcttttacaaggatataagcggatttacggaaaacagtggtgttgggtatatatg

SEQ ID NO: 58024 - DNA, 2667 bp, Zea Mays
cttggtttatcatttggattgatgggctcgtagtggatccactgcttattcttgagagatatctatggcatggaaaaaaaaaatacacgtttgcagtagtttgttttgggctctcacactgtcacagtggcctccccccaacaggccccaaagccgtaggcctgacacgggagcacggcggcggcggcggcggcggaggaggaggaggaatggcgagacgaagcagaggcggcggcatcgtcacggaagcggcgttgaaggcgcacgcggcggcggtgcgggtggtgtcccgcaggggcgccgtgcggctggtgctcgtgtcggccatcgcctgggccatgctcgggctcgtcgcactcgccttccacctccggccctgcagctcccccgtcgcgttcctctcagccctttgtgaaaaggacagtaaagttttctcggtgttggactcgatggggctctcatcgaaaccactccaccgctgcccgatacctgttgcgaatgatccaaatgctattgccatcccaaagaggactcccaacacaatcgtgaagaagttgtcatatataacggttgacaagcaggacaaagatccttcaccgctgtttggagggcaccaaaactggaaacagagggaggagagctttaaactgaactctaccatgaaggttcactgtggatttatgaaaaatagtggtgcagatatggataccattgatctcaagtacatacagaaatgcagatttgtggttgcctctggtatttttgatggctacgacattccccatcagccatccaatattagtcatcggtctcagaagttgttctgcttcctgatggtggtagatgaagtatctcttgattttgttcaaaagaacgcaagtgtcaagattgacagtgctggggggaaatgggttggtatatggcgacttataagggtacatcgcctcccatttgacgaacctagaaggaatggaaagataccaaagattttaacacataggctgtttcctgaagcttggtatagcatttggattgatgggaaaatggagctcatagttgacccacttcttattctcgagagatatctctggcgtggaaaaaacacatttgcagtagctgcccataagcatcataggagcatctatgaagagggtgatgcaatcaaacggcggaagcgatatgctcgtcctttggttgatcttcagatgaaattatactattatgaggggatggagccttggagcccaaagaaaaagatgcctagtgatgtgccggagggagcagtgctgatccgggaacatacgacgatgaccgatctcttcagctgcctctggttcaacgaggtcaatcttttcacgccgcgtgatcagatcagctttggctacgtggtgcataggctcggaggcgctctcaagttcttcatgttccccaactgcgaatacaattcgctgttcatcctgcacggacacacgagagaacactcctctaaagtcgagtgggccaaaacaaccgatgagattgtgaagaagggactgaaggagagtagaggaggattagggctatggactccgtatcctgcagatctcagctccgtggaagtccctgctgtaaaaaggacttcaccggcaggctaggctgggattttttggtcttctattcgttcatggttgtaaaaagtagaacactactgatttcccccccttttcttttctcgcttaatcagacgagatcatgtaattcctgtagattctgtggtaactgaaccccgggggtaccgtaggctaatgcttggagcttgttgcttccagccggttctgtgcaatttaacactcatttacatatgtgccataaaaataaaaatagaagattcatggttcatcacatctgctatagggatatcaaatcaacattataagtcaacgcctgaaaaataattataacaactggaaataatcagcaccaaagcatcatgcactttcaaatgaatcatttgcctctttcagctgatacaatctcatcagcattctgtgatctaccaaaagttcctacaccagaatcacaaggaccaactcgagtggaatacgagaccaggtctgcacctccggccatccacgttgaacacgatgccaggctgcacggcagcagccttccccagatgcaagttcagaaatccctccacctgaaacagttgcggtttttcctcagtgcctctacgcaagctcacgccccatccaaggtcaccttccggcgtatctgacagtgtgagggcccatctcagcaaacgtgagcttgacttcttgttcaactcgatccaggccccgattctggagtcctcatcaatttccagctcaagaccaacgcaacctccagcagttggtttcctcttccgaggaactacactgggtccatgcaaagcagcagacagggtcaactttatgtcatcagggaactggtacgagatttgcccaaactctgtacagactctgctggcttcaccgccgtttactggcctcgcggcaactgagatcagctgcgctatagaaacagcgaagttcttcgatctcagtattaggccgccagcatatctgtggcttttactcagcaaaggtggcctcagcgaagatcgcaaactggccagccaatgttcctgttaagcaaactgttacc

SEQ ID NO: 58025 - DNA, 2295 bp, Zea Mays
ctcacgtctccttccattattcagtgtgcaatcccctttgtgaaaaggacagtaaagttttctcggtgttggactcgatggggctctcatcgaaaccactccaccgctgcccgatacctgttgcgaatgatccaaatgctattgccatcccaaagaggactcccaacacaatcgtgaagaagttgtcatatataacggttgacaagcaggacaaagatccttcaccgctgtttggagggcaccaaaactggaaacagagggaggagagctttaaactgaactctaccatgaaggttcactgtggatttatgaaaaatagtggtgcagatatggataccattgatctcaagtacatacagaaatgcagatttgtggttgcctctggtatttttgatggctacgacattccccatcagccatccaatattagtcatcggtctcagaagttgttctgcttcctgatggtggtagatgaagtatctcttgattttgttcaaaagaacgcaagtgtcaagattgacagtgctggggggaaatgggttggtatatggcgacttataagggtacatcgcctcccatttgacgaacctagaaggaatggaaagataccaaagattttaacacataggctgtttcctgaagcttggtatagcatttggattgatgggaaaatggagctcatagttgacccacttcttattctcgagagatatctctggcgtggaaaaaacacatttgcagtagctgcccataagcatcataggagcatctatgaagagggtgatgcaatcaaacggcggaagcgatatgctcgtcctttggttgatcttcagatgaaattatactattatgaggggatggagccttggagcccaaagaaaaagatgcctagtgatgtgccggagggagcagtgctgatccgggaacatacgacgatgaccgatctcttcagctgcctctggttcaacgaggtcaatcttttcacgccgcgtgatcagatcagctttggctacgtggtgcataggctcggaggcgctctcaagttcttcatgttccccaactgcgaatacaattcgctgttcatcctgcacggacacacgagagaacactcctctaaagtcgagtgggccaaaacaaccgatgagattgtgaagaagggactgaaggagagtagaggaggattagggctatggactccgtatcctgcagatctcagctccgtggaagtccctgctgtaaaaaggacttcaccggcaggctaggctgggattttttggtcttctattcgttcatggttgtaaaaagtagaacactactgatttcccccccttttcttttctcgcttaatcagacgagatcatgtaattcctgtagattctgtggtaactgaaccccgggggtaccgtaggctaatgcttggagcttgttgcttccagccggttctgtgcaatttaacactcatttacatatgtgccataaaaataaaaatagaagattcatggttcatcacatctgctatagggatatcaaatcaacattataagtcaacgcctgaaaaataattataacaactggaaataatcagcaccaaagcatcatgcactttcaaatgaatcatttgcctctttcagctgatacaatctcatcagcattctgtgatctaccaaaagttcctacaccagaatcacaaggaccaactcgagtggaatacgagaccaggtctgcacctccggccatccacgttgaacacgatgccaggctgcacggcagcagccttccccagatgcaagttcagaaatccctccacctgaaacagttgcggtttttcctcagtgcctctacgcaagctcacgccccatccaaggtcaccttccggcgtatctgacagtgtgagggcccatctcagcaaacgtgagcttgacttcttgttcaactcgatccaggccccgattctggagtcctcatcaatttccagctcaagaccaacgcaacctccagcagttggtttcctcttccgaggaactacactgggtccatgcaaagcagcagacagggtcaactttatgtcatcagggaactggtacgagatttgcccaaactctgtacagactctgctggcttcaccgccgtttactggcctcgcggcaactgagatcagctgcgctatagaaacagcgaagttcttcgatctcagtattaggccgccagcatatctgtggcttttactcagcaaaggtggcctcagcgaagatcgcaaactggccagccaatgttcctgttaagcaaactgttacc

SEQ ID NO: 58026 - DNA, 2133 bp, Zea Mays
gtgtcttgcaaactgcaccaacgaaattccagaacataaaattaatcagtcgatgcataagccagtcttcaacttgatattctccaagattcatagatgatgaagatcagatcagtcactagaatctaaaggttcactgtggatttatgaaaaatagtggtgcagatatggataccattgatctcaagtacatacagaaatgcagatttgtggttgcctctggtatttttgatggctacgacattccccatcagccatccaatattagtcatcggtctcagaagttgttctgcttcctgatggtggtagatgaagtatctcttgattttgttcaaaagaacgcaagtgtcaagattgacagtgctggggggaaatgggttggtatatggcgacttataagggtacatcgcctcccatttgacgaacctagaaggaatggaaagataccaaagattttaacacataggctgtttcctgaagcttggtatagcatttggattgatgggaaaatggagctcatagttgacccacttcttattctcgagagatatctctggcgtggaaaaaacacatttgcagtagctgcccataagcatcataggagcatctatgaagagggtgatgcaatcaaacggcggaagcgatatgctcgtcctttggttgatcttcagatgaaattatactattatgaggggatggagccttggagcccaaagaaaaagatgcctagtgatgtgccggagggagcagtgctgatccgggaacatacgacgatgaccgatctcttcagctgcctctggttcaacgaggtcaatcttttcacgccgcgtgatcagatcagctttggctacgtggtgcataggctcggaggcgctctcaagttcttcatgttccccaactgcgaatacaattcgctgttcatcctgcacggacacacgagagaacactcctctaaagtcgagtgggccaaaacaaccgatgagattgtgaagaagggactgaaggagagtagaggaggattagggctatggactccgtatcctgcagatctcagctccgtggaagtccctgctgtaaaaaggacttcaccggcaggctaggctgggattttttggtcttctattcgttcatggttgtaaaaagtagaacactactgatttcccccccttttcttttctcgcttaatcagacgagatcatgtaattcctgtagattctgtggtaactgaaccccgggggtaccgtaggctaatgcttggagcttgttgcttccagccggttctgtgcaatttaacactcatttacatatgtgccataaaaataaaaatagaagattcatggttcatcacatctgctatagggatatcaaatcaacattataagtcaacgcctgaaaaataattataacaactggaaataatcagcaccaaagcatcatgcactttcaaatgaatcatttgcctctttcagctgatacaatctcatcagcattctgtgatctaccaaaagttcctacaccagaatcacaaggaccaactcgagtggaatacgagaccaggtctgcacctccggccatccacgttgaacacgatgccaggctgcacggcagcagccttccccagatgcaagttcagaaatccctccacctgaaacagttgcggtttttcctcagtgcctctacgcaagctcacgccccatccaaggtcaccttccggcgtatctgacagtgtgagggcccatctcagcaaacgtgagcttgacttcttgttcaactcgatccaggccccgattctggagtcctcatcaatttccagctcaagaccaacgcaacctccagcagttggtttcctcttccgaggaactacactgggtccatgcaaagcagcagacagggtcaactttatgtcatcagggaactggtacgagatttgcccaaactctgtacagactctgctggcttcaccgccgtttactggcctcgcggcaactgagatcagctgcgctatagaaacagcgaagttcttcgatctcagtattaggccgccagcatatctgtggcttttactcagcaaaggtggcctcagcgaagatcgcaaactggccagccaatgttcctgttaagcaaactgttacc

SEQ ID NO: 58027 - DNA, 1918 bp, Zea Mays
cgtgtgcgtgtgtctgttgcctcggcccacatcacgccttcgcttcgcgccaccgccgtccgccagttcagctcaccctcgccgccggacagatagaagaaaattattggcgctctgacaaatccaactgaggttttcttggactacagatgaagcgggctcgaagggcgtatgtgcaagagatgactgatgagggatgctagtgaaattgatgaacttgttacgggcgtgctggcgaccgtcatcgaaccggcatgcccgaacaggctcagatgttaccggtaggcaggatggacttctatggtacaaggacgccgggcaacatgtcaatggggagttctccatggctgttgttcaggcaaataacttacttgaggaccagtgtcagatcgagtcgggcccactgagttttctagattctggaccatatggcactttcgttggtgtttacgatgggcatggtggtccagagacggcctgctatatcaatgatcatcttttccagaatctgaaaagatttgcatctgagcagaatgcaatgtctgctgatgtactgaagaaggcatatgaagctacagaagatggattcttctccattgttaccaaacaatggcctgtaaagcctcagatagcagctgtcggctcatgctgcctggtcggtgtaatttgtggtggcatgctttatgttgccaatgttggggattcccgtgtcgttttaggaaaacatgttaaggccactggagaagttttggctgtccaactgtcagcagaacataatgttagtattgcgtccgtgagaaaagaactgcagtcaatgcacccagaagataggcacattgttgttctcaagcacaatgtttggcgtgttaaaggactaattcaggtttgtagatcaattggtgatgcatatctcaaaaagcaagagttcaacagggaacccctatatgcaaaatttcgcctccgtgaaccttttcacaagccaatactaagttcagaaccatcaatcagtgtgcaaccactacaaccacacgaccagtttctcatatttgcatctgatggactttgggagcagttaaccaaccaagaggcagttgatattgttcgaagtagcccccgcagtggctgtgctaggaggctgataagagcggcactgcaagaggcagccaagaaaagagagatgaggtactcggacctcaagaagattgaccgcggtgttcgccgccacttccacgacgacataacagtcatagtagtgttccttgactccggcctcgtaagccaggcgagcacacaccgaggtccaactctttccttgcgaggcggtggcggcagcgctggcctgcgcagcaacacacttgcacctacgtgactataaagtgcctggtggagtggaggctactgactgaaggtggttttctttccttgtgtcgaatgtgttatatatgtacttgtaccagccaagatcattcatccccccccctaaaatggtgtaaagaagtaggagaggcgccgaagttcctcaccagcgtatctgaatgccctcaatggtgtcaagttgtggactcaagtggatagcttcgctgaatcttctgatgatgctctgtggaaagctcgaatcctttccacctgaaaaagcaagtaatatgtcttccagtgctggaattaacccctagtgcatatatatatgtatgaaataataataaggcaaaaggaggagtaacttatttaactaatgctgtgaggtgtatttatgttttgtatgtgtactgctttttgactgctactgcatctactgttgttaattgaccactggtgaagtgaaatcactggtttcgtcttgctgtctcactgttactagttgttcacagcattgctggtttgactgttcctactatatacatatagtttatatattata

SEQ ID NO: 58028 - DNA, 1754 bp, Zea Mays
gtgtctgttgcctcggcccacatcacgccttcgcttcgcgccaccgccgtccgccagttcagctcaccctcgccgccgatgaagcgggctcgaagggcgtatgtgcaagagatgactgatgagggatgctagtgaaattgatgaacttgttacgggcgtgctggcgaccgtcatcgaaccggcatgcccgaacaggctcagatgttaccggtaggcaggatggacttctatggtacaaggacgccgggcaacatgtcaatggggagttctccatggctgttgttcaggcaaataacttacttgaggaccagtgtcagatcgagtcgggcccactgagttttctagattctggaccatatggcactttcgttggtgtttacgatgggcatggtggtccagagacggcctgctatatcaatgatcatcttttccagaatctgaaaagatttgcatctgagcagaatgcaatgtctgctgatgtactgaagaaggcatatgaagctacagaagatggattcttctccattgttaccaaacaatggcctgtaaagcctcagatagcagctgtcggctcatgctgcctggtcggtgtaatttgtggtggcatgctttatgttgccaatgttggggattcccgtgtcgttttaggaaaacatgttaaggccactggagaagttttggctgtccaactgtcagcagaacataatgttagtattgcgtccgtgagaaaagaactgcagtcaatgcacccagaagataggcacattgttgttctcaagcacaatgtttggcgtgttaaaggactaattcaggtttgtagatcaattggtgatgcatatctcaaaaagcaagagttcaacagggaacccctatatgcaaaatttcgcctccgtgaaccttttcacaagccaatactaagttcagaaccatcaatcagtgtgcaaccactacaaccacacgaccagtttctcatatttgcatctgatggactttgggagcagttaaccaaccaagaggcagttgatattgttcgaagtagcccccgcagtggctgtgctaggaggctgataagagcggcactgcaagaggcagccaagaaaagagagatgaggtactcggacctcaagaagattgaccgcggtgttcgccgccacttccacgacgacataacagtcatagtagtgttccttgactccggcctcgtaagccaggcgagcacacaccgaggtccaactctttccttgcgaggcggtggcggcagcgctggcctgcgcagcaacacacttgcacctacgtgactataaagtgcctggtggagtggaggctactgactgaaggagaggcgccgaagttcctcaccagcgtatctgaatgccctcaatggtgtcaagttgtggactcaagtggatagcttcgctgaatcttctgatgatgctctgtggaaagctcgaatcctttccacctgaaaaagcaagtaatatgtcttccagtgctggaattaacccctagtgcatatatatatgtatgaaataataataaggcaaaaggaggagtaacttatttaactaatgctgtgaggtgtatttatgttttgtatgtgtactgctttttgactgctactgcatctactgttgttaattgaccactggtgaagtgaaatcactggtttcgtcttgctgtctcactgttactagttgttcacagcattgctggtttgactgttcctactatatacatatagtttatatattata

SEQ ID NO: 58029 - DNA, 2176 bp, Zea Mays
cgcgactccacccaagtttcccctcctccgctgcctgcttccagcttctccccaacttcatttcagctcttgtgggtcggttcgggtcgggccagcccgggccggtagtgagcgcgccacccgacccgtttcgcggttgctccggtcccttttcctctcctattttctcttctctctctcccgtcgtccagagacccagaaggagagggagacagagccacagaggcaggggagaggaggagcagcgtggcgacgcccaaatcgagcgacctgatcgaggcccctcgcccctactcgctgaatcccaatccgagcccgccaattgggcgcccccccccgcccacgcaaagatagaagaaaattattggcgctctgacaaatccaactgaggttttcttggactacagatgaagcgggctcgaagggcgtatgtgcaagagatgactgatgagggatgctagtgaaattgatgaacttgttacgggcgtgctggcgaccgtcatcgaaccggcatgcccgaacaggctcagatgttaccggtaggcaggatggacttctatggtacaaggacgccgggcaacatgtcaatggggagttctccatggctgttgttcaggcaaataacttacttgaggaccagtgtcagatcgagtcgggcccactgagttttctagattctggaccatatggcactttcgttggtgtttacgatgggcatggtggtccagagacggcctgctatatcaatgatcatcttttccagaatctgaaaagatttgcatctgagcagaatgcaatgtctgctgatgtactgaagaaggcatatgaagctacagaagatggattcttctccattgttaccaaacaatggcctgtaaagcctcagatagcagctgtcggctcatgctgcctggtcggtgtaatttgtggtggcatgctttatgttgccaatgttggggattcccgtgtcgttttaggaaaacatgttaaggccactggagaagttttggctgtccaactgtcagcagaacataatgttagtattgcgtccgtgagaaaagaactgcagtcaatgcacccagaagataggcacattgttgttctcaagcacaatgtttggcgtgttaaaggactaattcaggtttgtagatcaattggtgatgcatatctcaaaaagcaagagttcaacagggaacccctatatgcaaaatttcgcctccgtgaaccttttcacaagccaatactaagttcagaaccatcaatcagtgtgcaaccactacaaccacacgaccagtttctcatatttgcatctgatggactttgggagcagttaaccaaccaagaggcagttgatattgttcgaagtagcccccgcagtggctgtgctaggaggctgataagagcggcactgcaagaggcagccaagaaaagagagatgaggtactcggacctcaagaagattgaccgcggtgttcgccgccacttccacgacgacataacagtcatagtagtgttccttgactccggcctcgtaagccaggcgagcacacaccgaggtccaactctttccttgcgaggcggtggcggcagcgctggcctgcgcagcaacacacttgcacctacgtgactataaagtgcctggtggagtggaggctactgactgaaggtggttttctttccttgtgtcgaatgtgttatatatgtacttgtaccagccaagatcattcatccccccccctaaaatggtgtaaagaagtaggagaggcgccgaagttcctcaccagcgtatctgaatgccctcaatggtgtcaagttgtggactcaagtggatagcttcgctgaatcttctgatgatgctctgtggaaagctcgaatcctttccacctgaaaaagcaagtaatatgtcttccagtgctggaattaacccctagtgcatatatatatgtatgaaataataataaggcaaaaggaggagtaacttatttaactaatgctgtgaggtgtatttatgttttgtatgtgtactgctttttgactgctactgcatctactgttgttaattgaccactggtgaagtgaaatcactggtttcgtcttgctgtctcactgttactagttgttcacagcattgctggtttgactgttcctactatatacatatagtttatatattata

SEQ ID NO: 58030 - DNA, 2059 bp, Zea Mays
aagtttcccctcctccgctgcctgcttccagcttctccccaacttcatttcagctcttgtgggtcggttcgggtcgggccagcccgggccggtagtgagcgcgccacccgacccgtttcgcggttgctccggtcccttttcctctcctattttctcttctctctctcccgtcgtccagagacccagaaggagagggagacagagccacagaggcaggggagaggaggagcagcgtggcgacgcccaaatcgagcgacctgatcgaggcccctcgcccctactcgctgaatcccaatccgagcccgccaattgggcgcccccccccgcccacgcaaagatgaagcgggctcgaagggcgtatgtgcaagagatgactgatgagggatgctagtgaaattgatgaacttgttacgggcgtgctggcgaccgtcatcgaaccggcatgcccgaacaggctcagatgttaccggtaggcaggatggacttctatggtacaaggacgccgggcaacatgtcaatggggagttctccatggctgttgttcaggcaaataacttacttgaggaccagtgtcagatcgagtcgggcccactgagttttctagattctggaccatatggcactttcgttggtgtttacgatgggcatggtggtccagagacggcctgctatatcaatgatcatcttttccagaatctgaaaatttgcacataaaggagatcatccattttttcatggcttgtatttaggatttgcatctgagcagaatgcaatgtctgctgatgtactgaagaaggcatatgaagctacagaagatggattcttctccattgttaccaaacaatggcctgtaaagcctcagatagcagctgtcggctcatgctgcctggtcggtgtaatttgtggtggcatgctttatgttgccaatgttggggattcccgtgtcgttttaggaaaacatgttaaggccactggagaagttttggctgtccaactgtcagcagaacataatgttagtattgcgtccgtgagaaaagaactgcagtcaatgcacccagaagataggcacattgttgttctcaagcacaatgtttggcgtgttaaaggactaattcaggtttgtagatcaattggtgatgcatatctcaaaaagcaagagttcaacagggaacccctatatgcaaaatttcgcctccgtgaaccttttcacaagccaatactaagttcagaaccatcaatcagtgtgcaaccactacaaccacacgaccagtttctcatatttgcatctgatggactttgggagcagttaaccaaccaagaggcagttgatattgttcgaagtagcccccgcagtggctgtgctaggaggctgataagagcggcactgcaagaggcagccaagaaaagagagatgaggtactcggacctcaagaagattgaccgcggtgttcgccgccacttccacgacgacataacagtcatagtagtgttccttgactccggcctcgtaagccaggcgagcacacaccgaggtccaactctttccttgcgaggcggtggcggcagcgctggcctgcgcagcaacacacttgcacctacgtgactataaagtgcctggtggagtggaggctactgactgaaggagaggcgccgaagttcctcaccagcgtatctgaatgccctcaatggtgtcaagttgtggactcaagtggatagcttcgctgaatcttctgatgatgctctgtggaaagctcgaatcctttccacctgaaaaagcaagtaatatgtcttccagtgctggaattaacccctagtgcatatatatatgtatgaaataataataaggcaaaaggaggagtaacttatttaactaatgctgtgaggtgtatttatgttttgtatgtgtactgctttttgactgctactgcatctactgttgttaattgaccactggtgaagtgaaatcactggtttcgtcttgctgtctcactgttactagttgttcacagcattgctggtttgactgttcctactatatacatatagtttatatattata

SEQ ID NO: 58031 - DNA, 2013 bp, Zea Mays
aagtttcccctcctccgctgcctgcttccagcttctccccaacttcatttcagctcttgtgggtcggttcgggtcgggccagcccgggccggtagtgagcgcgccacccgacccgtttcgcggttgctccggtcccttttcctctcctattttctcttctctctctcccgtcgtccagagacccagaaggagagggagacagagccacagaggcaggggagaggaggagcagcgtggcgacgcccaaatcgagcgacctgatcgaggcccctcgcccctactcgctgaatcccaatccgagcccgccaattgggcgcccccccccgcccacgcaaagatgaagcgggctcgaagggcgtatgtgcaagagatgactgatgagggatgctagtgaaattgatgaacttgttacgggcgtgctggcgaccgtcatcgaaccggcatgcccgaacaggctcagatgttaccggtaggcaggatggacttctatggtacaaggacgccgggcaacatgtcaatggggagttctccatggctgttgttcaggcaaataacttacttgaggaccagtgtcagatcgagtcgggcccactgagttttctagattctggaccatatggcactttcgttggtgtttacgatgggcatggtggtccagagacggcctgctatatcaatgatcatcttttccagaatctgaaaagatttgcatctgagcagaatgcaatgtctgctgatgtactgaagaaggcatatgaagctacagaagatggattcttctccattgttaccaaacaatggcctgtaaagcctcagatagcagctgtcggctcatgctgcctggtcggtgtaatttgtggtggcatgctttatgttgccaatgttggggattcccgtgtcgttttaggaaaacatgttaaggccactggagaagttttggctgtccaactgtcagcagaacataatgttagtattgcgtccgtgagaaaagaactgcagtcaatgcacccagaagataggcacattgttgttctcaagcacaatgtttggcgtgttaaaggactaattcaggtttgtagatcaattggtgatgcatatctcaaaaagcaagagttcaacagggaacccctatatgcaaaatttcgcctccgtgaaccttttcacaagccaatactaagttcagaaccatcaatcagtgtgcaaccactacaaccacacgaccagtttctcatatttgcatctgatggactttgggagcagttaaccaaccaagaggcagttgatattgttcgaagtagcccccgcagtggctgtgctaggaggctgataagagcggcactgcaagaggcagccaagaaaagagagatgaggtactcggacctcaagaagattgaccgcggtgttcgccgccacttccacgacgacataacagtcatagtagtgttccttgactccggcctcgtaagccaggcgagcacacaccgaggtccaactctttccttgcgaggcggtggcggcagcgctggcctgcgcagcaacacacttgcacctacgtgactataaagtgcctggtggagtggaggctactgactgaaggagaggcgccgaagttcctcaccagcgtatctgaatgccctcaatggtgtcaagttgtggactcaagtggatagcttcgctgaatcttctgatgatgctctgtggaaagctcgaatcctttccacctgaaaaagcaagtaatatgtcttccagtgctggaattaacccctagtgcatatatatatgtatgaaataataataaggcaaaaggaggagtaacttatttaactaatgctgtgaggtgtatttatgttttgtatgtgtactgctttttgactgctactgcatctactgttgttaattgaccactggtgaagtgaaatcactggtttcgtcttgctgtctcactgttactagttgttcacagcattgctggtttgactgttcctactatatacatatagtttatatattata

SEQ ID NO: 58032 - DNA, 2075 bp, Zea Mays
aagtttcccctcctccgctgcctgcttccagcttctccccaacttcatttcagctcttgtgggtcggttcgggtcgggccagcccgggccggtagtgagcgcgccacccgacccgtttcgcggttgctccggtcccttttcctctcctattttctcttctctctctcccgtcgtccagagacccagaaggagagggagacagagccacagaggcaggggagaggaggagcagcgtggcgacgcccaaatcgagcgacctgatcgaggcccctcgcccctactcgctgaatcccaatccgagcccgccaattgggcgcccccccccgcccacgcaaaggacagatagaagaaaattattggcgctctgacaaatccaactgaggttttcttggactacagatgaagcgggctcgaagggcgtatgtgcaagagatgactgatgagggatgctagtgaaattgatgaacttgttacgggcgtgctggcgaccgtcatcgaaccggcatgcccgaacaggctcagatgttaccggtaggcaggatggacttctatggtacaaggacgccgggcaacatgtcaatggggagttctccatggctgttgttcaggcaaataacttacttgaggaccagtgtcagatcgagtcgggcccactgagttttctagattctggaccatatggcactttcgttggtgtttacgatgggcatggtggtccagagacggcctgctatatcaatgatcatcttttccagaatctgaaaagatttgcatctgagcagaatgcaatgtctgctgatgtactgaagaaggcatatgaagctacagaagatggattcttctccattgttaccaaacaatggcctgtaaagcctcagatagcagctgtcggctcatgctgcctggtcggtgtaatttgtggtggcatgctttatgttgccaatgttggggattcccgtgtcgttttaggaaaacatgttaaggccactggagaagttttggctgtccaactgtcagcagaacataatgttagtattgcgtccgtgagaaaagaactgcagtcaatgcacccagaagataggcacattgttgttctcaagcacaatgtttggcgtgttaaaggactaattcaggtttgtagatcaattggtgatgcatatctcaaaaagcaagagttcaacagggaacccctatatgcaaaatttcgcctccgtgaaccttttcacaagccaatactaagttcagaaccatcaatcagtgtgcaaccactacaaccacacgaccagtttctcatatttgcatctgatggactttgggagcagttaaccaaccaagaggcagttgatattgttcgaagtagcccccgcagtggctgtgctaggaggctgataagagcggcactgcaagaggcagccaagaaaagagagatgaggtactcggacctcaagaagattgaccgcggtgttcgccgccacttccacgacgacataacagtcatagtagtgttccttgactccggcctcgtaagccaggcgagcacacaccgaggtccaactctttccttgcgaggcggtggcggcagcgctggcctgcgcagcaacacacttgcacctacgtgactataaagtgcctggtggagtggaggctactgactgaaggagaggcgccgaagttcctcaccagcgtatctgaatgccctcaatggtgtcaagttgtggactcaagtggatagcttcgctgaatcttctgatgatgctctgtggaaagctcgaatcctttccacctgaaaaagcaagtaatatgtcttccagtgctggaattaacccctagtgcatatatatatgtatgaaataataataaggcaaaaggaggagtaacttatttaactaatgctgtgaggtgtatttatgttttgtatgtgtactgctttttgactgctactgcatctactgttgttaattgaccactggtgaagtgaaatcactggtttcgtcttgctgtctcactgttactagttgttcacagcattgctggtttgactgttcctactatatacatatagtttatatattata

SEQ ID NO: 58033 - DNA, 1719 bp, Zea Mays
caggcccatctacccacacactatcctctccctcagtgctcacgtctccaccggtccaccccctcggcagctcaatggcagctgcgacggcgccaccgccggcggcggttgccaccaccctctcgggcctcatgcgctgccagaacatccgtagcagcaggcctagagccttctacgcgaggtgcgcctcctccaacgcgagcgcggaggcggcggagagccggaagggaggccacggcgggacgcgcctggaggaagccgtgcccgtcggcgaggggcgctcgagggtagacgcctggatatcggcgcgtctcggcggcgggggcgttagccgcgcgcgcgtgcaggccagcatccgggccgggcttgtcgccgtcaatggccgcccggtctccaaggtttcgcatactgtgaagggaggggacttggtcagctgcacggtgtcagagctacagccgctgagggcagaggcggaggacatcccgctggacatcgtttatgaggatgaccatgttcttgttgtcaacaagccggctcatatggttgttcacccggcgccaggaaatgccaaaggcacattagtcaatgctatacttcatcactgcaagatctccacatttacctgtttagcacgcagctcagctggtgatgaatgcccggattctacggatgaagacactgatgtatttcatgtggatcagtttgctgctgaagatgtaagttcagaagtccggaatgctcttgtgcgccctggtattgtgcacaggctggataaggggacaagtgggcttcttgttgttgctaaggatgagcattctcatgctcgattagcagaacagttcaagctgcatacaatccgtagggtatacatcagtcttacttgtggcgcacctaatccaaattctggcaggattgaggcttctattgcacgtgatcctaacaatcggattcgtatgactgctattgctggatcaggccacagatatgcacggaatgctgctagtaggtacaaagtaagagaggtctttgctggtggcggatccgcactagttgagtggagactagagacaggacgcactcatcagatccgggcgcatgcaaagtacatagggatccctcttctcggcgacgaaacatatggaggtacccagagcatggcgttatcgctcctgagaccaaggagtccttcgaaatatcacagcggcctttcgaatctgttgtctaaagtggacaggccttgccttcatgctgcatcgcttggattcaagcacccacgttcaggaaaggtccttgagttctcgtgccccccgccagatgatttcttggaggtgcttggtgaattgcgacgtgttacgtctaggtccagtgatgccccaaatggtgatggtgttttccggtgagggagatggatagaaccaaggctgaggatgtggaacaagacatgggaacccttggagatttgttccaggctcctagaaagagaaaagtgtttcgtacgagttttcctgatggctggtggaagtgagagggaaatgagtaggagaatctgtatgctttcggctgggctcatcagtacacacgcatttgttttgggctccgattcatgggcttccagcaggaagaacttcacgggattcgattgatcgattcttcattcttttcttttcttttttttctcctactacagttgcccgccaatgctcggcgagcaaagaggcc

SEQ ID NO: 58034 - DNA, 1739 bp, Zea Mays
caggcccatctacccacacactatcctctccctcagtgctcacgtctccaccggtccaccccctcggcagctcaatggcagctgcgacggcgccaccgccggcggcggttgccaccaccctctcgggcctcatgcgctgccagaacatccgtagcagcaggcctagagccttctacgcgaggtgcgcctcctccaacgcgagcgcggaggcggcggagagccggaagggaggccacggcgggacgcgcctggaggaagccgtgcccgtcggcgaggggcgctcgagggtagacgcctggatatcggcgcgtctcggcggcgggggcgttagccgcgcgcgcgtgcaggccagcatccgggccgggcttgtcgccgtcaatggccgcccggtctccaaggtttcgcatactgtgaagggaggggacttggtcagctgcacggtgtcagagctacagccgctgagggcagaggcggaggacatcccgctggacatcgtttatgaggatgaccatgttcttgttgtcaacaagccggctcatatggttgttcacccggcgccaggaaatgccaaaggcacattagtcaatgctatacttcatcactgcaagatctccacatttacctgtttagcacgcagctcagctggtgatgaatgcccggattctacggatgaagacactgatgtatttcatgtggatcagtttgctgctgaagatgtaagttcagaagtccggaatgctcttgtgcgccctggtattgtgcacaggctggataaggggacaagtgggcttcttgttgttgctaaggatgagcattctcatgctcgattagcagaacagttcaagctgcatacaatccgtagggtatacatcagtcttacttgtggcgcacctaatccaaattctggcaggattgaggcttctattgcacgtgatcctaacaatcggattcgtatgactgctattgctggatcaggccacagatatgcacggaatgctgctagtaggtacaaagtaagagaggtctttgctggtggcggatccgcactagttgagtggagactagagacaggacgcactcatcagatccgggcgcatgcaaagtacatagggatccctcttctcggcgacgaaacatatggaggtacccagagcatggcgttatcgctcctgagaccaaggagtccttcgaaatatcacagcggcctttcgaatctgttgtctaaagtggacaggccttgccttcatgctgcatcgcttgggtaggtatcatacaacacagattcaagcacccacgttcaggaaaggtccttgagttctcgtgccccccgccagatgatttcttggaggtgcttggtgaattgcgacgtgttacgtctaggtccagtgatgccccaaatggtgatggtgttttccggtgagggagatggatagaaccaaggctgaggatgtggaacaagacatgggaacccttggagatttgttccaggctcctagaaagagaaaagtgtttcgtacgagttttcctgatggctggtggaagtgagagggaaatgagtaggagaatctgtatgctttcggctgggctcatcagtacacacgcatttgttttgggctccgattcatgggcttccagcaggaagaacttcacgggattcgattgatcgattcttcattcttttcttttcttttttttctcctactacagttgcccgccaatgctcggcgagcaaagaggcc

SEQ ID NO: 58035 - DNA, 1660 bp, Zea Mays
ctatcctctccctcagtgctcacgtctccaccggtccaccccctcggcagctcaatggcagctgcgacggcgccaccgccggcggcggttgccaccaccctctcgggcctcatgcgctgccagaacatccgtagcagcaggcctagagccttctacgcgaggtgcgcctcctccaacgcgagcgcggaggcggcggagagccggaagggaggccacggcgggacgcgcctggaggaagccgtgcccgtcggcgaggggcgctcgagggtagacgcctggatatcggcgcgtctcggcggcgggggcgttagccgcgcgcgcgtgcaggccagcatccgggccgggcttgtcgccgtcaatggccgcccggtctccaaggtttcgcatactgtgaagggaggggacttggtcagctgcacggtgtcagagctacagccgctgagggcagaggcggaggacatcccgctggacatcgtttatgaggatgaccatgttcttgttgtcaacaagccggctcatatggttgttcacccggcgccaggaaatgccaaaggcacattagtcaatgctatacttcatcactgcaagatctccacatttacctgtttagcacgcagctcagctggtgatgaatgcccggattctacggatgaagacactgatgtatttcatgtggatcagtttgctgctgaagatgtaagttcagaagtccggaatgctcttgtgcgccctggtattgtgcacaggctggataaggggacaagtgggcttcttgttgttgctaaggatgagcattctcatgctcgattagcagaacagttcaagctgcatacaatccgtagggtatacatcagtcttacttgtggcgcacctaatccaaattctggcaggattgaggcttctattgcacgtgatcctaacaatcggattcgtatgactgctattgctggatcaggccacagatatgcacggaatgctgctagtacaaagtaagagaggtctttgctggtggcggatccgcactagttgagtggagactagagacaggacgcactcatcagatccgggcgcatgcaaagtacatagggatccctcttctcggcgacgaaacatatggaggtacccagagcatggcgttatcgctcctgagaccaaggagtccttcgaaatatcacagcggcctttcgaatctgttgtctaaagtggacaggccttgccttcatgctgcatcgcttggatggaaaacgaacaacaaacaagaggatcgctgggacctagtcaggcggttcatgtgaatgatagctattgtgatatatataacataaccagtcagtttgccagcaataaacatgtatttagatattacacttgttgtcttgttgatgcatctgagactacacctgcaatagctagctgaagttatgcattcgtgatgaacagaggtgcgaagggagagatgaaaagaagtgagtcaggttaattgaagtggtgataaatactaaaagaaaataaaaatgattaaaaagtggttggagtattattttaaaggatatgttcacttatgaatactatcacggagaaattaaaattgtaagtactaaaagagagaagcctaataaaatgaatatcataatagcaaaaagctcgaaacatgtatgat

SEQ ID NO: 58036 - DNA, 1686 bp, Zea Mays
ctatcctctccctcagtgctcacgtctccaccggtccaccccctcggcagctcaatggcagctgcgacggcgccaccgccggcggcggttgccaccaccctctcgggcctcatgcgctgccagaacatccgtagcagcaggcctagagccttctacgcgaggtgcgcctcctccaacgcgagcgcggaggcggcggagagccggaagggaggccacggcgggacgcgcctggaggaagccgtgcccgtcggcgaggggcgctcgagggtagacgcctggatatcggcgcgtctcggcggcgggggcgttagccgcgcgcgcgtgcaggccagcatccgggccgggcttgtcgccgtcaatggccgcccggtctccaaggtttcgcatactgtgaagggaggggacttggtcagctgcacggtgtcagagctacagccgctgagggcagaggcggaggacatcccgctggacatcgtttatgaggatgaccatgttcttgttgtcaacaagccggctcatatggttgttcacccggcgccaggaaatgccaaaggcacattagtcaatgctatacttcatcactgcaagatctccacatttacctgtttagcacgcagctcagctggtgatgaatgcccggattctacggatgaagacactgatgtatttcatgtggatcagtttgctgctgaagatgtaagttcagaagtccggaatgctcttgtgcgccctggtattgtgcacaggctggataaggggacaagtgggcttcttgttgttgctaaggatgagcattctcatgctcgattagcagaacagttcaagctgcatacaatccgtagggtatacatcagtcttacttgtggcgcacctaatccaaattctggcaggattgaggcttctattgcacgtgatcctaacaatcggattcgtatgactgctattgctggatcaggccacagatatgcacggaatgctgctagtacaaagtaagagaggtctttgctggtggcggatccgcactagttgagtggagactagagacaggacgcactcatcagaattaccatactgctctatcagttctagcaggaattaaataaactcacgaataactgcaaattactaatatcggtgtgttgcttgtttggatgttattggccggttgagacctgcgaatcacgattctcacgagcaactgtttaaactttcttgtcaagatagatagtgttcttgtatatgtttattttatttggcatgcagatggaaaacgaacaacaaacaagaggatcgctgggacctagtcaggcggttcatgtgaatgatagctattgtgatatatataacataaccagtcagtttgccagcaataaacatgtatttagatattacacttgttgtcttgttgatgcatctgagactacacctgcaatagctagctgaagttatgcattcgtgatgaacagaggtgcgaagggagagatgaaaagaagtgagtcaggttaattgaagtggtgataaatactaaaagaaaataaaaatgattaaaaagtggttggagtattattttaaaggatatgttcacttatgaatactatcacggagaaattaaaattgtaagtactaaaagagagaagcctaataaaatgaatatcataatagcaaaaagctcgaaacatgtatgat

SEQ ID NO: 58037 - DNA, 1680 bp, Zea Mays
ctatcctctccctcagtgctcacgtctccaccggtccaccccctcggcagctcaatggcagctgcgacggcgccaccgccggcggcggttgccaccaccctctcgggcctcatgcgctgccagaacatccgtagcagcaggcctagagccttctacgcgaggtgcgcctcctccaacgcgagcgcggaggcggcggagagccggaagggaggccacggcgggacgcgcctggaggaagccgtgcccgtcggcgaggggcgctcgagggtagacgcctggatatcggcgcgtctcggcggcgggggcgttagccgcgcgcgcgtgcaggccagcatccgggccgggcttgtcgccgtcaatggccgcccggtctccaaggtttcgcatactgtgaagggaggggacttggtcagctgcacggtgtcagagctacagccgctgagggcagaggcggaggacatcccgctggacatcgtttatgaggatgaccatgttcttgttgtcaacaagccggctcatatggttgttcacccggcgccaggaaatgccaaaggcacattagtcaatgctatacttcatcactgcaagatctccacatttacctgtttagcacgcagctcagctggtgatgaatgcccggattctacggatgaagacactgatgtatttcatgtggatcagtttgctgctgaagatgtaagttcagaagtccggaatgctcttgtgcgccctggtattgtgcacaggctggataaggggacaagtgggcttcttgttgttgctaaggatgagcattctcatgctcgattagcagaacagttcaagctgcatacaatccgtagggtatacatcagtcttacttgtggcgcacctaatccaaattctggcaggattgaggcttctattgcacgtgatcctaacaatcggattcgtatgactgctattgctggatcaggccacagatatgcacggaatgctgctagtacaaagtaagagaggtctttgctggtggcggatccgcactagttgagtggagactagagacaggacgcactcatcagatccgggcgcatgcaaagtacatagggatccctcttctcggcgacgaaacatatggaggtacccagagcatggcgttatcgctcctgagaccaaggagtccttcgaaatatcacagcggcctttcgaatctgttgtctaaagtggacaggccttgccttcatgctgcatcgcttgggtaggtatcatacaacacagatggaaaacgaacaacaaacaagaggatcgctgggacctagtcaggcggttcatgtgaatgatagctattgtgatatatataacataaccagtcagtttgccagcaataaacatgtatttagatattacacttgttgtcttgttgatgcatctgagactacacctgcaatagctagctgaagttatgcattcgtgatgaacagaggtgcgaagggagagatgaaaagaagtgagtcaggttaattgaagtggtgataaatactaaaagaaaataaaaatgattaaaaagtggttggagtattattttaaaggatatgttcacttatgaatactatcacggagaaattaaaattgtaagtactaaaagagagaagcctaataaaatgaatatcataatagcaaaaagctcgaaacatgtatgat

SEQ ID NO: 58038 - DNA, 1684 bp, Zea Mays
ctatcctctccctcagtgctcacgtctccaccggtccaccccctcggcagctcaatggcagctgcgacggcgccaccgccggcggcggttgccaccaccctctcgggcctcatgcgctgccagaacatccgtagcagcaggcctagagccttctacgcgaggtgcgcctcctccaacgcgagcgcggaggcggcggagagccggaagggaggccacggcgggacgcgcctggaggaagccgtgcccgtcggcgaggggcgctcgagggtagacgcctggatatcggcgcgtctcggcggcgggggcgttagccgcgcgcgcgtgcaggccagcatccgggccgggcttgtcgccgtcaatggccgcccggtctccaaggtttcgcatactgtgaagggaggggacttggtcagctgcacggtgtcagagctacagccgctgagggcagaggcggaggacatcccgctggacatcgtttatgaggatgaccatgttcttgttgtcaacaagccggctcatatggttgttcacccggcgccaggaaatgccaaaggcacattagtcaatgctatacttcatcactgcaagatctccacatttacctgtttagcacgcagctcagctggtgatgaatgcccggattctacggatgaagacactgatgtatttcatgtggatcagtttgctgctgaagatgtaagttcagaagtccggaatgctcttgtgcgccctggtattgtgcacaggctggataaggggacaagtgggcttcttgttgttgctaaggatgagcattctcatgctcgattagcagaacagttcaagctgcatacaatccgtagggtatacatcagtcttacttgtggcgcacctaatccaaattctggcaggattgaggcttctattgcacgtgatcctaacaatcggattcgtatgactgctattgctggatcaggccacagatatgcacggaatgctgctagtaggtacaaagtaagagaggtctttgctggtggcggatccgcactagttgagtggagactagagacaggacgcactcatcagatccgggcgcatgcaaagtacatagggatccctcttctcggcgacgaaacatatggaggtacccagagcatggcgttatcgctcctgagaccaaggagtccttcgaaatatcacagcggcctttcgaatctgttgtctaaagtggacaggccttgccttcatgctgcatcgcttgggtaggtatcatacaacacagatggaaaacgaacaacaaacaagaggatcgctgggacctagtcaggcggttcatgtgaatgatagctattgtgatatatataacataaccagtcagtttgccagcaataaacatgtatttagatattacacttgttgtcttgttgatgcatctgagactacacctgcaatagctagctgaagttatgcattcgtgatgaacagaggtgcgaagggagagatgaaaagaagtgagtcaggttaattgaagtggtgataaatactaaaagaaaataaaaatgattaaaaagtggttggagtattattttaaaggatatgttcacttatgaatactatcacggagaaattaaaattgtaagtactaaaagagagaagcctaataaaatgaatatcataatagcaaaaagctcgaaacatgtatgat

SEQ ID NO: 58039 - DNA, 2042 bp, Zea Mays
ctatcctctccctcagtgctcacgtctccaccggtccaccccctcggcagctcaatggcagctgcgacggcgccaccgccggcggcggttgccaccaccctctcgggcctcatgcgctgccagaacatccgtagcagcaggcctagagccttctacgcgaggtgcgcctcctccaacgcgagcgcggaggcggcggagagccggaagggaggccacggcgggacgcgcctggaggaagccgtgcccgtcggcgaggggcgctcgagggtagacgcctggatatcggcgcgtctcggcggcgggggcgttagccgcgcgcgcgtgcaggccagcatccgggccgggcttgtcgccgtcaatggccgcccggtctccaaggtttcgcatactgtgaagggaggggacttggtcagctgcacggtgtcagagctacagccgctgagggcagaggcggaggacatcccgctggacatcgtttatgaggatgaccatgttcttgttgtcaacaagccggctcatatggttgttcacccggcgccaggaaatgccaaaggcacattagtcaatgctatacttcatcactgcaagatctccacatttacctgtttagcacgcagctcagctggtgatgaatgcccggattctacggatgaagacactgatgtatttcatgtggatcagtttgctgctgaagatgtaagttcagaagtccggaatgctcttgtgcgccctggtattgtgcacaggctggataaggggacaagtgggcttcttgttgttgctaaggatgagcattctcatgctcgattagcagaacagttcaagctgcatacaatccgtagggtatacatcagtcttacttgtggcgcacctaatccaaattctggcaggattgaggcttctattgcacgtgatcctaacaatcggattcgtatgactgctattgctggatcaggccacagatatgcacggaatgctgctagtacaaagtaagagaggtctttgctggtggcggatccgcactagttgagtggagactagagacaggacgcactcatcagatccgggcgcatgcaaagtacatagggatccctcttctcggcgacgaaacatatggaggtacccagagcatggcgttatcgctcctgagaccaaggagtccttcgaaatatcacagcggcctttcgaatctgttgtctaaagtggacaggccttgccttcatgctgcatcgcttgggtaggtatcatacaacacaggtatttactattatagtacttcttttatcaggcttctctcttctagtacttataattttatctactctataatagtaatcataagtgaatctatcctataaaatggtactctaatccattttaaattcttttcattttattttcttatttttcactacagaattaccatactgctctatcagttctagcaggaattaaataaactcacgaataactgcaaattactaatatcggtgtgttgcttgtttggatgttattggccggttgagacctgcgaatcacgattctcacgagcaactgtttaaactttcttgtcaagatagatagtgttcttgtatatgtttattttatttggcatgcagatggaaaacgaacaacaaacaagaggatcgctgggacctagtcaggcggttcatgtgaatgatagctattgtgatatatataacataaccagtcagtttgccagcaataaacatgtatttagatattacacttgttgtcttgttgatgcatctgagactacacctgcaatagctagctgaagttatgcattcgtgatgaacagaggtgcgaagggagagatgaaaagaagtgagtcaggttaattgaagtggtgataaatactaaaagaaaataaaaatgattaaaaagtggttggagtattattttaaaggatatgttcacttatgaatactatcacggagaaattaaaattgtaagtactaaaagagagaagcctaataaaatgaatatcataatagcaaaaagctcgaaacatgtatgat

SEQ ID NO: 58040 - DNA, 2046 bp, Zea Mays
ctatcctctccctcagtgctcacgtctccaccggtccaccccctcggcagctcaatggcagctgcgacggcgccaccgccggcggcggttgccaccaccctctcgggcctcatgcgctgccagaacatccgtagcagcaggcctagagccttctacgcgaggtgcgcctcctccaacgcgagcgcggaggcggcggagagccggaagggaggccacggcgggacgcgcctggaggaagccgtgcccgtcggcgaggggcgctcgagggtagacgcctggatatcggcgcgtctcggcggcgggggcgttagccgcgcgcgcgtgcaggccagcatccgggccgggcttgtcgccgtcaatggccgcccggtctccaaggtttcgcatactgtgaagggaggggacttggtcagctgcacggtgtcagagctacagccgctgagggcagaggcggaggacatcccgctggacatcgtttatgaggatgaccatgttcttgttgtcaacaagccggctcatatggttgttcacccggcgccaggaaatgccaaaggcacattagtcaatgctatacttcatcactgcaagatctccacatttacctgtttagcacgcagctcagctggtgatgaatgcccggattctacggatgaagacactgatgtatttcatgtggatcagtttgctgctgaagatgtaagttcagaagtccggaatgctcttgtgcgccctggtattgtgcacaggctggataaggggacaagtgggcttcttgttgttgctaaggatgagcattctcatgctcgattagcagaacagttcaagctgcatacaatccgtagggtatacatcagtcttacttgtggcgcacctaatccaaattctggcaggattgaggcttctattgcacgtgatcctaacaatcggattcgtatgactgctattgctggatcaggccacagatatgcacggaatgctgctagtaggtacaaagtaagagaggtctttgctggtggcggatccgcactagttgagtggagactagagacaggacgcactcatcagatccgggcgcatgcaaagtacatagggatccctcttctcggcgacgaaacatatggaggtacccagagcatggcgttatcgctcctgagaccaaggagtccttcgaaatatcacagcggcctttcgaatctgttgtctaaagtggacaggccttgccttcatgctgcatcgcttgggtaggtatcatacaacacaggtatttactattatagtacttcttttatcaggcttctctcttctagtacttataattttatctactctataatagtaatcataagtgaatctatcctataaaatggtactctaatccattttaaattcttttcattttattttcttatttttcactacagaattaccatactgctctatcagttctagcaggaattaaataaactcacgaataactgcaaattactaatatcggtgtgttgcttgtttggatgttattggccggttgagacctgcgaatcacgattctcacgagcaactgtttaaactttcttgtcaagatagatagtgttcttgtatatgtttattttatttggcatgcagatggaaaacgaacaacaaacaagaggatcgctgggacctagtcaggcggttcatgtgaatgatagctattgtgatatatataacataaccagtcagtttgccagcaataaacatgtatttagatattacacttgttgtcttgttgatgcatctgagactacacctgcaatagctagctgaagttatgcattcgtgatgaacagaggtgcgaagggagagatgaaaagaagtgagtcaggttaattgaagtggtgataaatactaaaagaaaataaaaatgattaaaaagtggttggagtattattttaaaggatatgttcacttatgaatactatcacggagaaattaaaattgtaagtactaaaagagagaagcctaataaaatgaatatcataatagcaaaaagctcgaaacatgtatgat

SEQ ID NO: 58041 - DNA, 1664 bp, Zea Mays
ctatcctctccctcagtgctcacgtctccaccggtccaccccctcggcagctcaatggcagctgcgacggcgccaccgccggcggcggttgccaccaccctctcgggcctcatgcgctgccagaacatccgtagcagcaggcctagagccttctacgcgaggtgcgcctcctccaacgcgagcgcggaggcggcggagagccggaagggaggccacggcgggacgcgcctggaggaagccgtgcccgtcggcgaggggcgctcgagggtagacgcctggatatcggcgcgtctcggcggcgggggcgttagccgcgcgcgcgtgcaggccagcatccgggccgggcttgtcgccgtcaatggccgcccggtctccaaggtttcgcatactgtgaagggaggggacttggtcagctgcacggtgtcagagctacagccgctgagggcagaggcggaggacatcccgctggacatcgtttatgaggatgaccatgttcttgttgtcaacaagccggctcatatggttgttcacccggcgccaggaaatgccaaaggcacattagtcaatgctatacttcatcactgcaagatctccacatttacctgtttagcacgcagctcagctggtgatgaatgcccggattctacggatgaagacactgatgtatttcatgtggatcagtttgctgctgaagatgtaagttcagaagtccggaatgctcttgtgcgccctggtattgtgcacaggctggataaggggacaagtgggcttcttgttgttgctaaggatgagcattctcatgctcgattagcagaacagttcaagctgcatacaatccgtagggtatacatcagtcttacttgtggcgcacctaatccaaattctggcaggattgaggcttctattgcacgtgatcctaacaatcggattcgtatgactgctattgctggatcaggccacagatatgcacggaatgctgctagtaggtacaaagtaagagaggtctttgctggtggcggatccgcactagttgagtggagactagagacaggacgcactcatcagatccgggcgcatgcaaagtacatagggatccctcttctcggcgacgaaacatatggaggtacccagagcatggcgttatcgctcctgagaccaaggagtccttcgaaatatcacagcggcctttcgaatctgttgtctaaagtggacaggccttgccttcatgctgcatcgcttggatggaaaacgaacaacaaacaagaggatcgctgggacctagtcaggcggttcatgtgaatgatagctattgtgatatatataacataaccagtcagtttgccagcaataaacatgtatttagatattacacttgttgtcttgttgatgcatctgagactacacctgcaatagctagctgaagttatgcattcgtgatgaacagaggtgcgaagggagagatgaaaagaagtgagtcaggttaattgaagtggtgataaatactaaaagaaaataaaaatgattaaaaagtggttggagtattattttaaaggatatgttcacttatgaatactatcacggagaaattaaaattgtaagtactaaaagagagaagcctaataaaatgaatatcataatagcaaaaagctcgaaacatgtatgat

SEQ ID NO: 58042 - DNA, 1695 bp, Zea Mays
ctatcctctccctcagtgctcacgtctccaccggtccaccccctcggcagctcaatggcagctgcgacggcgccaccgccggcggcggttgccaccaccctctcgggcctcatgcgctgccagaacatccgtagcagcaggcctagagccttctacgcgaggtgcgcctcctccaacgcgagcgcggaggcggcggagagccggaagggaggccacggcgggacgcgcctggaggaagccgtgcccgtcggcgaggggcgctcgagggtagacgcctggatatcggcgcgtctcggcggcgggggcgttagccgcgcgcgcgtgcaggccagcatccgggccgggcttgtcgccgtcaatggccgcccggtctccaaggtttcgcatactgtgaagggaggggacttggtcagctgcacggtgtcagagctacagccgctgagggcagaggcggaggacatcccgctggacatcgtttatgaggatgaccatgttcttgttgtcaacaagccggctcatatggttgttcacccggcgccaggaaatgccaaaggcacattagtcaatgctatacttcatcactgcaagatctccacatttacctgtttagcacgcagctcagctggtgatgaatgcccggattctacggatgaagacactgatgtatttcatgtggatcagtttgctgctgaagatgtaagttcagaagtccggaatgctcttgtgcgccctggtattgtgcacaggctggataaggggacaagtgggcttcttgttgttgctaaggatgagcattctcatgctcgattagcagaacagttcaagctgcatacaatccgtagggtatacatcagtcttacttgtggcgcacctaatccaaattctggcaggattgaggcttctattgcacgtgatcctaacaatcggattcgtatgactgctattgctggatcaggccacagatatgcacggaatgctgctagtacaaagtaagagaggtctttgctggtggcggatccgcactagttgagtggagactagagacaggacgcactcatcagatccgggcgcatgcaaagtacatagggatccctcttctcggcgacgaaacatatggaggtacccagagcatggcgttatcgctcctgagaccaaggagtccttcgaaatatcacagcggcctttcgaatctgttgtctaaagtggacaggccttgccttcatgctgcatcgcttggattcaagcacccacgttcaggaaaggtccttgagttctcgtgccccccgccagatgatttcttggaggtgcttggtgaattgcgacgtgttacgtctaggtccagtgatgccccaaatggtgatggtgttttccggtgagggagatggatagaaccaaggctgaggatgtggaacaagacatgggaacccttggagatttgttccaggctcctagaaagagaaaagtgtttcgtacgagttttcctgatggctggtggaagtgagagggaaatgagtaggagaatctgtatgctttcggctgggctcatcagtacacacgcatttgttttgggctccgattcatgggcttccagcaggaagaacttcacgggattcgattgatcgattcttcattcttttcttttcttttttttctcctactacagttgcccgccaatgctcggcgagcaaagaggcc

SEQ ID NO: 58043 - DNA, 631 bp, Zea Mays
cgggattcccctccgccgcctacgcgcccaacacgcccccgtccagattcatccacccttccccttcgtctccctccctccatccaatccaccccctctcccccttctcgtcgtcgccgccgccgccgcccatccggggcttggactgtcctttccccgttctgctggactcctggcggtgtttatggtctctcctttccagagacatgctgtataaactgctagcttttctatgtaggactgcatctggttcaaactgctatactgctatgttagtatgtcactgagtttgtcgcccatgatgcttctatggtgtctgaggcgattcaagtttgttagctctaaagctgacaggacatcctcgtttactttgcctagtttccagacggtctatgatcaagtgcagaactgaaccggatcgtaaggagttgaacatgaacttgttaaaatctggcatatgtagatgcatggatcgcgaaatccctcgtgtaggtgcagtgtccctcttctgctatgtgcgagatctgagggaacctggattcatttattgtttgaatgtttcactgtttctgtcgcaagtaaataatttattgcatgggaagtttataactctagacctggtaaaattctg

SEQ ID NO: 58044 - DNA, 2683 bp, Zea Mays
gcgacgaactcatcactgcactggtggtgtccgtggtgctccacagagtgaagcgatatccaggagaggcgacgatgcgcaagtgggcgctctcctccacgctcctcctcctctttctcctcaccacactccccgacccagctaagaagctacaagtgaatgccgaggagagcagccatgacttggctaacccaccgaaggtagaggagaagtttggtgctgtccctcatggcctgtccaccgactctgaggttgcccagagggaagccgagtctatctctaggaagactctcaggagctcagccgagaagtttgagttccaagctgaggtttccagactcatggacatcatcatcaactcactctacagcaacaaggatatcttcctgagggagctcatatctaatgcctctgatgcgttggataagattaggttcctttcccttactgataaggaagttctgggtgaaggggacactgcaaagcttgagattcagattaagttggacaaagagaagaaaatcctctccattcgggataggggtattggtatgaccaaggaagatcttattaagaaccttggaacgattgctaaatctggcacttcagcttttgtggaaaagatgcagtctggaggtgacctcaatcttattggacagtttggtgttggcttctactctgtgtacttggttgctgactatgttgaagtggtcagcaagcacaatgatgataaacagtatgtgtgggaatcaaaagctgatggatcatttgccatctctgaggatacatggaatgagccccttggccgtggaactgagataagattgcatctgcgagatgaggccaaggagtacttggaagaggataagctaaaggatttggtgaagaagtactctgagttcatcaacttccctatctatttgtggtcgaccaaggaggttgatgttgaagtgccaactgatgaggatgagacaagtgaagaagaggattcaactccagaaactacagaggaagagacagaagaagacgaagagaaagagaaaaagcccaagaccaagacaataaaggagactacttctgagtgggaacttctgaatgatgtgaaggctgtatggcttcgcagcccaaaggaggttaccgatgaagaatactcgaagttttaccattcactagccaaggacttcggtgatgacaagcctatgggttggagccacttcactgccgaaggagatgttgagttcaaagctttgctctttatccccccgaaggctccacatgatctctatgagagttactacaacagtaacaagtcaaacctcaagttgtatgttaggagagttttcatctctgacgaatttgatgatcttcttcccaagtacctgagctttttgaagggtattgttgactcggacacgctgcccctgaacgtgtcacgagaaatgcttcaacaacatagcagtctcaagaccatcaagaagaagctgatccgcaaagcccttgacatgatcaggaaacttgctgaagaagaccctgatgagtacagcaacaaggataagacagatgaagagaaaagcgagatggaggagaagaagggccagtacgccaagttctggaatgagtttggcaaatcaatcaagctgggtatcatcgaagacgcgactaacagaaaccgccttgcgaagcttcttagatttgagagtaccaagtcggatggcaaacttgcctcccttgacgagtacatctcacggatgaagtcagggcagaaagacatcttctacatcacgggaagcagcaaagagcagctggagaagtctccattcctcgagaggctaaccaagaagaactacgaggtcatcttcttcaccgaccccgtggacgagtacctgatgcagtacctgatggactacgaggacaagaagttccagaacgtgtccaaggagggactgaagctgggcaaggactcgaagctcaaggagctcaaggagtcgttcaaggagctgactgactggtggaagaaggccctggagagcgagaacgtggactcggtgaagatcagcaaccggctgcacgacaccccctgcgtcgtggtcacctccaagtacgggtggagcgccaacatggagaagatcatgcaggcgcagaccctgtcggactcgagcaagcaggcgtacatgcgcggcaagagggtgctcgagatcaaccccaggcaccccatcatcaaggagctccgcgacaaggtcgcccaggacaacgaggccgaggagcagccggaggtggaggagaaggagccggagccggagccgtcgtcctacgacaaggacgagctttaggctttcggatttgttttcaagtctagctagctcccgctttactaggaatgtgatgatatcggtgactgcctggttcaagtcacgtgatggttcttgagagacgcccatttttttcccatgcaacgtgatacgggatttttgcctgtctttgtacctactctacaagctttagttcagtgattcagtctaattaattagtggtttgcagttaccttgcaatcttcctaagactgtcttcaacgcttccctctactgcttcccctcgctacttcagcggctacagttgaacgctaaatgtcacaggttctctctacgagcccctctacccggtagcattcttccctctccctcta

SEQ ID NO: 58045 - DNA, 2703 bp, Zea Mays
gcgacgaactcatcactgcactggtggtgtccgtggtgctccacagagtgaagcgatatccaggagaggcgacgatgcgcaagtgggcgctctcctccacgctcctcctcctctttctcctcaccacactccccgacccagctaagaagctacaagtgaatgccgaggagagcagccatgacttggctaacccaccgaaggtagaggagaagtttggtgctgtccctcatggcctgtccaccgactctgaggttgcccagagggaagccgagtctatctctaggaagactctcaggagctcagccgagaagtttgagttccaagctgaggtttccagactcatggacatcatcatcaactcactctacagcaacaaggatatcttcctgagggagctcatatctaatgcctctgatgcgttggataagattaggttcctttcccttactgataaggaagttctgggtgaaggggacactgcaaagcttgagattcagattaagttggacaaagagaagaaaatcctctccattcgggataggggtattggtatgaccaaggaagatcttattaagaaccttggaacgattgctaaatctggcacttcagcttttgtggaaaagatgcagtctggaggtgacctcaatcttattggacagtttggtgttggcttctactctgtgtacttggttgctgactatgttgaagtggtcagcaagcacaatgatgataaacagtatgtgtgggaatcaaaagctgatggatcatttgccatctctgaggatacatggaatgagccccttggccgtggaactgagataagattgcatctgcgagatgaggccaaggagtacttggaagaggataagctaaaggatttggtgaagaagtactctgagttcatcaacttccctatctatttgtggtcgaccaaggaggttgatgttgaagtgccaactgatgaggatgagacaagtgaagaagaggattcaactccagaaactacagaggaagagacagaagaagacgaagagaaagagaaaaagcccaagaccaagacaataaaggagactacttctgagtgggaacttctgaatgatgtgaaggctgtatggcttcgcagcccaaaggaggttaccgatgaagaatactcgaagttttaccattcactagccaaggacttcggtgatgacaagcctatgggttggagccacttcactgccgaaggagatgttgagttcaaagctttgctctttatccccccgaaggctccacatgatctctatgagagttactacaacagtaacaagtcaaacctcaagttgtatgttaggagagttttcatctctgacgaatttgatgatcttcttcccaagtacctgagctttttgaagggtattgttgactcggacacgctgcccctgaacgtgtcacgagaaatgcttcaacaacatagcagtctcaagaccatcaagaagaagctgatccgcaaagcccttgacatgatcaggaaacttgctgaagaagaccctgatgagtacagcaacaaggataagacagatgaagagaaaagcgagatggaggagaagaagggccagtacgccaagttctggaatgagtttggcaaatcaatcaagctgggtatcatcgaagacgcgactaacagaaaccgccttgcgaagcttcttagatttgagagtaccaagtcggatggcaaacttgcctcccttgacgagtacatctcacggatgaagtcagggcagaaagacatcttctacatcacgggaagcagcaaagagcagctggagaagtctccattcctcgagaggctaaccaagaagaactacgaggtcatcttcttcaccgaccccgtggacgagtacctgatgcagtacctgatggactacgaggacaagaagttccagaacgtgtccaaggagggactgaagctgggcaaggactcgaagctcaaggagctcaaggagtcgttcaaggagctgactgactggtggaagaaggccctggagagcgagaacgtggactcggtgaagatcagcaaccggctgcacgacaccccctgcgtcgtggtcacctccaagtacgggtggagcgccaacatggagaagatcatgcaggcgcagaccctgtcggactcgagcaagcaggcgtacatgcgcggcaagagggtgctcgagatcaaccccaggcaccccatcatcaaggagctccgcgacaaggtcgcccaggacaacgagagcgaggagctgaagcacacggcgaggagcagccggaggtggaggagaaggagccggagccggagccgtcgtcctacgacaaggacgagctttaggctttcggatttgttttcaagtctagctagctcccgctttactaggaatgtgatgatatcggtgactgcctggttcaagtcacgtgatggttcttgagagacgcccatttttttcccatgcaacgtgatacgggatttttgcctgtctttgtacctactctacaagctttagttcagtgattcagtctaattaattagtggtttgcagttaccttgcaatcttcctaagactgtcttcaacgcttccctctactgcttcccctcgctacttcagcggctacagttgaacgctaaatgtcacaggttctctctacgagcccctctacccggtagcattcttccctctccctcta

SEQ ID NO: 58046 - DNA, 1935 bp, Zea Mays
agattaagttggacaaagagaagaaaatcctctccattcgggataggggtattggtatgaccaaggaagatcttattaagaaccttggaacgattgctaaatctggcacttcagcttttgtggaaaagatgcagtctggaggtgacctcaatcttattggacagtttggtgttggcttctactctgtgtacttggttgctgactatgttgaagtggtcagcaagcacaatgatgataaacagtatgtgtgggaatcaaaagctgatggatcatttgccatctctgaggatacatggaatgagccccttggccgtggaactgagataagattgcatctgcgagatgaggccaaggagtacttggaagaggataagctaaaggatttggtgaagaagaagaagacgaagagaaagagaaaaagcccaagaccaagacaataaaggagactacttctgagtgggaacttctgaatgatgtgaaggctgtatggcttcgcagcccaaaggaggttaccgatgaagaatactcgaagttttaccattcactagccaaggacttcggtgatgacaagcctatgggttggagccacttcactgccgaaggagatgttgagttcaaagctttgctctttatccccccgaaggctccacatgatctctatgagagttactacaacagtaacaagtcaaacctcaagttgtatgttaggagagttttcatctctgacgaatttgatgatcttcttcccaagtacctgagctttttgaagggtattgttgactcggacacgctgcccctgaacgtgtcacgagaaatgcttcaacaacatagcagtctcaagaccatcaagaagaagctgatccgcaaagcccttgacatgatcaggaaacttgctgaagaagaccctgatgagtacagcaacaaggataagacagatgaagagaaaagcgagatggaggagaagaagggccagtacgccaagttctggaatgagtttggcaaatcaatcaagctgggtatcatcgaagacgcgactaacagaaaccgccttgcgaagcttcttagatttgagagtaccaagtcggatggcaaacttgcctcccttgacgagtacatctcacggatgaagtcagggcagaaagacatcttctacatcacgggaagcagcaaagagcagctggagaagtctccattcctcgagaggctaaccaagaagaactacgaggtcatcttcttcaccgaccccgtggacgagtacctgatgcagtacctgatggactacgaggacaagaagttccagaacgtgtccaaggagggactgaagctgggcaaggactcgaagctcaaggagctcaaggagtcgttcaaggagctgactgactggtggaagaaggccctggagagcgggttcaacctccccgaccccaaggagttcgcgtccagcatctacaagtcggtgcagaagggcctggacctgagccccgacgcgaccgtggaggaggacgaggccgaggagcagccggaggtggaggagaaggagccggagccggagccgtcgtcctacgacaaggacgagctttaggctttcggatttgttttcaagtctagctagctcccgctttactaggaatgtgatgatatcggtgactgcctggttcaagtcacgtgatggttcttgagagacgcccatttttttcccatgcaacgtgatacgggatttttgcctgtctttgtacctactctacaagctttagttcagtgattcagtctaattaattagtggtttgcagttaccttgcaatcttcctaagactgtcttcaacgcttccctctactgcttcccctcgctacttcagcggctacagttgaacgctaaatgtcacaggttctctctacgagcccctctacccggtagcattcttccctctccctcta

SEQ ID NO: 58047 - DNA, 663 bp, Zea Mays
gacgctggcatgtgggtcctggtccccaaccgctcatcccgaactcgtgtatcggtctcccctaaccactgacctgcgagaccgctttgtcagcgaacaccgcgcgcgcctgaaccaaattcctcgctggctcatggatccgcccctgtcaggtcattctccttgctctgtttgttgcgagctccgctagatctccgccgctcgcgcatgtcgaccgtctcgagcctgcgctcatcccctcgcatctataaaacctcgatcccgctattcccatccaaatcggacacctgtcgcccaacccctattgcagaccgccatggagggagaaggaggaaaccgcggaccatcacggcggttgtcgggggatcacggtgcctcaacggtttgggcctcgaaataacatctagggatgatctccagaccccgtggatgttgtacgcgcgcttgattcgaacaaaggttggccgggacccaggtaattggtcaccggagatcgtgttccaccgtggagccacacgctgcagcgagcgtgtgtctgtgcacgatgaatctcgaacaagaggaagaatccgtagtagaggaggaagttgtctctcagaccgagaatcctccggtggagaacaatttttacttcgacatctgcggtgtggaaacagaatctcc

SEQ ID NO: 58048 - DNA, 1063 bp, Zea Mays
gcaatactgtgaaagaagtgcctggcagattacaacaattcgagtcacgggggcatggtctaggtttttcgacatatagctctgctagtgtctgggagcttgagttatgcgcccttggtggtttgtttattcttatcataccttagttgcctcttgtgatggagaatgatgttattgctcgctattacggacaaggcaaggggattgttgttaaggctatatacgatcgcgaggcaacaccctacaacttctatgtgtagtcctttggctcctaatagttagcccatgttttcacttagataggataatatatcgtccaatgtttctttgccttcatgccactattttctttgccttgatgccaccagtttaattttgtgaagctcgttaattcgatcggattgtgagattgtgtatgatctcacagttataatcgtctacactattatattgtaacctacatggaaatggatggagcatagcccaacactaccattgaaatacaggacgatgactctattccatagtataatgagttaaggcagaggctggtctaagaaattaattcacttgtgccaccagtaaattatcttgctaaaacattagcctataggattattatttgcatagcagtagggttacagaggtaattcctcaaatcactgatgtcacagcctgaaaggacaccactgagtgcagtgtggatctgcccctaagttaaggtgttgttgtctcttttttctttttctctaaaatgacataggaaatatctcatttgccgactatgttgggttccactggcttggctttattttcgcataatgcctccatatccatatgtgcttgtttcaactgcaaagaatatgtagatatctaaacagggctaggaaatgatgatagattcacttgaactatgttatgtaaatgagatggcctacatagtaaaaacctaccttcagaattatttttctcatcattgcttaagtacctaccgatgcagcataagtaaaagtaaaactatgcggaaagctacgaatgtcctctgaccacagtttaatctgta

SEQ ID NO: 58049 - DNA, 1065 bp, Zea Mays
attcgagtcacgggggcatggtctaggtttttcgacatatagctctgctagtgtctgggagcttgagttatgcgcccttggtggtttgtttattcttatcataccttagttgcctcttgtgatggagaatgatgttattgctcgctattacggacaaggcaaggggattgttgttaaggctatatacgatcgcgaggtcacctggaaccaactaggcacacgagttaaccaattatctaacaataccttacttgcagagttgttgcttactacacccgataggtcgcacgaagtgggattttctatgggaactgctaaccgacaaggtggattggtttgctaaaaaaatgtgcaccaataacttcacgatattagctatgcatagtgacatgccccaacaagaaagggatgtaattatgggtgagttttaagtctggcgcaactcatgtgctgataactacggatgtttgggctcgaggattggacgttcagcaggttatcgaaggcttgtgaacatgtcgtgaactttacatccatcgcattggttgttctgaccgttttggaagcaagctgaagaagatgcaccaagaaaagcagctggacacacttgtcgacaagggcctggagagcaaatatgaccgcattgagctagaggagatggtgcaagtggcgcttctatgtactcagtccttccctggtcacaggaccaagatgtcagaagtggtcaggatgctggagggcgatgggcttgcaaagcagtgggaggcatcacaacacacaaaagagtcacacaaattcaaggtgcccaatttttccttcagtcgctgccactctgacctgatgggcgattcgtcactgctgttgcaagcagtggagctttctggacccagatgcggcctgaacatgtttgcacattatgtggcacacactttctttttactactactttcaggatgagcatgtaggaatatttgacctttctggaagcttttagagttgggtcaaaatgatgtgtgtattctttctttcttttaattgccatctgctctcttttttgttaccata

SEQ ID NO: 58050 - DNA, 1112 bp, Zea Mays
ggtctaggtttttcgacatatagctctgctagtgtctgggagcttgagttatgcgcccttggtggtttgtttattcttatcataccttagttgcctcttgtgatggagaatgatgttattgctcgctattacggacaaggcaaggggattgttgttaaggctatatacgatcgcgaggtcacctggaaccaactaggcacacgagttaaccaattatctaacaataccttacttgcagagttgttgcttactacacccggtcgcacgaagtgggattttctatgggaactgctaaccgacaagggtatcaaacaattctttgttgctgttaagaaagaggagtgaaagtttgatacgctttgtgatctttagggtggattggtttgctaaaaaaatgtgcaccaataacttcacgatattagctatgcatagtgacatgccccaacaagaaagggatgtaattatgggtgagttttaagtctggcgcaactcatgtgctgataactacggatgtttgggctcgaggattggacgttcagcaggttatcgaaggcttgtgaacatgtcgtgaactttacatccatcgcattggttgttctgaccgttttggaagcaagctgaagaagatgcaccaagaaaagcagctggacacacttgtcgacaagggcctggagagcaaatatgaccgcattgagctagaggagatggtgcaagtggcgcttctatgtactcagtccttccctggtcacaggaccaagatgtcagaagtggtcaggatgctggagggcgatgggcttgcaaagcagtgggaggcatcacaacacacaaaagagtcacacaaattcaaggtgcccaatttttccttcagtcgctgccactctgacctgatgggcgattcgtcactgctgttgcaagcagtggagctttctggacccagatgcggcctgaacatgtttgcacattatgtggcacacactttctttttactactactttcaggatgagcatgtaggaatatttgacctttctggaagcttttagagttgggtcaaaatgatgtgtgtattctttctttcttttaattgccatctgctctcttttttgttaccata

SEQ ID NO: 58051 - DNA, 1813 bp, Zea Mays
atcttcggatctcttatgaatacctaacaccactgcaagcagcaataggagttcttcagaaggtaagtgtatctggcttctgcagttacgttattagcagctcaaaggatataacctgatggagtccattctatcgatacgtgtagaagccattgtagtattttaggaaacggcatgtccatacacctgggaatagggagcagtgcagttctttaggataatagtcttttagaagtatgccaacctttgctctttcaggaagggccatttagatactgggccatcgtcaatgttgtggtttttattgatagattatatatacatgagattatatgaacaagttctacaataagggaataggttggtgagtaagcagtttcttccagaaccttatacaacatgtacggatgtgctaatagcttggccctttgttagaattaagactccattggcattgtcctttgatttattattgtttttagcttaccttgttatttaagactccagctattctttgtcttaaatatactagaataatatattctttgtcttgagctacctgcttatcatgttgtctctttttagagttcttaagatcgacccattttttttaatatttcacattccacttctactataagacaacaacacttttgtggtttcagagttcttaagatcaacacacctacttttgcattgggagttacagactaatcaacagatctatgtagttgtagtgacgatgctcctccaaaattagatattcaatttgatctaagcagtgaacccgcatgttcacttcacttagaagcatagtaccaaacttgtataagcaatactatccaggactggtagacctttgatagctagctctcaactgaaccaattaggacccttgtgaagtgtgatgggctcaccctagaggtcaaatgccattgagagttatgctttgaactattttggtgtcttttttgctactaagttttatagtgtcacatttgtagggtatcaaacaattctttgttgctgttaagaaagaggagtgaaagtttgatacgctttgtgatctttagggtggattggtttgctaaaaaaatgtgcaccaataacttcacgatattagctatgcatagtgacatgccccaacaagaaagggatgtaattatgggtgagttttaagtctggcgcaactcatgtgctgataactacggatgtttgggctcgaggattggacgttcagcaggttatcgaaggcttgtgaacatgtcgtgaactttacatccatcgcattggttgttctgaccgttttggaagcaagctgaagaagatgcaccaagaaaagcagctggacacacttgtcgacaagggcctggagagcaaatatgaccgcattgagctagaggagatggtgcaagtggcgcttctatgtactcagtccttccctggtcacaggaccaagatgtcagaagtggtcaggatgctggagggcgatgggcttgcaaagcagtgggaggcatcacaacacacaaaagagtcacacaaattcaaggtgcccaatttttccttcagtcgctgccactctgacctgatgggcgattcgtcactgctgttgcaagcagtggagctttctggacccagatgcggcctgaacatgtttgcacattatgtggcacacactttctttttactactactttcaggatgagcatgtaggaatatttgacctttctggaagcttttagagttgggtcaaaatgatgtgtgtattctttctttcttttaattgccatctgctctcttttttgttaccata

SEQ ID NO: 58052 - DNA, 667 bp, Zea Mays
ccaatacatcatcaaggtgaggcccggtcgcttgtctaaacctcctcctgatgaaactcccatcctgccgagcgagtggagtttctatgcgcataggtgaggagggacctgaagcttctgctcggtgccggccttgcggaggacctcaacgttgtgttcccaattcacaattttcacttgctttggggatatttaccaaaaaaatctccaatttaacccaatgtttaattggttgttacattacacgctggagagtttgctgctggcagaagcctgcattgttgcttaactgggctcctggtgacgaggtggtctactacttcgtactacctgcaagcaatagcgtggatgatttttagtctttcaatgctaaacttcatgaccattagttctcctgtccacaagctgacgccaaggaactgaaggaccaaaggatacagggttatccactaatcttaaatcattattttctcaacgttgtaccagtatacttttgcctctattaaatgttaatatatttgttaaatattaatatatttatatttgattagtttgactatttgagatttagaatttgtcaattgattgcccatgtgctatgaattgagatatatagcagctaagatacaatgacttcctaccagtgccaatatgtagcaaaataaat

SEQ ID NO: 58053 - DNA, 1273 bp, Zea Mays
agaccaccgagatgcttcaagcttcaagtatcactcactcactcctgccgtcacccctagctgcatcggatggcgatcgtacggacaggataccacgacgaacggaacctacgccggctgcgaacgcgaatctgaatacaacgagaaatgggttccagaagctggagaagatcaaggatgccaaccgccgcagcaggcagcttgaagagcttactgataagatgcgagactgcaagagactcatcaaagacttcgagcgagttagcaaagctgaggctgagcatactgatccagcaacagcaaaaatgttgcatgacagaaagcagtcgatgatcaaagaattaaactcctacgttgctctaaagaaacagcaggcaagtgaaaacaagagaatcgatctttttgatgggccaagtgctgaagatggctttggtgaagaaaatgtcctgttagcatcaaatatgacaaaccagcagttaatggatcaaggcaatcaactaatggatgaaactgatcaagctattgcacgatctaagcagactgtccaagaaaccgtcaatgtgggcacagaaactgcagctgctctgaaagcacagacagaacaaatgagcagagttgttaatgagttggattccatccatttctccatcaaaaaggcatctcaattggtgaaagaaatcggtcgacaggttgcaactgatcgatgcatcatggccatgctttttctcattgttgctggagtcatagctataataattgttaagattgtgaacccacacaacaaggacattcgcgacatccctggcttggcaccacccgtcagcaggcggctgttgcgatagaggacaggtgaattgcatacctggtgtaaaaattgatgtggcgcggcgccttggcaagcccatctgtattctacgtcttgtaaaacgctgctccagtcatgtggtatattgctgtaaaacttctcatgggatccactcctactccttggctacacacagtgcgtatatgttcctcctagttcgccttcctgtttttgcaaaactaactctgaacggtgttctgttagaatcatgtgcacacatgatggttgagatgtgtctatgatgttcattgtgacgaacgattcttaaaaatctcatcggctttagttgaattgaacacatggttgagttgagttgaacacatggttgagcataatatatttcttatgatgagtgatcctcaaggaggatcagctttagttgagttgagactaattttgacgcgagtg

SEQ ID NO: 58054 - DNA, 1971 bp, Zea Mays
gtcgacacgttactcctccggtatgttaagttagagctagagatgccttgcctgcagatcttgttcttcacttcttgggaacatgaatgcagcgtgcgtatatacataagtgaagcttgatttccttggtatttaatcttgtggtattggtatacaagtctctacactactaccatgtcaaaacctagaagagagtaggagggtgtttggtttctatggactaatttttagttcctccattttattccattttagtccctaaattactaaatatggaaactaaaactttattttagtttctttatttaacaatttagaaactaaaatagaataaagtggagggactaaagtttagtccctataaaccaaacaccccctaagctagatacatacgtcatatatacatgtataagctacatcagtatgtatgctgttaaggcattattgacaccgatctattcattggttttgcatggtgtaaccttattgctacagtttaattactctgtttataaaagaatacaatcctcgtttttttaaagtcaaatagtctaaactttaaataagtttatacaaaaaatataaacattcataatatagaataataaatatcattatattattagttatagaatatgcatgcttttagaataaattaaacgtgatcaaaattgactagaatcaattgtcacgaataccatagttaaattgagctagatatattgatcgcacgaatatttatttttttaatagacccaagaagtaccattgaagcatctagatcttaattacctctgtttgctgtttcaaccctccatgcgcgcgcgtgcgtgctgtcccatgctcttattattttttgtgtcgagaatcgagatgctttacaacgactctggagacttggcaacatgttaagcgcatgctggtgtctccgatgcctccaaatccctaaagattctcttgctaggtacatggtgcacacatagctagctgttgtttggttcatatgagtataacgtgatggatatgttaaatcgtgtttgttttaagtctaaccgtaataagatacgccggaaacgaaaataattattaccgctatgaatcattatccctgtcatttatgttaccgtccataaaccaaacaacaccttattgttgtcttggcaataggatttctttcgcatcatttctgccaaactcagttgctgatctcgtttccccccacaaaacacacgtcgtctcgcttcatttttatatataggagcagtcgctaataagtatatttttatgtatgttgatatgtcttggggaatctataataataatgttaggatgaatgtattgctacatcgatatatatatatatgatggtgcaattgttattgttagcatgaaatatcagtcatccgctcccttcctcgttcacaagcaatgcagctacctgatgagatcaagattagactagcactaccggtttgtggtttctaaccccttgttacttctgcaaagagaaaagctggcacagtggtgaggtttttctaacaccgcctgattgttcaaatccagcaataataatgacatcaaacatctatcactgccccggccctctaatttcacggtgatatcctcaaggtcactgtcgcggtttagggctacggccgatagcgcatgtaacaaagagtttgccgaatgtttttcggtctttactgaataagtcgaaacacacggcaaatcaccatatactactactacgtttatagcacgtactatctcagtggcgatgggtgaagtggactgtggacagtgtcaaacaaaatacacactggctggcagtggcagcaggaagcaatgctctgcatgcattccatatctacgtatgtcagacgcccacacagacagatcgacagggagacaagctataggaaaaaagtaccagtaccagtaccagtaccactggctggcagtggccccttt

SEQ ID NO: 58055 - DNA, 789 bp, Zea Mays
ctgactttgcccagtgccttcggctatggcagatttgttatcaacaaggagttttactttcggagcttgaattcccagcagttcacccaatagacgactgagccaaatgccttggcatgcagcatttgcactagctatgtactcagcctcacaagaagatagggcgactactctttgcttctgagacacccaagttaccagattcattcccacaaagaacactgagccactggtactcttcctgtcgtcaatgtcaccagccagatcgctatcactgaaacctagtaactttggttcagacaagcctgatctggtgtatctgcacccaaaattcagagttccagctatgtaccgaagtatctgtttgactgccgcccaatgactcgcccttggcttctccatgtacctgctcactatccccacagaatatgcaagatctggtcttgtgttcaccaagtatctcaaactcccaatcacactcctgtactttgttgcatcaaccagagaagacttatctaccttgctcagctttaacttgttttccattggaacatagcagggattgcacccactcattccagcctgttctagaatttttttgcataggaactctgacacaaagttgtctctctctctttctgatctacttgtattcccaagtaatatgtgagcagcccaaggtcactcatactaaagcttttcatcatttgtcgcttgaatacagcaatgctgtcctggctcggccctgtaatgattaatcatccacatatactcccactataagaaaat

SEQ ID NO: 58056 - DNA, 920 bp, Zea Mays
tatgcctagataattcaccactaatattttaactaaaactaagcctaactctataactggcattttaaatctgttgctttgttgcttctagataattcaccactaccattgaatagtggtatgccaatctataaatctataaaatgccactaccattgtaatgtggatttccttccacgccgcgggacgcaaagcttatagttcacaaccaactgaaagtatcaagacggatgaatagtgaagcggtaggcagtaacttcacctgaatgacccacatgctcagaaaagcctccagccagaacaatgcaaatccaatgaagtagaagattaggaggtcaaaaataataggcagtgacttgcttttgatgtttgtttcatttgtcttttcaggaaatataggtacaatcatatcctgtggaattctggtttagtggactcagactgaataatagcggtagactcactcacccccacaatgacgatgtcgcctatcaagctgattgctgggaaaatcccactgcatgatgggtagattggtggaaggaaatcccattacaattcagattcacgagttttcaagaaagaaagatgtagaaacaatagtgagaggtgcaaaaagtaaaaatataacttacattaacgttttccccacaaagagaattgaagaagaaacaactacatacacgcagaagacgatatgaacctgtgtggggtcagcataagcatgaacatgtgtgttatctgaacatgtgtgttctggaaccacacttccacctgcctggcgatgagatccaactgccgtgcgagctcctgcttctatacagttttggatagctcactacccatctccatggttcgcaagcacagatgaattatttcagtttgcagcaaaaaacagatgacttcagtatcatcaacct

SEQ ID NO: 58057 - DNA, 4189 bp, Zea Mays
agcaagcgaaaaaaggcagtgtcgcttctcttatcggcgtcgaccccccttctccactcgcaaccaaaccctcgcatcgtacagcagccgcaccaaatctcaccgccacctccgggtccggggactcaagcgccccgccgccgccgctgccggggaccacgaaaggacgcgccgaccccggatctgcgactcgccggtctccgaacgcacgctactgaacggacgcggggcttggctgctcgatcgcaccgcccgggaaaaaaagggagagcccgccggatttaaccggacacaccgaacgcgcagctcctccgggccaggggccggacagaatccatgcagccgaggtcccgcattcggggccgcgacccgccgccgccgccgccgccaggaggacgctaccgtcgccgatccccgccccctccatcaccgcgccaccagcgccgcccacgtgatccgccccctccacagcggaagaggcgcagctccgagctgcccccgccacggcgatacgaggaggatcctctccttaacggcttcgcccccgctgccgagaggcgttcacgcggcgacatcctgctcgaggccggccgtctggccgctcactacttggttgccaaaggcctcctctccgagcaccttctcctggcaagggaggacccaaatcacaatcccatttaccgccctgagccccccgctcccgctcccgctcctcctccgactctagctccctctagttacgggaggaagagagacgaggacgacggcccgaggtggcggcggagtggaagtggagccgaggaccaggggcgtggctcaaggtgggacgacgacagggaagccaagaggtcggggtgggacaggaggagccacagctttgatggaaggcgtaaatgcaacgatgacggtggcggtgatgctgaccgtagcggccgccggacacgcgactacgatgagtcgaagagaccaccgatgtcaaggtcctattcgcataacgatcgttgggcttcagctgatgccagagtagatcgaaggaggagaagtaggagcaggaccaggagctactacagtggcagcaggagagatccagatttgctagcaggcacccgtgatttggatcgcaccaaggtgccagactctggcattgttcctgctgctggtggtgatggaggcgtgcacgatgcggatgccgatggaacacgaaagcagctgaaggttcctagttcaatgttggtttcggagatgaatgacagtgctgtcgaagctgcgcctatagaagaggatcatgctcaagacatgtctgaaggtgaggacggtgagtttgcagaagagatttctgaagacgaggatggtgagtttgcagcctctgatttgaatgatgaagatggtgatgaaatggatgacacccaaagacaaccgtctcacatgcatgttcatgcatctgaatctatcgaggaacctgtccatagacagtcccagctcagcaatgctgaagagggaatggaaactggcattgcacacgtggatgcatatatggtagagccattggcagagaacaatgttttctctgaaacaaggtatgaaatggaggctccacaaaatggagctgaaactgctgttgttgatctttacagagatgcagaagagcaaccattgacagagaataatgattgctccgaagcagagaatgagatgaacaagagtgagtttgaaactggtgttggcaatcttgatagagatgaacaagagcaactattggcagagaataataatggctctgaagtaaggtatgacatggaggctccacaaagtgaggttgaaactggtgttggcagtcttaatagagatgaccaagagcagctgttgacagtgactgatggttactctgaattaagatatgaaacagggactccacaaactgaagttgaaactgttattgatgatatcagtagggatgagcaagagctgccagcttggtacaaaatttttgatctcaacgtcattgaaactccattgggctgtgaggtttccgagatttcttgtggtcatccagcagatggtctttgtgattctgtgcctgattcagttggtctggtgaaccaagaagcaaacaatgatacctctgaaattcaaggtcaagatggtcatgcaggggccaatcaagtgttagaagatgagtctgatttgaatagctatgatctgaacaatgaagctgatgaagatgcacaggatgatactttagaaaatcaagttcaagacgagaatgtagaggataatcacttactggaggatgggcatgatttgacgaggtatgatgtgaacaatgaggctggtgagcatgcacatgataaccacctggtgaaaaatgcggaaatacttctaaatcatattatggttgcatgtatatcagataattgccatatgaacaatgagaaaatgcttctaaagcaaaatgtggatgagcaacagatggagaacgagcagatgcttatagatcaggtcactagtgttcaagttttggatagtcaccatgtgcacgatgaacagttgctggtaggtcatgctgcagatgatcatcaccaaatggaaccaaatcccatggctttttctttgggcgttcatgatctggataactactatttgagtagcaagcaaatacttctgtataatgatgcaggaggtatacaccatttgaaggatgggcaaattattttagatgaggctgcagatggacaagctagagttcacaatatgggccatggacgaacgattcctggaattgatctggaagatgattatgcacaggtgtctgccatcagaaatacaggagaatgtctagaatctgcaagtgatacctcgcacgaatacacggataatgttctacaagaacatatgtgttctcaagactagcaaacctcaagttttggtgacaatcctaagactaacacacaagcagcttcttcttcaactgtcaccagattttcaaaactggtgtactggaaatgatgctgtgaaggcacaggtgattcccatttctcagtgatgatgtgttgtatattggattcaacaatatgccattagatatcaccgttcccactgtttttgtggttgcaccacatcagcaggtatataatgttcgagacaacggcgtagatgtatttattttccaaacaagtaatggtggatgggaatgtactcatgagaactataatgtagtggccacaaaccccccatgctagttgtgatgagctttttagtccaaagagtcgcacttctgcattggaatcttacatgtagcatttcaatacacatacaagcacctgtaaatagcaaaggcatggaatttgttctgtaactgaagaaccatgtttatccggaaacagcaaataatggatttatggtgtttttagatgcctgaactccgcatgcttcgataatcgacacatagcatttgactgtgcagtgaaccctgggctatatatctaagtgatgaaaaaatgctgttcattactggatgaacatacatattaacgtgtttccgctatgatataaactggaatctgtttctgaaacgaagtaaccgaatacttgaatgtttattggtttgcacccattagtttgtctatatgttcctgcatgctcaatgactggttcgctagttaatgaacaaaggctctcttttttcttcttggatatctgagaatatgacagtttacttacgtgtacgtggtaactgcattttctgcagcgttgctttccccatcaacaccacttaataacttgtcttcctttatgtttcctcagaacttgtgaatgtctgggacctgccatcctctgagcttgggaaatccttgtgagctctggcaccctgttgtctgtgcattcagatcctaacacaccggaccatgggaggtctgcaccggaccgatcgctggagctagttagtcgactgagcttttcattgacaagtcggtttagtgacacttctgccttcccgagatatagctgcgatgtcagtatgtctcagtagctgaatatgtcatatatttttttaactagaaatgatttgatgggcgttttgtgctgcgcctgcttcagagctctcctgcttttcagtggaactgtcaactgtcaagtgcatagagaacacgcttctcgttgttgcttacacgggagtagcgttgaccat

SEQ ID NO: 58058 - DNA, 4145 bp, Zea Mays
agcaagcgaaaaaaggcagtgtcgcttctcttatcggcgtcgaccccccttctccactcgcaaccaaaccctcgcatcgtacagcagccgcaccaaatctcaccgccacctccgggtccggggactcaagcgccccgccgccgccgctgccggggaccacgaaaggacgcgccgaccccggatctgcgactcgccggtctccgaacgcacgctactgaacggacgcggggcttggctgctcgatcgcaccgcccgggaaaaaaagggagagcccgccggatttaaccggacacaccgaacgcgcagctcctccgggccaggggccggacagaatccatgcagccgaggtcccgcattcggggccgcgacccgccgccgccgccgccgccaggaggacgctaccgtcgccgatccccgccccctccatcaccgcgccaccagcgccgcccacgtgatccgccccctccacagcggaagaggcgcagctccgagctgcccccgccacggcgatacgaggaggatcctctccttaacggcttcgcccccgctgccgagaggcgttcacgcggcgacatcctgctcgaggccggccgtctggccgctcactacttggttgccaaaggcctcctctccgagcaccttctcctggcaagggaggacccaaatcacaatcccatttaccgccctgagccccccgctcccgctcccgctcctcctccgactctagctccctctagttacgggaggaagagagacgaggacgacggcccgaggtggcggcggagtggaagtggagccgaggaccaggggcgtggctcaaggtgggacgacgacagggaagccaagaggtcggggtgggacaggaggagccacagctttgatggaaggcgtaaatgcaacgatgacggtggcggtgatgctgaccgtagcggccgccggacacgcgactacgatgagtcgaagagaccaccgatgtcaaggtcctattcgcataacgatcgttgggcttcagctgatgccagagtagatcgaaggaggagaagtaggagcaggaccaggagctactacagtggcagcaggagagatccagatttgctagcaggcacccgtgatttggatcgcaccaaggtgccagactctggcattgttcctgctgctggtggtgatggaggcgtgcacgatgcggatgccgatggaacacgaaagcagctgaaggttcctagttcaatgttggtttcggagatgaatgacagtgctgtcgaagctgcgcctatagaagaggatcatgctcaagacatgtctgaaggtgaggacggtgagtttgcagaagagatttctgaagacgaggatggtgagtttgcagcctctgatttgaatgatgaagatggtgatgaaatggatgacacccaaagacaaccgtctcacatgcatgttcatgcatctgaatctatcgaggaacctgtccatagacagtcccagctcagcaatgctgaagagggaatggaaactggcattgcacacgtggatgcatatatggtagagccattggcagagaacaatgttttctctgaaacaaggtatgaaatggaggctccacaaaatggagctgaaactgctgttgttgatctttacagagatgcagaagagcaaccattgacagagaataatgattgctccgaagcagagaatgagatgaacaagagtgagtttgaaactggtgttggcaatcttgatagagatgaacaagagcaactattggcagagaataataatggctctgaagtaaggtatgacatggaggctccacaaagtgaggttgaaactggtgttggcagtcttaatagagatgaccaagagcagctgttgacagtgactgatggttactctgaattaagatatgaaacagggactccacaaactgaagttgaaactgttattgatgatatcagtagggatgagcaagagctgccagcttggtacaaaatttttgatctcaacgtcattgaaactccattgggctgtgaggtttccgagatttcttgtggtcatccagcagatggtctttgtgattctgtgcctgattcagttggtctggtgaaccaagaagcaaacaatgatacctctgaaattcaaggtcaagatggtcatgcaggggccaatcaagtgttagaagatgagtctgatttgaatagctatgatctgaacaatgaagctgatgaagatgcacaggatgatactttagaaaatcaagttcaagacgagaatgtagaggataatcacttactggaggatgggcatgatttgacgaggtatgatgtgaacaatgaggctggtgagcatgcacatgataaccacctggtgaaaaatgcggaaatacttctaaatcatattatggttgcatgtatatcagataattgccatatgaacaatgagaaaatgcttctaaagcaaaatgtggatgagcaacagatggagaacgagcagatgcttatagatcaggtcactagtgttcaagttttggatagtcaccatgtgcacgatgaacagttgctggtaggtcatgctgcagatgatcatcaccaaatggaaccaaatcccatggctttttctttgggcgttcatgatctggataactactatttgagtagcaagcaaatacttctgtataatgatgcaggaggtatacaccatttgaaggatgggcaaattattttagatgaggctgcagatggacaagctagagttcacaatatgggccatggacgaacgattcctggaattgatctggaagatgattatgcacaggtgtctgccatcagaaatacaggagaatgtctagaatctgcaagtgatacctcgcacgaatacacggataatgttctacaagaacatatgtgttctcaagactagcaaacctcaagttttggtgacaatcctaagactaacacacaagcagcttcttcttcaactgtcaccagattttcaaaactggtgtactggaaatgatgctgtgaaggcacaggtgattcccatttctcagtgatgatgtgttgtatattggattcaacaatatgccattaggtatataatgttcgagacaacggcgtagatgtatttattttccaaacaagtaatggtggatgggaatgtactcatgagaactataatgtagtggccacaaaccccccatgctagttgtgatgagctttttagtccaaagagtcgcacttctgcattggaatcttacatgtagcatttcaatacacatacaagcacctgtaaatagcaaaggcatggaatttgttctgtaactgaagaaccatgtttatccggaaacagcaaataatggatttatggtgtttttagatgcctgaactccgcatgcttcgataatcgacacatagcatttgactgtgcagtgaaccctgggctatatatctaagtgatgaaaaaatgctgttcattactggatgaacatacatattaacgtgtttccgctatgatataaactggaatctgtttctgaaacgaagtaaccgaatacttgaatgtttattggtttgcacccattagtttgtctatatgttcctgcatgctcaatgactggttcgctagttaatgaacaaaggctctcttttttcttcttggatatctgagaatatgacagtttacttacgtgtacgtggtaactgcattttctgcagcgttgctttccccatcaacaccacttaataacttgtcttcctttatgtttcctcagaacttgtgaatgtctgggacctgccatcctctgagcttgggaaatccttgtgagctctggcaccctgttgtctgtgcattcagatcctaacacaccggaccatgggaggtctgcaccggaccgatcgctggagctagttagtcgactgagcttttcattgacaagtcggtttagtgacacttctgccttcccgagatatagctgcgatgtcagtatgtctcagtagctgaatatgtcatatatttttttaactagaaatgatttgatgggcgttttgtgctgcgcctgcttcagagctctcctgcttttcagtggaactgtcaactgtcaagtgcatagagaacacgcttctcgttgttgcttacacgggagtagcgttgaccat

SEQ ID NO: 58059 - DNA, 3737 bp, Zea Mays
gtcgcttctcttatcggcgtcgaccccccttctccactcgcaaccaaaccctcgcatcgtacagcagccgcaccaaatctcaccgccacctccgggtccggggactcaagcgccccgccgccgccgctgccggggaccacgaaaggacgcgccgaccccggatctgcgactcgccggtctccgaacgcacgctactgaacggacgcggggcttggctgctcgatcgcaccgcccgggaaaaaaagggagagcccgccggatttaaccggacacaccgaacgcgcagctcctccgggccaggggccggacagaatccatgcagccgaggtcccgcattcggggccgcgacccgccgccgccgccgccgccaggaggacgctaccgtcgccgatccccgccccctccatcaccgcgccaccagcgccgcccacgtgatccgccccctccacagcggaagaggcgcagctccgagctgcccccgccacggcgatacgaggaggatcctctccttaacggcttcgcccccgctgccgagaggcgttcacgcggcgacatcctgctcgaggccggccgtctggccgctcactacttggttgccaaaggcctcctctccgagcaccttctcctggcaagggaggacccaaatcacaatcccatttaccgccctgagccccccgctcccgctcccgctcctcctccgactctagctccctctagttacgggaggaagagagacgaggacgacggcccgaggtggcggcggagtggaagtggagccgaggaccaggggcgtggctcaaggtgggacgacgacagggaagccaagaggtcggggtgggacaggaggagccacagctttgatggaaggcgtaaatgcaacgatgacggtggcggtgatgctgaccgtagcggccgccggacacgcgactacgatgagtcgaagagaccaccgatgtcaaggtcctattcgcataacgatcgttgggcttcagctgatgccagagtagatcgaaggaggagaagtaggagcaggaccaggagctactacagtggcagcaggagagatccagatttgctagcaggcacccgtgatttggatcgcaccaaggtgccagactctggcattgttcctgctgctggtggtgatggaggcgtgcacgatgcggatgccgatggaacacgaaagcagctgaaggttcctagttcaatgttggtttcggagatgaatgacagtgctgtcgaagctgcgcctatagaagaggatcatgctcaagacatgtctgaaggtgaggacggtgagtttgcagaagagatttctgaagacgaggatggtgagtttgcagcctctgatttgaatgatgaagatggtgatgaaatggatgacacccaaagacaaccgtctcacatgcatgttcatgcatctgaatctatcgaggaacctgtccatagacagtcccagctcagcaatgctgaagagggaatggaaactggcattgcacacgtggatgcatatatggtagagccattggcagagaacaatgttttctctgaaacaaggtatgaaatggaggctccacaaaatggagctgaaactgctgttgttgatctttacagagatgcagaagagcaaccattgacagagaataatgattgctccgaagcagagaatgagatgaacaagagtgagtttgaaactggtgttggcaatcttgatagagatgaacaagagcaactattggcagagaataataatggctctgaagtaaggtatgacatggaggctccacaaagtgaggttgaaactggtgttggcagtcttaatagagatgaccaagagcagctgttgacagtgactgatggttactctgaattaagatatgaaacagggactccacaaactgaagttgaaactgttattgatgatatcagtagggatgagcaagagctgccagcttggtacaaaatttttgatctcaacgtcattgaaactccattgggctgtgaggtttccgagatttcttgtggtcatccagcagatggtctttgtgattctgtgcctgattcagttggtctggtgaaccaagaagcaaacaatgatacctctgaaattcaaggtcaagatggtcatgcaggggccaatcaagtgttagaagatgagtctgatttgaatagctatgatctgaacaatgaagctgatgaagatgcacaggatgatactttagaaaatcaagttcaagacgagaatgtagaggataatcacttactggaggatgggcatgatttgacgaggtatgatgtgaacaatgaggctggtgagcatgcacatgataaccacctggtgaaaaatgcggaaatacttctaaatcatattatggttgcatgtatatcagataattgccatatgaacaatgagaaaatgcttctaaagcaaaatgtggatgagcaacagatggagaacgagcagatgcttatagatcaggtcactagtgttcaagttttggatagtcaccatgtgcacgatgaacagttgctggtaggtcatgctgcagatgatcatcaccaaatggaaccaaatcccatggctttttctttgggcgttcatgatctggataactactatttgagtagcaagcaaatacttctgtataatgatgcaggaggtatacaccatttgaaggatgggcaaattattttagatgaggctgcagatggacaagctagagttcacaatatgggccatggacgaacgattcctggaattgatctggaagatgattatgcacaggtgtctgccatcagaaatacaggagaatgtctagaatctgcaagtgatacctcgcacgaatacacggataatgttctacaagaacatatgtgttctcaagactagcaaacctcaagttttggtgacaatcctaagactaacacacaagcagcttcttcttcaactgtcaccagattttcaaaactggtgtactggaaatgatgctgtgaaggcacaggtaagagcgctattttggttagacatgtgtccttacttcttcttggaccgagaaaatcagtttcttttataagagcatcgagtaaagcattatgattggcaactatattgttagtagatcacttgctgtctaatgctaggagttcgattttgatcttgaacacttcatatgttccaaggcaaaattcatgcccatgtatattgtcgtttgttattacttgcaattactgtcgctgttcttcttgactgcacacggtaacattgcattaatctatgtgatccatttcttcaggtgattcccatttctcagtgatgatgtgttgtatattggattcaacaatatgccattagaacttgtgaatgtctgggacctgccatcctctgagcttgggaaatccttgtgagctctggcaccctgttgtctgtgcattcagatcctaacacaccggaccatgggaggtctgcaccggaccgatcgctggagctagttagtcgactgagcttttcattgacaagtcggtttagtgacacttctgccttcccgagatatagctgcgatgtcagtatgtctcagtagctgaatatgtcatatatttttttaactagaaatgatttgatgggcgttttgtgctgcgcctgcttcagagctctcctgcttttcagtggaactgtcaactgtcaagtgcatagagaacacgcttctcgttgttgcttacacgggagtagcgttgaccat

SEQ ID NO: 58060 - DNA, 1026 bp, Zea Mays
aatgtggatgagcaacagatggagaacgagcagatgcttatagatcaggtcactagtgttcaagttttggatagtcaccatgtgcacgatgaacagttgctggtaggtcatgctgcagatgatcatcaccaaatggaaccaaatcccatggctttttctttgggcgttcatgatctggataactactatttgagtagcaagcaaatacttctgtataatgatgcaggaggtatacaccatttgaaggatgggcaaattattttagatgaggctgcagatggacaagctagagttcacaatatgggccatggacgaacgattcctggaattgatctggaagatgattatgcacaggtgtctgccatcagaaatacaggagaatgtctagaatctgcaagtgatacctcgcacgaatacacggataatgttctacaagaacatatgtgttctcaagactagcaaacctcaagttttggtgacaatcctaagactaacacacaagcagcttcttcttcaactgtcaccagattttcaaaactggtgtactggaaatgatgctgtgaaggcacaggtgattcccatttctcagtgatgatgtgttgtatattggattcaacaatatgccattagaacttgtgaatgtctgggacctgccatcctctgagcttgggaaatccttgtgagctctggcaccctgttgtctgtgcattcagatcctaacacaccggaccatgggaggtctgcaccggaccgatcgctggagctagttagtcgactggtcgttgttatagcttttcattgacaagtcggtttagtgacacttctgccttcccgagatatagctgcgatgtcagtatgtctcagtagctgaatatgtcatatatttttttaactagaaatgatttgatgggcgttttgtgctgcgcctgcttcagagctctcctgcttttcagtggaactgtcaactgtcaagtgcatagagaacacgcttctcgttgttgcttacacgggagtagcgttgaccat

SEQ ID NO: 58061 - DNA, 1317 bp, Zea Mays
cgagcacccctgcccacaccttggccggagctgatgcaaatgaatggagggaaaaggaagaggacttggtcaacgggcacagtgcaccacatggcgtgcaacaggtcgatgagcatgagcaacaagacaaagcattcgctgggagatgttcctatacgtgaagaccctaagagtcttgctggtggagaatgatgactactcgtcagctgatcagtgccctgctctgcaagtgctgctatgaagttaactcctcaacattgtcatatcctattctgttattcttgacacattcatattcctagctagcgagcatccgaggctgtgcgtgatggcaaagcaggtgagtgatcgaggttgtgcgaccagggcactcacgcaggctctgcagcgatggggtacttctcgtgcagtggtagcgaggcagcggcacaacccatgcccaccgacgggtgcgtacgcgagcaggtgcgcgcggtgctcgctgctcgtggacgcgagcagcgcaagggcggcgccagtgttggcgtgtggtgtggtacactggtgttgctaggcaccagcagagtagagaaggtccaaaaggcatcacttgcagagcacattgggagaattaactttcagttgttccaatacgcagcgcattgtgttagcaagcagattgagaggtacgtaacaccctttgttcaacatccaatcaaagttgcggtttatttttatttttacatttttttgtagctgcaattatacttataatatgttgttggtagccctgtggggtgctggggctcagatttatcatctaaagcaaagaattactgtgctattcggtttatgttgtggtttatttttatttttactttttttagctgcaattatacttataatatgttgttggtagccctgtggggtgctgagggctcagatttatcatctaaagcaaagaattattgaagtatgtacctgtagctttttggttcttataattgcttagggctgttaccttttttggttacaaatatactgctctatttgattttttcattgaacttcaagagagtacgtttagagttattgcggataactatgtcacggatgatggtcgaacgagtgttgtccattgtgctcttgcttttggcgaagacgatcattgtgtttgccttgttgttgggatattttaggttggaattattcttctttcattcatgtacatcctcactaactaatgtgccgctaatgctaaggtattaagaggttaagagaaatgtgaagatcagtaaaccattaatctactaatctccttttcagaaacttagggaa

SEQ ID NO: 58062 - DNA, 1218 bp, Zea Mays
agcacccctgcccacaccttggccggagctgatgcaaatgaatggagggaaaaggaagaggacttggtcaacgggcacagtgcaccacatggcgtgcaacaggtcgatgagcatgagcaacaagacaaagcattcgctgggagatgttcctatacgtgaagaccctaagagtcttgctggtggagaatgatgactactcgtcagctgatcagtgccctgctctgcaagtgctgctatgaaggtgagtgatcgaggttgtgcgaccagggcactcacgcaggctctgcagcgatggggtacttctcgtgcagtggtagcgaggcagcggcacaacccatgcccaccgacgggtgcgtacgcgagcaggtgcgcgcggtgctcgctgctcgtggacgcgagcagcgcaagggcggcgccagtgttggcgtgtggtgtggtacactggtgttgctaggcaccagcagagtagagaaggtccaaaaggcatcacttgcagagcacattgggagaattaactttcagttgttccaatacgcagcgcattgtgttagcaagcagattgagaggtacgtaacaccctttgttcaacatccaatcaaagttgcggtttatttttatttttacatttttttgtagctgcaattatacttataatatgttgttggtagccctgtggggtgctggggctcagatttatcatctaaagcaaagaattactgtgctattcggtttatgttgtggtttatttttatttttactttttttagctgcaattatacttataatatgttgttggtagccctgtggggtgctgagggctcagatttatcatctaaagcaaagaattattgaagtatgtacctgtagctttttggttcttataattgcttagggctgttaccttttttggttacaaatatactgctctatttgattttttcattgaacttcaagagagtacgtttagagttattgcggataactatgtcacggatgatggtcgaacgagtgttgtccattgtgctcttgcttttggcgaagacgatcattgtgtttgccttgttgttgggatattttaggttggaattattcttctttcattcatgtacatcctcactaactaatgtgccgctaatgctaaggtattaagaggttaagagaaatgtgaagatcagtaaaccattaatctactaatctccttttcagaaacttagggaa

SEQ ID NO: 58063 - DNA, 1053 bp, Zea Mays
gtcagctgatcagtgccctgctctgcaagtgctgctatgaagcgagcatccgaggctgtgcgtgatggcaaagcaggtgagtgatcgaggttgtgcgaccagggcactcacgcaggctctgcagcgatggggtacttctcgtgcagtggtagcgaggcagcggcacaacccatgcccaccgacgggtgcgtacgcgagcaggtgcgcgcggtgctcgctgctcgtggacgcgagcagcgcaagggcggcgccagtgttggcgtgtggtgtggtacactggtgttgctaggcaccagcagagtagagaaggtccaaaaggcatcacttgcagagcacattgggagaattaactttcagttgttccaatacgcagcgcattgtgttagcaagcagattgagaggtacgtaacaccctttgttcaacatccaatcaaagttgcggtttatttttatttttacatttttttgtagctgcaattatacttataatatgttgttggtagccctgtggggtgctggggctcagatttatcatctaaagcaaagaattactgtgctattcggtttatgttgtggtttatttttatttttactttttttagctgcaattatacttataatatgttgttggtagccctgtggggtgctgagggctcagatttatcatctaaagcaaagaattattgaagtatgtacctgtagctttttggttcttataattgcttagggctgttaccttttttggttacaaatatactgctctatttgattttttcattgaacttcaagagagtacgtttagagttattgcggataactatgtcacggatgatggtcgaacgagtgttgtccattgtgctcttgcttttggcgaagacgatcattgtgtttgccttgttgttgggatattttaggttggaattattcttctttcattcatgtacatcctcactaactaatgtgccgctaatgctaaggtattaagaggttaagagaaatgtgaagatcagtaaaccattaatctactaatctccttttcagaaacttagggaa

SEQ ID NO: 58064 - DNA, 185 bp, Zea Mays
gttctatacacttctgtgctcgcggggcttctgatgtgcaatcgtatgacttcacacacataatcagttctgtctacttcaaaggttatgcctctcttacaaagatgaaaaaaattgaatggaacaacagaggaatgtccactgtccatgcaatattcattacaatgatgtcagtatacctaggc

SEQ ID NO: 58065 - DNA, 2579 bp, Zea Mays
ccacctttctcccactgcctcgtattctattcccctccctcgccatctccgccgtcgttgccttctccaatccactagtcgacaacgcacgcgcgcaccttctcccgcggcggcgacccccgcggcgtcgtcctagggttaggattcaggcgacttccctcccttccgtgtcgcggcgaacgcgtgggagataatacgccctatgtcgtctgacccttcgcgccacctcccgtcgccggtggctccgccggacgcggcggaggtggatacccattccgccgagccgccagaggtgatgcaccggacgagagccgtcgacttccttggacgacgcacgcccatcgtctaccagaacgacaacgggccctgcccgctcctcgccatctgtaacgtgctgctgctgaagaatgtgatcagcatgaaccctgacgcggaggaggtgtcgcagcagaggttgctctcgctcgtggcggagcgcctcatcgatccaaacatcgctggacaggtcaaggatgaggagtatgttaacaaccgggagcagaacatcgcggatgcgattgatcttctcccgtgcctcacgacaggcattgatgtgaacgtgatgttcaggaagtgcgattgatgacttcgagttcacccgagaacgtgctatatttgatcttctggatatcccgctatatcatggatggattgtggaccctcaggatactgaaactgctactgctattggatcgaagtcctacaatgctcttgcttccggacttgttgaattcaagtcaggtaaaccaacagaagaaaataaacctgtggaggaagaaactgttgattttgctgccgcaacagctgcagctttaaagattccgtctcccagtgtttctcttgggagatcatttgatgaacatagtctctcaaactcagttgaaccacataaaaggcgaggtgaccttgaggaagaagaggaattgatgagggtcctcacattgtccaaaggagaaagtggggatgcagttgatggagaagtttctcttgacacctcacatagtcattcattgtccaacatggatacaccacaaactgagaatcttcagtcagaaacacctgagttagtaggggcagcaaaagaagaggaacatggtaatcacactgtgagtgatgatggctccatcctaccagtcataaatggtgttgttaatggtagtgaagctgtgaccaaagaatctcaaaaaactttgacatctaaagaaccagaggctagtggaataaagaatatgttaccaggggaccttaatatactcgttcaatcttcagaatgtactcccaattgtcagtctcatgaatcctttgctactagtgacccccagcctgctgttcctactcttgttgaaggtggtaaagaaaacaatagagaacagttcgatgcacaaattcatggccaatctaatgatactgaggttgcttgtgactcgacgactgcaacttgtgaagctgttccaggtcatgctaaaacagaactggatgtgaaaagtgattctttagaaaattctgagcctctacctttaagcattcaggaatatgaaccaatataccaaggtgaagagcacatacttggcaccacaaatatggtgtatgaaaatcaagaaccagtgtatgagggggaggtggttcttgctaagcagcttgacaagatggaggaaagcagtccttccgtggatgacaaggccacagaacatcattgggagttgatcgataattttctgtggtccactgctaaccagctgactgtctatggtctcttctgcttacaagaggaacttaaggaaaatgagctttgtgtcttcttccggaataaccacttcaacactatgttcaagtacaacggaagtctatatctcctagcaactgatcaaggttttataagccaaactgatttggtatggcagaggttggatgaggtgaatggagatgggggttttcttactagcaacttcacaccatttaaggctgaaactccaagaaatgattcatggaatgaacagcaagctatgacgagtactgctgattatcttgctcaatttgacaactccacttctggaaactctgatctggagctagctatagcacttcaacagcaagagtttgagcggcaaccacaaaggttccaagctccaccaccacagcagcagcaacaacaaccaccacctcagacgcagcaccaaccagctcaatctggccgaccaggacttgttgttggtccaaggatgtccaatgtgccgcctccgtcaagaagtgaatccaagaaagagaggtgcatcgtgatgtaaaaataccttcaacagaaaagtagtagaaaaaaagaagagataagagacgcatggcattatactgtaaagaaatggtttcttctgcgtttagtcacctcgagccatcccccatttgagcttctttggttttacgtcgcctgatgtatgtaaataacttcaataaataaagtgtaggaacagatgctgtcaaagtgatggccctcatgcaatgtgattttatttgtcgctcttgcaattgattgattctgttcgttcatc

SEQ ID NO: 58066 - DNA, 2456 bp, Zea Mays
ccacctttctcccactgcctcgtattctattcccctccctcgccatctccgccgtcgttgccttctccaatccactagtcgacaacgcacgcgcgcaccttctcccgcggcggcgacccccgcggcgtcgtcctagggttaggattcaggcgacttccctcccttccgtgtcgcggcgaacgcgtgggagataatacgccctatgtcgtctgacccttcgcgccacctcccgtcgccggtggctccgccggacgcggcggaggtggatacccattccgccgagccgccagaggtgatgcaccggacgagagccgtcgacttccttggacgacgcacgcccatcgtctaccagaacgacaacgggccctgcccgctcctcgccatctgtcaaggatgaggagtatgttaacaaccgggagcagaacatcgcggatgcgattgatcttctcccgtgcctcacgacaggcattgatgtgaacgtgatgttcaggaagattgatgacttcgagttcacccgagaacgtgctatatttgatcttctggatatcccgctatatcatggatggattgtggaccctcaggatactgaaactgctactgctattggatcgaagtcctacaatgctcttgcttccggacttgttgaattcaagtcaggtaaaccaacagaagaaaataaacctgtggaggaagaaactgttgattttgctgccgcaacagctgcagctttaaagattccgtctcccagtgtttctcttgggagatcatttgatgaacatagtctctcaaactcagttgaaccacataaaaggcgaggtgaccttgaggaagaagaggaattgatgagggtcctcacattgtccaaaggagaaagtggggatgcagttgatggagaagtttctcttgacacctcacatagtcattcattgtccaacatggatacaccacaaactgagaatcttcagtcagaaacacctgagttagtaggggcagcaaaagaagaggaacatggtaatcacactgtgagtgatgatggctccatcctaccagtcataaatggtgttgttaatggtagtgaagctgtgaccaaagaatctcaaaaaactttgacatctaaagaaccagaggctagtggaataaagaatatgttaccaggggaccttaatatactcgttcaatcttcagaatgtactcccaattgtcagtctcatgaatcctttgctactagtgacccccagcctgctgttcctactcttgttgaaggtggtaaagaaaacaatagagaacagttcgatgcacaaattcatggccaatctaatgatactgaggttgcttgtgactcgacgactgcaacttgtgaagctgttccaggtcatgctaaaacagaactggatgtgaaaagtgattctttagaaaattctgagcctctacctttaagcattcaggaatatgaaccaatataccaaggtgaagagcacatacttggcaccacaaatatggtgtatgaaaatcaagaaccagtgtatgagggggaggtggttcttgctaagcagcttgacaagatggaggaaagcagtccttccgtggatgacaaggccacagaacatcattgggagttgatcgataattttctgtggtccactgctaaccagctgactgtctatggtctcttctgcttacaagaggaacttaaggaaaatgagctttgtgtcttcttccggaataaccacttcaacactatgttcaagtacaacggaagtctatatctcctagcaactgatcaaggttttataagccaaactgatttggtatggcagaggttggatgaggtgaatggagatgggggttttcttactagcaacttcacaccatttaaggctgaaactccaagaaatgattcatggaatgaacagcaagctatgacgagtactgctgattatcttgctcaatttgacaactccacttctggaaactctgatctggagctagctatagcacttcaacagcaagagtttgagcggcaaccacaaaggttccaagctccaccaccacagcagcagcaacaacaaccaccacctcagacgcagcaccaaccagctcaatctggccgaccaggacttgttgttggtccaaggatgtccaatgtgccgcctccgtcaagaagtgaatccaagaaagagaggtgcatcgtgatgtaaaaataccttcaacagaaaagtagtagaaaaaaagaagagataagagacgcatggcattatactgtaaagaaatggtttcttctgcgtttagtcacctcgagccatcccccatttgagcttctttggttttacgtcgcctgatgtatgtaaataacttcaataaataaagtgtaggaacagatgctgtcaaagtgatggccctcatgcaatgtgattttatttgtcgctcttgcaattgattgattctgttcgttcatc

SEQ ID NO: 58067 - DNA, 2542 bp, Zea Mays
ccacctttctcccactgcctcgtattctattcccctccctcgccatctccgccgtcgttgccttctccaatccactagtcgacaacgcacgcgcgcaccttctcccgcggcggcgacccccgcggcgtcgtcctagggttaggattcaggcgacttccctcccttccgtgtcgcggcgaacgcgtgggagataatacgccctatgtcgtctgacccttcgcgccacctcccgtcgccggtggctccgccggacgcggcggaggtggatacccattccgccgagccgccagaggtgatgcaccggacgagagccgtcgacttccttggacgacgcacgcccatcgtctaccagaacgacaacgggccctgcccgctcctcgccatctgtaacgtgctgctgctgaagaatgtgatcagcatgaaccctgacgcggaggaggtgtcgcagcagaggttgctctcgctcgtggcggagcgcctcatcgatccaaacatcgctggacaggtcaaggatgaggagtatgttaacaaccgggagcagaacatcgcggatgcgattgatcttctcccgtgcctcacgacaggcattgatgtgaacgtgatgttcaggaagattgatgacttcgagttcacccgagaacgtgctatatttgatcttctggatatcccgctatatcatggatggattgtggaccctcagtcctacaatgctcttgcttccggacttgttgaattcaagtcaggtaaaccaacagaagaaaataaacctgtggaggaagaaactgttgattttgctgccgcaacagctgcagctttaaagattccgtctcccagtgtttctcttgggagatcatttgatgaacatagtctctcaaactcagttgaaccacataaaaggcgaggtgaccttgaggaagaagaggaattgatgagggtcctcacattgtccaaaggagaaagtggggatgcagttgatggagaagtttctcttgacacctcacatagtcattcattgtccaacatggatacaccacaaactgagaatcttcagtcagaaacacctgagttagtaggggcagcaaaagaagaggaacatggtaatcacactgtgagtgatgatggctccatcctaccagtcataaatggtgttgttaatggtagtgaagctgtgaccaaagaatctcaaaaaactttgacatctaaagaaccagaggctagtggaataaagaatatgttaccaggggaccttaatatactcgttcaatcttcagaatgtactcccaattgtcagtctcatgaatcctttgctactagtgacccccagcctgctgttcctactcttgttgaaggtggtaaagaaaacaatagagaacagttcgatgcacaaattcatggccaatctaatgatactgaggttgcttgtgactcgacgactgcaacttgtgaagctgttccaggtcatgctaaaacagaactggatgtgaaaagtgattctttagaaaattctgagcctctacctttaagcattcaggaatatgaaccaatataccaaggtgaagagcacatacttggcaccacaaatatggtgtatgaaaatcaagaaccagtgtatgagggggaggtggttcttgctaagcagcttgacaagatggaggaaagcagtccttccgtggatgacaaggccacagaacatcattgggagttgatcgataattttctgtggtccactgctaaccagctgactgtctatggtctcttctgcttacaagaggaacttaaggaaaatgagctttgtgtcttcttccggaataaccacttcaacactatgttcaagtacaacggaagtctatatctcctagcaactgatcaaggttttataagccaaactgatttggtatggcagaggttggatgaggtgaatggagatgggggttttcttactagcaacttcacaccatttaaggctgaaactccaagaaatgattcatggaatgaacagcaagctatgacgagtactgctgattatcttgctcaatttgacaactccacttctggaaactctgatctggagctagctatagcacttcaacagcaagagtttgagcggcaaccacaaaggttccaagctccaccaccacagcagcagcaacaacaaccaccacctcagacgcagcaccaaccagctcaatctggccgaccaggacttgttgttggtccaaggatgtccaatgtgccgcctccgtcaagaagtgaatccaagaaagagaggtgcatcgtgatgtaaaaataccttcaacagaaaagtagtagaaaaaaagaagagataagagacgcatggcattatactgtaaagaaatggtttcttctgcgtttagtcacctcgagccatcccccatttgagcttctttggttttacgtcgcctgatgtatgtaaataacttcaataaataaagtgtaggaacagatgctgtcaaagtgatggccctcatgcaatgtgattttatttgtcgctcttgcaattgattgattctgttcgttcatc

SEQ ID NO: 58068 - DNA, 783 bp, Zea Mays
agatcaaatcaaaacgagacaaagttcacgatccagacccgatccaagcgtgtctggcgatccagcaactcacccgaatgagaagaggatgcagcgggcggagatccgcgtgatccacatgagccggcggcgccacgccggcataggcccgccgccctcccgcggcctcacgtgcgtgtccgcccatccgcggagagccacccacgtggccgcgtaaccgatggcgatggcgagcccgaacagcgccagccgcaccgccgcgaccggcaggagcagcagcgtcctcgcccacgcgtacgcgccgccgcaccacgccggcgtgccgttgcggaacgggtcggccggggacggcccacggtcccgcggcggccgatcctccgagaggaacgcgaacgggtcccccgcgtcgccgcacacggaggccgcgacggcgccgtcgtggtggtgccgatggttggctgcgtgcccgttggcggcgtgggcgggcgagatggagtcggagagcaagggcgcggagagagaggccgggttagggcttgtagaggccatggacgacgaagctggcggtcggtcgccggagacggcggcggcggcgagcaatggacggccgggagtaatggcttttatcaaagcaaaagcgataggcagcaacaagtgagagacgctgttttgtttgtggtcgtcgtttcgtttttgcttattggcccttgcagtttcggagtcgttttcacgggtctctatttccctcctttaaaaaaatccacgtgtctccatgtgttagag

SEQ ID NO: 58069 - DNA, 1481 bp, Zea Mays
acatcaaagaccaaaccgaagctggcaaatgtaccaatcctcctcctccgatcactgttctccttcctcctctccgctccgttgccgacggccctgcgcccccgccccggctccccgccgtgccctgcgcctccgccgcgcccttacctccacacctcaaatctgctttgtagcataagctcgctgcttgttagggtcgatggcagagagggagcatcgaacagtatttgtcacggtggggaccacgtgctttgatgcccttgtcatggccgtagattctccggaagtgaagaaggctttactgcaaaaaggttacagtaatcttctcattcaaatgggccgaggaacatatgttccatccaaggtctcaggagatgctacccttcaagttgaccatttcacattttcaccaagcatcgctgacaatatgagaacagcttccttagttatcagccatgcaggttcgtgatgctcaaaatgatcagcaagctttaaagccagaccgaccttgcgatcgacaaagtcttttgtttgaaatatcttgtgtgtctattctatttattgttttgtttctcaaggtttggcactggcaggttcaggaagcatatttgagacgctgcggctgggcaaaccgcttatcgtcgttgtaaacgaggatctgatggacaatcaccagagcgaactagcagaagaattggctgaaaggaagcacctcttctgcgcacgcccacaaacactgggagagaccatccgggcaatggacctggagacgctggttccttacgagccaggggatgccaagccagtcgtcgccctgatcaacaggtttcttggcttcccagttgcctgacaaataaacgacgagatacctccattaaggcgtcagttcctgtacctgtttgatgtaaaatggattaactggcatatggaaacagcaagactgtcctcgatcgttgcagttgggtttaattggggtggggggcgtcgattcgttgttcttgtcatgcccttgacacgagaaggcaatactgtgtggttggacggcatcactgaagccaatactttatgatcgtgagagggccgaaggagacggaagtcacgtcacccttcttcatagtgatttgaaaagtaccattgaaatgatagccagcaggggccaacgaaaccaagaaagttgtagtaactgacaatgaattcgctgcaattgaatgctagttgccaaatacaatctccactggttcagctgccatcctcaatgcactatgatgaccagcttatgctaatttttttttcatatttctgaccattcgtcttttgtaataattatttgtgtagatagacaaacgcatgcatgaaatgcctaataattatttgtgtagatagacaaacgcatgcatgaaatgcctaataacatgcatatattgtaaggaaaatggatcccagtctatttgacttaatgagttttggtgtttgatgatcaa

SEQ ID NO: 58070 - DNA, 2035 bp, Zea Mays
atcaaaaaaagctacagccacggccaaagcagagcaggagcaggccgcgcggaacgagggaagcagcaggccgctagactagggagcggtcgccggcctcggcggcggagggatggggcgtgggggtgcggtgatggaggacggcgacagggaggagggaagctatccgacgctgctgcagcggtggtcctcgtcggtgtgggccgtcagcggcagcgggcgcctgctgtgggcgggcaacgaggcgtggcgggcgcacgtcgggatggccctcgtccaggtcgcctacggcggctaccacgtcctcaccaagtccgtcctcaacgtcggcatgaaccagatcgtcttctgcgtctaccgcgacctcgtcgcgctcgcgctcctcgcgcccatcgccttctttcgcgagagaaacgtgcggcgcccggtgactcctcgcctcctcgcgtccttcgctctcctcggattcactgggatcttcgggaaccagctcctcttcctcctgggcctcggcttcaccaacgcctcctacgccgcggcgttccagccggccataccggtgttcacgttcctcctggccgcaatcgtcggcgtcgaggtgatcaacatcttcacgaaacacggggtcgtcaaagtcctcggcacagccgtgtgcgtctctggcgccgtcctgatggtcttctaccgaggcccatctctgatcgggaccggaggcgcggccgatgcaactgccctgtcagtggttattgaccacagccatgcctataactatgctcctcagtggctggccgcggccatgctccggaacggcgtggaggcatggcatctcggcgtcgtctgcctcatcggaaactgcttcctgatgggcgcttacctcgtcatccaggccccggtgctgatcaaataccccgcgagcttatccctgaccgcctactcctactccttcgcaaccttgttcatggtggtcaccggcgcgttcgccaccagtgggctccacgagtgggcgctgacagcgaccgagatcttagccatcttgtacgctggagtcgttgcgtcctgcctgaactacgcgatcatgacctgggcgaacaagatcctcgggccgtctctggtcgccctctacaacccactccaaccggcatgctctaccttgctctcgaccatgtttcttggaactccaatttacgttggaagtgtgattgggggactcttcatcatcgctggcctttacctggtcacttgggctcgctacaaagaggctcagagcgctctggtagccggttatctgcgacctcttcttctgccgaccaccaaggcagaaggaagctccttcagggggctccattgatccttttacaccccaggcagagaggcagatggatttttgcctcaagtgtttctctaggccagcggcgtcagcagatttagttttcatgtctttgttgtataccaatcttgcatatatttgagatggccagtactagtaccattttttcaagcattcaagcaaggttccattgtcagggaagaacggcagggcactgaagaaaatatcgtatcctgaacattgtattctggtgtcccaatcggcatttttgaagatgcccttttggttgtcctttcgacttcaacacttgtgtctgtaaggctagctgcagctgggtttaacgtcaccaacgaaagaatatgaatatcattttcatgcctaagaagtgaagctgcagtgcgctagagctatcgtgctcgtggcaagatgaactattcttctgtgatgatggaacctaacccgttccctgtattcaagggagagtcaaaataatactccaaagttcacgtactcgtgtatcagattttggaacaattggacaaagtagtctcgtattgtgccctttttgttctactctttttgttctactatatgcgtttatatcttctctgttacctatgctgtctgtgcttctttgggcattatgctccaataaaaattcaactttgacagatgttttgccgtcacaatacattgattcaatttggg

SEQ ID NO: 58071 - DNA, 2018 bp, Zea Mays
atcaaaaaaagctacagccacggccaaagcagagcaggagcaggccgcgcggaacgagggaagcagcaggccgctagactagggagcggtcgccggcctcggcggcggagggatggggcgtgggggtgcggtgatggaggacggcgacagggaggagggaagctatccgacgctgctgcagcggtggtcctcgtcggtgtgggccgtcagcggcagcgggcgcctgctgtgggcgggcaacgaggcgtggcgggcgcacgtcgggatggccctcgtccaggtcgcctacggcggctaccacgtcctcaccaagtccgtcctcaacgtcggcatgaaccagatcgtcttctgcgtctaccgcgacctcgtcgcgctcgcgctcctcgcgcccatcgccttctttcgcgagaggatcttcgggaaccagctcctcttcctcctgggcctcggcttcaccaacgcctcctacgccgcggcgttccagccggccataccggtgttcacgttcctcctggccgcaatcgtcggcgtcgaggtgatcaacatcttcacgaaacacggggtcgtcaaagtcctcggcacagccgtgtgcgtctctggcgccgtcctgatggtcttctaccgaggcccatctctgatcgggaccggaggcgcggccgatgcaactgccctgtcagtggttattgaccacagccatgcctataactatgctcctcagtggctggccgcggccatgctccggaacggcgtggaggcatggcatctcggcgtcgtctgcctcatcggaaactgcttcctgatgggcgcttacctcgtcatccaggtgacgcagacttggccccggtgctgatcaaataccccgcgagcttatccctgaccgcctactcctactccttcgcaaccttgttcatggtggtcaccggcgcgttcgccaccagtgggctccacgagtgggcgctgacagcgaccgagatcttagccatcttgtacgctggagtcgttgcgtcctgcctgaactacgcgatcatgacctgggcgaacaagatcctcgggccgtctctggtcgccctctacaacccactccaaccggcatgctctaccttgctctcgaccatgtttcttggaactccaatttacgttggaagtgtgattgggggactcttcatcatcgctggcctttacctggtcacttgggctcgctacaaagaggctcagagcgctctggtagccggttatctgcgacctcttcttctgccgaccaccaaggcagaaggaagctccttcagggggctccattgatccttttacaccccaggcagagaggcagatggatttttgcctcaagtgtttctctaggccagcggcgtcagcagatttagttttcatgtctttgttgtataccaatcttgcatatatttggtttgtactttgcacggcagtttacacggtagagatggccagtactagtaccattttttcaagcattcaagcaaggttccattgtcagggaagaacggcagggcactgaagaaaatatcgtatcctgaacattgtattctggtgtcccaatcggcatttttgaagatgcccttttggttgtcctttcgacttcaacacttgtgtctgtaaggctagctgcagctgggtttaacgtcaccaacgaaagaatatgaatatcattttcatgcctaagaagtgaagctgcagtgcgctagagctatcgtgctcgtggcaagatgaactattcttctgtgatgatggaacctaacccgttccctgtattcaagggagagtcaaaataatactccaaagttcacgtactcgtgtatcagattttggaacaattggacaaagtagtctcgtattgtgccctttttgttctactctttttgttctactatatgcgtttatatcttctctgttacctatgctgtctgtgcttctttgggcattatgctccaataaaaattcaactttgacagatgttttgccgtcacaatacattgattcaatttggg

SEQ ID NO: 58072 - DNA, 2043 bp, Zea Mays
atcaaaaaaagctacagccacggccaaagcagagcaggagcaggccgcgcggaacgagggaagcagcaggccgctagactagggagcggtcgccggcctcggcggcggagggatggggcgtgggggtgcggtgatggaggacggcgacagggaggagggaagctatccgacgctgctgcagcggtggtcctcgtcggtgtgggccgtcagcggcagcgggcgcctgctgtgggcgggcaacgaggcgtggcgggcgcacgtcgggatggccctcgtccaggtcgcctacggcggctaccacgtcctcaccaagtccgtcctcaacgtcggcatgaaccagatcgtcttctgcgtctaccgcgacctcgtcgcgctcgcgctcctcgcgcccatcgccttctttcgcgagaggatcttcgggaaccagctcctcttcctcctgggcctcggcttcaccaacgcctcctacgccgcggcgttccagccggccataccggtgttcacgttcctcctggccgcaatcgtcggcgtcgaggtgatcaacatcttcacgaaacacggggtcgtcaaagtcctcggcacagccgtgtgcgtctctggcgccgtcctgatggtcttctaccgaggcccatctctgatcgggaccggaggcgcggccgatgcaactgccctgtcagtggttattgaccacagccatgcctataactatgctcctcagtggctggccgcggccatgctccggaacggcgtggaggcatggcatctcggcgtcgtctgcctcatcggaaactgcttcctgatgggcgcttacctcgtcatccaggtgacgcagacttggtgacgcagacttggcagcactggggccccggtgctgatcaaataccccgcgagcttatccctgaccgcctactcctactccttcgcaaccttgttcatggtggtcaccggcgcgttcgccaccagtgggctccacgagtgggcgctgacagcgaccgagatcttagccatcttgtacgctggagtcgttgcgtcctgcctgaactacgcgatcatgacctgggcgaacaagatcctcgggccgtctctggtcgccctctacaacccactccaaccggcatgctctaccttgctctcgaccatgtttcttggaactccaatttacgttggaagtgtgattgggggactcttcatcatcgctggcctttacctggtcacttgggctcgctacaaagaggctcagagcgctctggtagccggttatctgcgacctcttcttctgccgaccaccaaggcagaaggaagctccttcagggggctccattgatccttttacaccccaggcagagaggcagatggatttttgcctcaagtgtttctctaggccagcggcgtcagcagatttagttttcatgtctttgttgtataccaatcttgcatatatttggtttgtactttgcacggcagtttacacggtagagatggccagtactagtaccattttttcaagcattcaagcaaggttccattgtcagggaagaacggcagggcactgaagaaaatatcgtatcctgaacattgtattctggtgtcccaatcggcatttttgaagatgcccttttggttgtcctttcgacttcaacacttgtgtctgtaaggctagctgcagctgggtttaacgtcaccaacgaaagaatatgaatatcattttcatgcctaagaagtgaagctgcagtgcgctagagctatcgtgctcgtggcaagatgaactattcttctgtgatgatggaacctaacccgttccctgtattcaagggagagtcaaaataatactccaaagttcacgtactcgtgtatcagattttggaacaattggacaaagtagtctcgtattgtgccctttttgttctactctttttgttctactatatgcgtttatatcttctctgttacctatgctgtctgtgcttctttgggcattatgctccaataaaaattcaactttgacagatgttttgccgtcacaatacattgattcaatttggg

SEQ ID NO: 58073 - DNA, 1886 bp, Zea Mays
atcaaaaaaagctacagccacggccaaagcagagcaggagcaggccgcgcggaacgagggaagcagcaggccgctagactagggagcggtcgccggcctcggcggcggagggatggggcgtgggggtgcggtgatggaggacggcgacagggaggagggaagctatccgacgctgctgcagcggtggtcctcgtcggtgtgggccgtcagcggcagcgggcgcctgctgtgggcgggcaacgaggcgtggcgggcgcacgtcgggatggccctcgtccaggtcgcctacggcggctaccacgtcctcaccaagtccgtcctcaacgtcggcatgaaccagatcgtcttctgcgtctaccgcgacctcgtcgcgctcgcgctcctcgcgcccatcgccttctttcgcgagaggatcttcgggaaccagctcctcttcctcctgggcctcggcttcaccaacgcctcctacgccgcggcgttccagccggccataccggtgttcacgttcctcctggccgcaatcgtcggcgtcgaggtgatcaacatcttcacgaaacacggggtcgtcaaagtcctcggcacagccgtgtgcgtctctggcgccgtcctgatggtcttctaccgaggcccatctctgatcgggaccggaggcgcggccgatgcaactgccctgtcagtggttattgaccacagccatgcctataactatgctcctcagtggctggccgcggccatgctccggaacggcgtggaggcatggcatctcggcgtcgtctgcctcatcggaaactgcttcctgatgggcgcttacctcgtcatccaggccccggtgctgatcaaataccccgcgagcttatccctgaccgcctactcctactccttcgcaaccttgttcatggtggtcaccggcgcgttcgccaccagtgggctccacgagtgggcgctgacagcgaccgagatcttagccatcttgtacgctggagtcgttgcgtcctgcctgaactacgcgatcatgacctgggcgaacaagatcctcgggccgtctctggtcgccctctacaacccactccaaccggcatgctctaccttgctctcgaccatgtttcttggaactccaatttacgttggaagtgtgattgggggactcttcatcatcgctggcctttacctggtcacttgggctcgctacaaagaggctcagagcgctctggtagccggttatctgcgacctcttcttctgccgaccaccaaggcagaaggaagctccttcagggggctccattgatccttttacaccccaggcagagaggcagatggatttttgcctcaagtgtttctctaggccagcggcgtcagcagatttagttttcatgtctttgttgtataccaatcttgcatatatttgagatggccagtactagtaccattttttcaagcattcaagcaaggttccattgtcagggaagaacggcagggcactgaagaaaatatcgtatcctgaacattgtattctggtgtcccaatcggcatttttaatatgaatatcattttcatgcctaagaagtgaagctgcagtgcgctagagctatcgtgctcgtggcaagatgaactattcttctgtgatgatggaacctaacccgttccctgtattcaagggagagtcaaaataatactccaaagttcacgtactcgtgtatcagattttggaacaattggacaaagtagtctcgtattgtgccctttttgttctactctttttgttctactatatgcgtttatatcttctctgttacctatgctgtctgtgcttctttgggcattatgctccaataaaaattcaactttgacagatgttttgccgtcacaatacattgattcaatttggg

SEQ ID NO: 58074 - DNA, 2053 bp, Zea Mays
atcaaaaaaagctacagccacggccaaagcagagcaggagcaggccgcgcggaacgagggaagcagcaggccgctagactagggagcggtcgccggcctcggcggcggagggatggggcgtgggggtgcggtgatggaggacggcgacagggaggagggaagctatccgacgctgctgcagcggtggtcctcgtcggtgtgggccgtcagcggcagcgggcgcctgctgtgggcgggcaacgaggcgtggcgggcgcacgtcgggatggccctcgtccaggtcgcctacggcggctaccacgtcctcaccaagtccgtcctcaacgtcggcatgaaccagatcgtcttctgcgtctaccgcgacctcgtcgcgctcgcgctcctcgcgcccatcgccttctttcgcgagagaaacgtgcggcgcccggtgactcctcgcctcctcgcgtccttcgctctcctcggattcactgggatcttcgggaaccagctcctcttcctcctgggcctcggcttcaccaacgcctcctacgccgcggcgttccagccggccataccggtgttcacgttcctcctggccgcaatcgtcggcgtcgaggtgatcaacatcttcacgaaacacggggtcgtcaaagtcctcggcacagccgtgtgcgtctctggcgccgtcctgatggtcttctaccgaggcccatctctgatcgggaccggaggcgcggccgatgcaactgccctgtcagtggttattgaccacagccatgcctataactatgctcctcagtggctggccgcggccatgctccggaacggcgtggaggcatggcatctcggcgtcgtctgcctcatcggaaactgcttcctgatgggcgcttacctcgtcatccaggccccggtgctgatcaaataccccgcgagcttatccctgaccgcctactcctactccttcgcaaccttgttcatggtggtcaccggcgcgttcgccaccagtgggctccacgagtgggcgctgacagcgaccgagatcttagccatcttgtacgctggagtcgttgcgtcctgcctgaactacgcgatcatgacctgggcgaacaagatcctcgggccgtctctggtcgccctctacaacccactccaaccggcatgctctaccttgctctcgaccatgtttcttggaactccaatttacgttggaagtgtgattgggggactcttcatcatcgctggcctttacctggtcacttgggctcgctacaaagaggctcagagcgctctggtagccggttatctgcgacctcttcttctgccgaccaccaaggcagaaggaagctccttcagggggctccattgatccttttacaccccaggcagagaggcagatggatttttgcctcaagtgtttctctaggccagcggcgtcagcagatttagttttcatgtctttgttgtataccaatcttgcatatatttgagatggccagtactagtaccattttttcaagcattcaagcaaggttccattgtcagggaagaacggcagggcactgaagaaaatatcgtatcctgaacattgtattctggtgtcccaatcggcatttttgtatatcaacacccaaaactcatgtatactcgcaaatgatttattattagtattatttttgctatggttttttcctaacttgggcttatgttttgcgtttgcagaatatgaatatcattttcatgcctaagaagtgaagctgcagtgcgctagagctatcgtgctcgtggcaagatgaactattcttctgtgatgatggaacctaacccgttccctgtattcaagggagagtcaaaataatactccaaagttcacgtactcgtgtatcagattttggaacaattggacaaagtagtctcgtattgtgccctttttgttctactctttttgttctactatatgcgtttatatcttctctgttacctatgctgtctgtgcttctttgggcattatgctccaataaaaattcaactttgacagatgttttgccgtcacaatacattgattcaatttggg

SEQ ID NO: 58075 - DNA, 2844 bp, Zea Mays
atgcagcctcgtagggctcgaggtagtccgcaagctcctagtggggactcgatgagtccggcggcaatgttagccgcgatgcaggccatgcagcaggagttggcccttctgaggcaaaccattcctgtcgcccctgcgggtgctcttagggtgctggaggtggagaagtgcccggggcgccgtccctgcgggtgctgttccagtggtactccggtcgaggcggcagattggttgacttatgtggaggataagatgaatgtcttcgagattgcttatggagatcgggttcgctttggcactcagctgctgaagggagaggctcaaatttggtggagaggcgtgcaggcagcgcactcctcctcactaggagtcctatcttgggatgttttcatcaggcagtttgaaaggagattctacccggtcacctttctggagaaaatgaagattgacttgcagtcctacaagcaggagaagaagtctgtcacagagtatgaggtgggcttcaacaagatggtccgctttgtccctcatgtggcttatactgagatggagaaggcgagccagttccgtcagggtctgaagccttctatcaggcatgcactgggggcctttccgttggtggacttccgtaccacgcctcgtcgccaggacgcgaggaggagcaacactggaggtccagcccacaagaggggcaagtctcagcatcagcgccaccatccttaccgtggcaaatcttctgactcgggtacttcgggaggaagtactcagaggtttcgggccattcctaagcccgggctggggctggtgtgtttccgctgtggtgatgcgcatcgccgtgcagagtgccagtggagtgggaggtgttgtatctgcagtcaagaccataaggatgtggtgtgtaggaggaatcctaatgggaagctcagatgggagccggtgacttcgtcctcttctcagggcaccatcaacatgatgtcaagtgctgagcagcagttttcagttcctcttccttcgcagcagctctatgtgcctgggacttctcagttcgtgctgatgcagggttttcctcagtatcaggccgcgcctactcctgcaccgtctactcctatgtcgtctcagtttgaagctccgcgcctgcctcatctagtggctcagtggggttcttctgttaatttcactccgggggcttcctcttctgcgggtcctggatcacaatgcgtttgcaaggatccaacaggtccacaacttgtccacaaagggacagtacaacagaggatccggaaatttgatctactagctatgctccatgccattgtacataaactaccgacacgtaaaacagaaatcatcaaccaatgcaaaagtctggacaaaaagcacaatccaataacagagaagtattggccaaaagacaggaacgtcgaatacagagaagaaggtcatgacaaaggcaatgcaaaaggcttttgtgacggcatacctgaaacaagaagcggttggttagctattttcagctacacacttccattggaaaaaaaggataggaaactacaagccactgaaacagcaaagcttgattcaaacattgagtagcctagtaacacgatgttcctaatgtatgtagtctacaataataaagataacaaattgttcacataaaatagcaaatgtctttctaaattgagcttgtcagatccccaggggaaagcagtgccgcgaaggcatccattggctcaaaaacttctatattatctgcagactgcaagctacatggtgatagactgttcaattccatcattccatgcaaatcatacagaaagtagatgactgctggcaacacaatataacttaaaaggagtgaaaaatgcattgcactataaaactagaacatcaaaagatgaactaatattcaatatgaaagtaaaaacaatttacacaatgaaaattgcacaaaagtacatcagttccacaaggaaatgcagcctatacttctcagacaatgcgttacaatgtacaggcgtaagtactaagaattctgatggagtgataataagaatgtactatgttcttttcataggaataaactgtgcataggccttcactgggatatatttctcaatagcgcacacatagcatcggttaatgaaaagctacatgtttgttttccagcagttgaacaattactgataaacaaatacaaacaggaaaaaatgctttcagatgcaacaggcagaccatgagacaaactaagctggttggttagtgaagggtgagctaattaagcaccaatggacgaagccacaaactcggcatatcttataatcccttctacaaatcatacctaagctgcatagcatcgagcactactaggaaaactaccatatcagccggtggactgtacattctgttctgtaagaaacattggctatctggttggttggtgaatacctgaatgatgaagattaaggccctgtttgtttccttcctggattatataatccagcttatagattatataagcacctattgacctgcttatggattatcataatctaggtatctagattacataatccacctaataatctatattgtttgtttacctctcaacttatttaagctggattatataatctagagagtaagggcctgtttgtttacccccatggattatataatctggattatatagatgtaccagaagccacacataaaaataaatagatgttccacacataaacaataaatagatgttccacacatgaaagtaaatagatggtcctaacacacgaaaataaatagatgttcctaacataagccatccttagcgcagtgcctcttcaa

SEQ ID NO: 58076 - DNA, 1248 bp, Zea Mays
aattcccaccacgtgagcagaagcagcacaaccaagagccaacagagcaacgcccaggcacaaacgacacgaaccaggcaaccagctgccgagggaggaaccctagcggaacaggtgacggcggcgcgctaccggtgacgggggatacggcggcatcgtccccctcggcccctcctccatccccggcgcggcggcgccagcagccggcctgcagcttcaagaggctctggttgatattgagactgatgcagaaaaagttcttctggctagacatcagttggtggaaaatgataagataagaaatggtaacagggaggctctgacagcccttcggaaacaagctaggacgtccaagactagcgtgccatctccctttgaggtcataatgaaagagatggaaggaagctctggcaagcagctgataaaggagatatgcccaacttgtggagatcatgaccccaaggaacatacttggctaatgtttcctggatcagatatgttttctcgtgttccatttcatgtggcacacactgttgtggaaaaagaccaagaacgcctggatttggataccaagaaactgcaaagctttgtcaaggagaaatcacttgtgattgcggagaaaggcgccctagcaggcagattcggtgctgacactgtaaaatctttggtcagccttacagacacaactaaatcaacacgggagggcggggaggtgaagtaccagttttgttgagtcgtcaactgttcagccacaatatatttcttggatatccggtgtttgttcggtatatcccctgccggaagggattgaaggggattggtgttgtttaactcaattacctgcagtccacaccaaactgaacaaggctatatgtatagattttctttgcttttgtttggaacaaaattttgcatggttgttagcaattgcgaaaaaattgttctcgattgatgtgtgtattcttatttgctgtgagattgtggcatagtcagtgtgtagttcctgatgatgagctgggtgtagtcaaaggttctcaatctgtagtagtcatgtttgaaactgaagtaaaggtgggtggcgtatgaatttattcattcagctattccctctgtcccagaatagttgatgttttagggttgtacatatgaatttataagtataaaaatgatgtggcgcattgaaaacaaggagaaatacagatatattgggaaaaaaaagatgtgagcccggatccccttgtattcaaa

SEQ ID NO: 58077 - DNA, 1249 bp, Zea Mays
aattcccaccacgtgagcagaagcagcacaaccaagagccaacagagcaacgcccaggcacaaacgacacgaaccaggcaaccagctgccgagggaggaaccctagcggaacaggtgacggcggcgcgctaccggtgacgggggatacggcggcatcgtccccctcggcccctcctccatccccggcgcggcggcgccagcagccggcctgcagtttttcagctttataatggatcccaacatgaagcagcttcaagaggctctggttgatattgagactgatgcagaaaaagttcttctggctagacatcagggaggctctgacagcccttcggaaacaagctaggacgtccaagactagcgtgccatctccctttgaggtcataatgaaagagatggaaggaagctctggcaagcagctgataaaggagatatgcccaacttgtggagatcatgaccccaaggaacatacttggctaatgtttcctggatcagatatgttttctcgtgttccatttcatgtggcacacactgttgtggaaaaagaccaagaacgcctggatttggataccaagaaactgcaaagctttgtcaaggagaaatcacttgtgattgcggagaaaggcgccctagcaggcagattcggtgctgacactgtaaaatctttggtcagccttacagacacaactaaatcaacacgggagggcggggaggtgaagtaccagttttgttgagtcgtcaactgttcagccacaatatatttcttggatatccggtgtttgttcggtatatcccctgccggaagggattgaaggggattggtgttgtttaactcaattacctgcagtccacaccaaactgaacaaggctatatgtatagattttctttgcttttgtttggaacaaaattttgcatggttgttagcaattgcgaaaaaattgttctcgattgatgtgtgtattcttatttgctgtgagattgtggcatagtcagtgtgtagttcctgatgatgagctgggtgtagtcaaaggttctcaatctgtagtagtcatgtttgaaactgaagtaaaggtgggtggcgtatgaatttattcattcagctattccctctgtcccagaatagttgatgttttagggttgtacatatgaatttataagtataaaaatgatgtggcgcattgaaaacaaggagaaatacagatatattgggaaaaaaaagatgtgagcccggatccccttgtattcaaa

SEQ ID NO: 58078 - DNA, 917 bp, Zea Mays
aattcccaccacgtgagcagaagcagcacaaccaagagccaacagagcaacgcccaggcacaaacgacacgaaccaggcaaccagctgccgagggaggaaccctagcggaacaggtgacggcggcgcgctaccggtgacgggggatacggcggcatcgtccccctcggcccctcctccatccccggcgcggcggcgccagcagccggcctgcagaccaagaacgcctggatttggataccaagaaactgcaaagctttgtcaaggagaaatcacttgtgattgcggagaaaggcgccctagcaggcagattcggtgctgacactgtaaaatctttggtcagccttacagacacaactaaatcaacacgggagggcggggaggtgaagtaccagttttgttgagtcgtcaactgttcagccacaatatatttcttggatatccggtgtttgttcggtatatcccctgccggaagggattgaaggggattggtgttgtttaactcaattacctgcagtccacaccaaactgaacaaggctatatgtatagattttctttgcttttgtttggaacaaaattttgcatggttgttagcaattgcgaaaaaattgttctcgattgatgtgtgtattcttatttgctgtgagattgtggcatagtcagtgtgtagttcctgatgatgagctgggtgtagtcaaaggttctcaatctgtagtagtcatgtttgaaactgaagtaaaggtgggtggcgtatgaatttattcattcagctattccctctgtcccagaatagttgatgttttagggttgtacatatgaatttataagtataaaaatgatgtggcgcattgaaaacaaggagaaatacagatatattgggaaaaaaaagatgtgagcccggatccccttgtattcaaa

SEQ ID NO: 58079 - DNA, 1241 bp, Zea Mays
aattcccaccacgtgagcagaagcagcacaaccaagagccaacagagcaacgcccaggcacaaacgacacgaaccaggcaaccagctgccgagggaggaaccctagcggaacaggtgacggcggcgcgctaccggtgacgggggatacggcggcatcgtccccctcggcccctcctccatccccggcgcggcggcgccagcagccggcctgcagctttataatggatcccaacatgaagcagcttcaagaggctctggttgatattgagactgatgcagaaaaagttcttctggctagacatcagggaggctctgacagcccttcggaaacaagctaggacgtccaagactagcgtgccatctccctttgaggtcataatgaaagagatggaaggaagctctggcaagcagctgataaaggagatatgcccaacttgtggagatcatgaccccaaggaacatacttggctaatgtttcctggatcagatatgttttctcgtgttccatttcatgtggcacacactgttgtggaaaaagaccaagaacgcctggatttggataccaagaaactgcaaagctttgtcaaggagaaatcacttgtgattgcggagaaaggcgccctagcaggcagattcggtgctgacactgtaaaatctttggtcagccttacagacacaactaaatcaacacgggagggcggggaggtgaagtaccagttttgttgagtcgtcaactgttcagccacaatatatttcttggatatccggtgtttgttcggtatatcccctgccggaagggattgaaggggattggtgttgtttaactcaattacctgcagtccacaccaaactgaacaaggctatatgtatagattttctttgcttttgtttggaacaaaattttgcatggttgttagcaattgcgaaaaaattgttctcgattgatgtgtgtattcttatttgctgtgagattgtggcatagtcagtgtgtagttcctgatgatgagctgggtgtagtcaaaggttctcaatctgtagtagtcatgtttgaaactgaagtaaaggtgggtggcgtatgaatttattcattcagctattccctctgtcccagaatagttgatgttttagggttgtacatatgaatttataagtataaaaatgatgtggcgcattgaaaacaaggagaaatacagatatattgggaaaaaaaagatgtgagcccggatccccttgtattcaaa

SEQ ID NO: 58080 - DNA, 1149 bp, Zea Mays
atcatccgtgcctagaaaaccagccgccgaagcagatagatgaaccgatgaaggcggacgctgtcgcaggctcgcgccccagcctcgctttataatggatcccaacatgaagcagcttcaagaggctctggttgatattgagactgatgcagaaaaagttcttctggctagacatcagttggtggaaaatgataagataagaaatggtaacagggaggctctgacagcccttcggaaacaagctaggacgtccaagactagcgtgccatctccctttgaggtcataatgaaagagatggaaggaagctctggcaagcagctgataaaggagatatgcccaacttgtggagatcatgaccccaaggaacatacttggctaatgtttcctggatcagatatgttttctcgtgttccatttcatgtggcacacactgttgtggaaaaagaccaagaacgcctggatttggataccaagaaactgcaaagctttgtcaaggagaaatcacttgtgattgcggagaaaggcgccctagcaggcagattcggtgctgacactgtaaaatctttggtcagccttacagacacaactaaatcaacacgggagggcggggaggtgaagtaccagttttgttgagtcgtcaactgttcagccacaatatatttcttggatatccggtgtttgttcggtatatcccctgccggaagggattgaaggggattggtgttgtttaactcaattacctgcagtccacaccaaactgaacaaggctatatgtatagattttctttgcttttgtttggaacaaaattttgcatggttgttagcaattgcgaaaaaattgttctcgattgatgtgtgtattcttatttgctgtgagattgtggcatagtcagtgtgtagttcctgatgatgagctgggtgtagtcaaaggttctcaatctgtagtagtcatgtttgaaactgaagtaaaggtgggtggcgtatgaatttattcattcagctattccctctgtcccagaatagttgatgttttagggttgtacatatgaatttataagtataaaaatgatgtggcgcattgaaaacaaggagaaatacagatatattgggaaaaaaaagatgtgagcccggatccccttgtattcaaa

SEQ ID NO: 58081 - DNA, 2115 bp, Zea Mays
actgcgcagccaatcagacgcatgaaaactgccttccctcgctagtcaacccaaacccgtcggttccgattccgacctccaagcccgcggggacatcgcgaaacgaaatgggtggcgctagcgtcgatgtcgatggggcggcggaggcgtcctcgcctctcctcttgccccgctccgctccacgccccgcggtgtcggcggaggtgacaaggcaggtggggctcgcggcgccgctggtggcgtgcagcctgctgcagtactgcctgcaagtggtctccgtcatgttcgccgggcacctaggggagctctccctctccggcgcctccgttgccgcgtccttcgccaacgtcaccggattcagcgtcctgctgggcatgggaagcgcgttggatacgttctgtggacaatcatacggagcaagacaatatgacatgctggggacacacacgcaaagggcgataattgttcttatgttcacgggtcttcctctggcctttgttttggccttcactggtcaaatccttatcgctcttggtcaaaaccctgagatatcattcgaagctggattgtacgctcagtggttgattcctggcctgttcgcgtatggtttgcttcagtgccttaccaggttcctgcaggcccaaaacattgtccacatattggtagcttgctctggacttaccttgctacttcatgttatgctatgctggttgctggttcaaagtttcggccttggccacaaaggcgctgctctggcaacctcagtatcttactggttcaatgtggcactgctagctgtgtatgtgaaattctctgaagctggcagaagaagttggcatggatggtcaggggaggcactaaaattgaaggatgccaaagtgtatctaaagctagcaatcccatctacatttatgacctgcttggagtattgggcatttgagatggtggttctcctagcgggatttcttccagatccaaaactggaaacttcaattttgtcagtcaggtaagcaaacgaaacatggattgcctcctacctttcagtaatcgtaagttctattaaactgatcaatcttttcgatctgatgttgttctgtaacatggctgatcactgtgcagttgcattaattttcttcctcatgtcttgagatagttgtgtcttgttcatcaaccatgcactagtaatgatgtttcaagtgtttgatgtgaagtaactttgactcttttgaagcctaaacacaatgtggatggtctatacaattccaagtggcctaagcagtgcaataagtattagagtgtccaatgaactaggtgctgggaacccacatgcagcacgcctatcagtttatgtttcagggatcatgtgcctagctgagggtctttttttcgctgtcatcacagtattagtgcgagatgtctggggttatttgtacagcaatgaggaagaggtcgtgaagcatgtatcgattatgatgccaattcttgctacttctgacttcatggatggaatacaatgcacactatcaggggcggctcgaggatgcggctggcagaaagtatgctcggttatcaatctgtttgcttactatgctattggtctcccttcagctgttacttttgcatttgttctgaagattggtggtaagggcctttggttgggaatcatatgtgctatggcagtgcaaatatttgctctggtcgtcatgatgcttcaaaccaactggaatgaagaggctgaaaaggcccgagctagagttcagtgttcagatggcagcattacattgatctgaatgttatcagttgtgattacacctcccttaaagcctgcgagtcaagccgagccaagcctcctcttttagctcgttaagtggacgagccaagctactttgcttccagccctactttggtctatctccaaaatttgtcgaagggtgaacctgacaaaagcagagacgatgatctctggccaagaaagttgcatattggtgaatttgtatttttaacgactgcactcaattcctgttgaacagctgcatttcattctgaggaccaccgtgttagacgacgatcgctttgccgatagtcagctatctgcatttagtcatccaaaccgag

SEQ ID NO: 58082 - DNA, 1040 bp, Zea Mays
gtcgcgtgctcccccctgctgtgttctgatttgttgatcaaagaaccatggaaggatcgttccagttgaatcccaacgccagtcctttcatacctggattgctgggttcatctgcacaaaaagccccagaaaaacaaggaggtcttatcatttctgcagggtcatcatcaaagggagagccttctggtagcacctttgatccttctgagtatgaggaaaatgacatggatgaacttgctctagtcaaaatggtcttttcaatgttcccaaatgtctccacggacttcattgatgagttaatcaaggcaaatgattttgacatgaatctgactgttgatatgctttatgagctgaactcacaagatatggttcatgatgattctgaggttatcaatcattttcatgatgattctgaggctaccaatgaccttcatgatggcaagggcgtacctggtgctgattaccacaagactgtggtgcccgagagtagcagcaacatgaatcaagacctgcagaacgaggagtcagcaacaacttctgatgtgaaatctgtgctgccaaagttctcacagatcaatttgcttcacaatgacctgggcctgcctgatgatgataagtcagcggggacttctattgcaaattgatctttcatatcaaggcgctccgtttgacccgagttagtgggttatggtgtacatactagttgcacccagaagtagaagtgtggcttggaaggtcaaagcagcggaagcaactgtcccatttccgtttgccggaccagttaactgtttctggtggttatcctgactttgaaatcccctgttcagctccttttgggccgagtagttaggtatttctggtggtggttgtcatgagtttttacatctagttcgctcttcaagactgagtagtacttggtggtcatcctgattttgcatgtcagggttagctgtgttgggtttggtacccagttagtacaaacaatccaagttatggcgtggctgtccgttatgtgtgatgttgtgggagggttgcatcca

SEQ ID NO: 58083 - DNA, 1067 bp, Zea Mays
gtctgttgcgaacttggtataacgccgctcgctctccctgccgtgttctggtgcgcctcgcggccgggatcggatttgttgatcaaagaaccatggaaggatcgttccagttgaatcccaacgccagtcctttcatacctggattgctgggttcatctgcacaaaaagccccagaaaaacaaggagggtcatcatcaaagggagagccttctggtagcacctttgatccttctgagtatgaggaaaatgacatggatgaacttgctctagtcaaaatggtcttttcaatgttcccaaatgtctccacggacttcattgatgagttaatcaaggcaaatgattttgacatgaatctgactgttgatatgctttatgagctgaactcacaagatatggttcatgatgattctgaggttatcaatcattttcatgatgattctgaggctaccaatgaccttcatgatggcaagggcgtacctggtgctgattaccacaagactgtggtgcccgagagtagcagcaacatgaatcaagacctgcagaacgaggagtcagcaacaacttctgatgtgaaatctgtgctgccaaagttctcacagatcaatttgcttcacaatgacctgggcctgcctgatgatgataagtcagcggggacttctattgcaaattgatctttcatatcaaggcgctccgtttgacccgagttagtgggttatggtgtacatactagttgcacccagaagtagaagtgtggcttggaaggtcaaagcagcggaagcaactgtcccatttccgtttgccggaccagttaactgtttctggtggttatcctgactttgaaatcccctgttcagctccttttgggccgagtagttaggtatttctggtggtggttgtcatgagtttttacatctagttcgctcttcaagactgagtagtacttggtggtcatcctgattttgcatgtcagggttagctgtgttgggtttggtacccagttagtacaaacaatccaagttatggcgtggctgtccgttatgtgtgatgttgtgggagggttgcatcca

SEQ ID NO: 58084 - DNA, 498 bp, Zea Mays
atcaaagtacacagaatcgaaacgtagcaaacgtaaacaacccaccacaggcagctgactgggggaggtcgctagcctaatccccggactcgttgaagtcttggaactcctggagattcgcctcgacaccttctttacctgagcatagattgcaccaaaggcaacctggtgttttgtgaaagcaagggtgagtacacgtcaacgtactcagcaaatgtcccgtttggctgtagtggactagctttatgtggggttaaggtcaaagcagttgcttttagttggtcaagtatttattattagtggaagccaagttttagcaataaccaacccatgaatcatttcctcatcgaggaacatcattattatcatcgaaccaaaaccataaatagaaccattgtatctaagatcatctgtatctctaatcaaagaggatcccaaggccgctcataaccgtgagcacggctgatatatcagtttctaaccctctgcagaggtcgc

SEQ ID NO: 58085 - DNA, 1086 bp, Zea Mays
ctctagttcctctaattaattagctaagggcatcccatttcaccctcatggttgcactgttatcccgggtggtctctcaacgaacaggtccttacgaagaggtactcgagaaacagcccgagtccccttaaatgccacaagtatatcatcatatccagaataaaatcatagtatcatcattgtatctcatcatgttcattgattaaagtaaagcgctagcatgtagctaaccatagtaacccaaaaggtaaatcaaggacaaggtaattagagctagtaaatccttaggttgttcatagtatgcgggacagtgtattataaagtaaatgggacataatgggtcagaggacacttgccttcaccaaacagatgctcagagtcttcaactttgtaggacttgaagagcttgctcacttggtcaccaatgtttgaccgtcgattcctcgaagctcggaaacgaatcgcgatctattcgcgacgcatagcgaatacaaacaagaacaaacaaacaaacatatatatatacgcataagaacattacaccatacaagataaaatgtaataaaacatgcaatacgaaaaggaacgcgttactacggtcacgcgaggaaaaagaaacgcgacagtcgaagctacggtcgagaagttatcgcgtttacgctaaacgaatataaaataggacatttaattcggtgttatcaaatataaattataactactatttaattagagcgagagattctaggcgagacgaatttacaatgcgcgaaacagtacagcagcgtgtagacgacgcgcagacaagcgcgacaaagcacacgaacgccccacgagacagtgcgcgcgatgagcgcgaacgacgcgcgaaccggcacgtcaccacatgtggaataacacgcgcgataggcgagagactaaataggtgacgcgtttatactaaacaagtattaataagaatatttaatttgatataattatattaattagcatttatgaaatatagattaaagctacttagttttgactaacttactgtttttattgtggatgattaaataaataaataattaactgacatgagtgatt

SEQ ID NO: 58086 - DNA, 1687 bp, Zea Mays
gtccgagcgaccggcgcatggcagccaccgtgcgtctctgtccggtgggccgcggcccgcggcccgcaaaccaatgcccgagcacctcccctcgcctctacccgagcacctcccctcaagagcgcctccctcgccggagtcagacacgcctccccccgccgcgcgcatctctgcctaagcgccgctccgcccctcccctacgagagcactcttcgcccaaggttgcaggctgcagccaccaggcctctacggtggaggagaagaatggaggatgctgccaaacggttgagatgagactccgcttcacaagacagtctccacggtttctctgcaatgggtagctcactgcagtctgatggaaattggagagatgcctgctgcttggacccttccctctgcaccaacttgacaatcccacaaatttgcatgtttggcaacaacttgagcaacagaatcctctgtttttcaaagcatacgatatgaggctaatgcttaagaatcaaataatggtcttcaacaggcttctccaggatcagttcgagattatgaataaagagttttcttcagggatcccttctatgtctcttcctaatgactctaattccaacctattgaagcaagattcatgctttttgccagagactgctcctggaaatgcaatgccagatggtataatgcacaatggaagttcaagtggtataataaatgacacaccatctggcgatcagttacttaatgctagtaaagacttgcatggccttcatagtcaaatagatgcttcaactagtctacagtcagaccagaatgcaactgctgtgctgtatggtgtagacaacgagacaagcgcaacaataaagaccgagtcttgctactcgagtaatgctgattttgccttctgtgggaacactttcctggaatcatgccagtcgataggtgatgcatctggtggtggatccttcagcagctcagagttgaatgggcaaccactaaacgattcaattttggatatggagtcatcatcatttagcttcttgaaccaaatgccccaaagcttcatgttttcagacctggcagatgatttcaaccaaaatgcagaaataacaccatttctcactcctgagacaaatttctccgattcaacagggggagaccatacaggttgagcgggtcatgcacagcgtaccaaccatttgtacataggcacatgggcagtcgaatctgcattggtgaagaacttgaggaccttttgatctagcttgtttatttctctagtttttgcgtcttgatattgtggtagtttggggcttcgggtctggtgggttgtctagcccatcagaacgcgtaatgggtacggagtattggtcttccagtatgttttcagcgttaatttggctaatttcccccgcttggcttgtacaacaaattttatcagtactgagtaccatgagttgtactgctgtatatgctgcttcccactctctgaattggcagaatgattgatgagaagacactgcttggaggagttgcctcagtttcacactgcatgtatgcagcaagttttggacaagaactcatcagctgcttggaatttcaatagtaaacacctggacacaaaatacaacacaactacatttcctatttactgtgataacagtctaaaaaaatcatccagtttctttgacgagaa

SEQ ID NO: 58087 - DNA, 5252 bp, Zea Mays
ccgagcgaccggcgcatggcagccaccgtgcgtctctgtccggtgggccgcggcccgcggcccgcaaaccaatgcccgagcacctcccctcgcctctacccgagcacctcccctcaagagcgcctccctcgccggagtcagacacgcctccccccgccgcgcgcatctctgcctaagcgccgctccgcccctcccctacgagagcactcttcgcccaaggttgcaggctgcagccaccaggcctctacggtggaggagaagaatggaggatgctgccaaacggttgagatgagactccgcttcacaagacagtctccacggtttctctgcaatgggtagctcactgcagtctgatggaaattggagagatgcctgctgcttggacccttccctctgcaccaacttgacaatcccacaaatttgcatggtgagttggtgacctcaccctgcaagttgcacgtgccagcggggaattccccaagtatcacctctgtctccgctggatccatcagtgttcagtgaggctatttgtggtgatggcagcgtgggacgtcatttctttgaaccgcatgatcactggtttcattcgagatggtaccagcaaccgagcacttgtagtttacaagtggatggttgcttcaggcctgagagagacccctcacaccttctctgcagttctcggtgcgtgcaacagctgcgaggggctgcaactgcatggccgggtactggcattgggcctgcgctccaacccgttcgtcatgtctgcgttggtcaacctgtatatgcgcgttgaaacaccttgtgctgccctcctgctgtatgacgagatgccattgcagagcacagccatgtccaacgctgttctgggtggcttgtgcaacctgaagttggccgaggacctcttccgatctttgctagacatgagacggcgtggtctggagttgaatggcctttcctactgctacgcgatgaaagcatgctaccaagatgaggactggctggaacaaggcaggcagctgcacggagtggttctcaaggcagggtgggttccgtcgaacattttcctgtcgaactcgcttgtggatctctacgcagcaaccggagacttggtggacgctaagagttctctcgatgacatcccttctgaggacgtcatctcgtggaactccatcgtctctgtctgcgcgagcaaagggcgtacgaaggaagcaactggttacttgaggcagatgctttggcacggcaagacgccctcagtccgctcctttgttgggctcttcgccttatctggtcagaccggacacctccaagttggggttcagatgcacggtatcgctcttaagctcgggttcagctggagcagcgcgcacgtccagactgcactcattagcatgtatgggaactgctgccattttgattgttgcttggcaatcttcaacgaaaccccaagccttgcactggagtgctataatgcaatgatcacgtcatcaattggctgcaaggttttccactccgcgctggaggtcttgtactgtatggttgtcgagggagttatgcctgacaacgtgacgctatctgcgaccatgaaggccatatctttgtcagcttcgccgagtctaatcagctgccagatgctgcattcctgggtcttcaagctgggcttcgaagcggacatggttgtgtgctcctccttgatcagcgcatacgctcgagccggtcaggtgcacagctcccgctcggtgttcgaaagcctgcggagcccaaacgtcgtctgcttcacttcgatgatatctgcgtgcgcgcgacacggagatggcgcaaaaggagtggagctgctcagggagatggtttgtagggggctcaaacctgatgacgtcaccttcctgtgcgcgatcactggatgtgatcaggcaggactgattgaggaaggcaggctggtgtttgagtttatgagagcgacccgcgagctgggccctgacgagaggcacttggcctgcatggttaaccttctcggccgagacgggtttgtggaggaggcgatgaaggtgatgatggagcagcactcgccgctgcggcactacaccaaggcgtggagctcgctcgtccagagttgcaaggcacatggcgaagacgcgctgggaaggagagcggcagatacgctggtagacatgggacgagaggacgcggccaccagcttgcaggtgtcgagatacttctacgagattggggacggcgagaatgtctcgaggattaaaggcatggcaagtgggcaacgggtgaaggagatcagcggtcgcagctcggtcgagatcggccacggaataatctagcagccgaggttaaagaacggtatggattgttcaattccgtagttggctggctggttggttggttcacaatgtttaatatacaactgatggtctgaacggatgggagataggaaataccaaagtagaatctctttaggtggatcggggaattgttgtgtttagtactcatcaatatgtgattatcgaagcttcacaacttgaacatgataacaatttctggtgaaaacaatcgagttccaattcaaccacatactgcttggttggttggttcacaaagtttgagctggtactggcaacctacgcatcgcaggaggaaaggccatgctgccagcgtactaggtctggggcacaagctctccttgctccagatctgaatcttgggcaaggcacatgttgtctgtgcaggcaggctggtctcattcgtctttcctatcgtcttttcggacactgcttgctctcacaatctggggcccgtcgaatgtctctgcacttggcagcaacaggatggtgcccctcctccctgtactgtacttacgtggatgcgaagtgcaactgtgcagtgcagtttcctgaaagcggaaaaggccaaaccgggtggtgcaaatgtgtaaacagagtgtagtttgaaacaaggagtcaaatatgtgttagggcagtgatgctgttggagataaacttaagcatgcagtatagatatacgatgatgctgatggtggtgcgtctttgtatattttattttatttgtgctccccaccaccaccaccatcacacacctacctaccaccagttgccatccatccaatcatgcagtgacactaatagctgttatacaaagacgaaaacacactctgttcctgttagttacttggtaaactgaagttgggtttaggactctgagctgggctggtacagtgacatgataaaccaccagtaaatggcctgaaatgaaaagacagacagcgcatggatacccaactgtgtggcacaaacaagcagtgaaacaatgtgaatcaggaaacaaaagagaagaaaagaaaataaaggagaaagattcagtggtggtgctgggtgcggggtgtatcaaatatttccctgagccccggataaccggattccagagcggcggcctgcgacaggaacagtgggtggggccgggagcgcctctcgctctccactaccagtccaccacctcgctcgcagctctttcctcctccttttccttccttttttctttttttcccagcccacctcgctcgctcccttcccttcccagtggaagtggattggttgattgatcgcacagagctcgcctcacatccacacagcccgagctgctgcccgcccacccgcctgtagctcccctcctcacggagcaggcaggcaggcaggctgggattcccgtcgaagcagggcaggagctagggcgggtggaggagcctttgcccgggaacgaggagaggaggtggcagtggcaccccgcggctagggcagcgagagaggggcgaagaggaaggcggcgggcgcgtccgccatggctagcgaggaagtactccacaaggtccagaatcttatagagcgctgccttcagatgtacatgaacaagaaagaagtggttgatgccctctcccaccactccaggatagagccttgtatcactgaacttgtttggcaacaacttgagcaacagaatcctctgtttttcaaagcatacgatatgaggctaatgcttaagaatcaaataatggtcttcaacaggcttctccaggatcagttcgagattatgaataaagagttttcttcagggatcccttctatgtctcttcctaatgactctaattccaacctattgaagcaagattcatgctttttgccagagactgctcctggaaatgcaatgccagatggtataatgcacaatggaagttcaagtggtataataaatgacacaccatctggcgatcagttacttaatgctagtaaagacttgcatggccttcatagtcaaatagatgcttcaactagtctacagtcagaccagaatgcaactgctgtgctgtatggtgtagacaacgagacaagcgcaacaataaagaccgagtcttgctactcgagtaatgctgattttgccttctgtgggaacactttcctggaatcatgccagtcgataggtgatgcatctggtggtggatccttcagcagctcagagttgaatgggcaaccactaaacgattcaattttggatatggagtcatcatcatttagcttcttgaaccaaatgccccaaagcttcatgttttcagacctggcagatgatttcaaccaaaatgcagaaataacaccatttctcactcctgagacaaatttctccgattcaacagggggagaccatacaggttgagcgggtcatgcacagcgtaccaaccatttgtacataggcacatgggcagtcgaatctgcattggtgaagaacttgaggaccttttgatctagcttgtttatttctctagtttttgcgtcttgatattgtggtagtttggggcttcgggtctggtgggttgtctagcccatcagaacgcgtaatgggtacggagtattggtcttccagtatgttttcagcgttaatttggctaatttcccccgcttggcttgtacaacaaattttatcagtactgagtaccatgagttgtactgctgtatatgctgcttcccactctctgaattggcagaatgattgatgagaagacactgcttggaggagttgcctcagtttcacactgcatgtatgcagcaagttttggacaagaactcatcagctgcttggaatttcaatagtaaacacctggacacaaaatacaacacaactacatttcctatttactgtgataacagtctaaaaaaatcatccagtttctttgacgagaa

SEQ ID NO: 58088 - DNA, 1714 bp, Zea Mays
gagcacctcccctcgcctctacccgagcacctcccctcaagagcgcctccctcgccggagtcagacacgcctccccccgccgcgcgcatctctgcctaagcgccgctccgcccctcccctacgagagcactcttcgcccaaggttgcaggctgcagccaccaggcctctacggtggaggagaagaatggaggatgctgccaaacggttgagatgagactccgcttcacaagacagtctccacggtttctctgcaatgggtagctcactgcagtctgatggaaattggagagatgcctgctgcttggacccttccctctgcaccaacttgacaatcccacaaatttgcatggtccagaatcttatagagcgctgccttcagatgtacatgaacaagaaagaagtggttgatgccctctcccaccactccaggatagagccttgtatcactgaacttgtttggcaacaacttgagcaacagaatcctctgtttttcaaagcatacgatatgaggctaatgcttaagaatcaaataatggtcttcaacaggcttctccaggatcagttcgagattatgaataaagagttttcttcagggatcccttctatgtctcttcctaatgactctaattccaacctattgaagcaagattcatgctttttgccagagactgctcctggaaatgcaatgccagatggtataatgcacaatggaagttcaagtggtataataaatgacacaccatctggcgatcagttacttaatgctagtaaagacttgcatggccttcatagtcaaatagatgcttcaactagtctacagtcagaccagaatgcaactgctgtgctgtatggtgtagacaacgagacaagcgcaacaataaagaccgagtcttgctactcgagtaatgctgattttgccttctgtgggaacactttcctggaatcatgccagtcgataggtgatgcatctggtggtggatccttcagcagctcagagttgaatgggcaaccactaaacgattcaattttggatatggagtcatcatcatttagcttcttgaaccaaatgccccaaagcttcatgttttcagacctggcagatgatttcaaccaaaatgcagaaataacaccatttctcactcctgagacaaatttctccgattcaacagggggagaccatacaggttgagcgggtcatgcacagcgtaccaaccatttgtacataggcacatgggcagtcgaatctgcattggtgaagaacttgaggaccttttgatctagcttgtttatttctctagtttttgcgtcttgatattgtggtagtttggggcttcgggtctggtgggttgtctagcccatcagaacgcgtaatgggtacggagtattggtcttccagtatgttttcagcgttaatttggctaatttcccccgcttggcttgtacaacaaattttatcagtactgagtaccatgagttgtactgctgtatatgctgcttcccactctctgaattggcagaatgattgatgagaagacactgcttggaggagttgcctcagtttcacactgcatgtatgcagcaagttttggacaagaactcatcagctgcttggaatttcaatagtaaacacctggacacaaaatacaacacaactacatttcctatttactgtgataacagtctaaaaaaatcatccagtttctttgacgagaa

SEQ ID NO: 58089 - DNA, 3284 bp, Zea Mays
gagttggtgacctcaccctgcaagttgcacgtgccagcggggaattccccaagtatcacctctgtctccgctggatccatcagtgttcagtgaggctatttgtggtgatggcagcgtgggacgtcatttctttgaaccgcatgatcactggtttcattcgagatggtaccagcaaccgagcacttgtagtttacaagtggatggttgcttcaggcctgagagagacccctcacaccttctctgcagttctcggtgcgtgcaacagctgcgaggggctgcaactgcatggccgggtactggcattgggcctgcgctccaacccgttcgtcatgtctgcgttggtcaacctgtatatgcgcgttgaaacaccttgtgctgccctcctgctgtatgacgagatgccattgcagagcacagccatgtccaacgctgttctgggtggcttgtgcaacctgaagttggccgaggacctcttccgatctttgctagacatgagacggcgtggtctggagttgaatggcctttcctactgctacgcgatgaaagcatgctaccaagatgaggactggctggaacaaggcaggcagctgcacggagtggttctcaaggcagggtgggttccgtcgaacattttcctgtcgaactcgcttgtggatctctacgcagcaaccggagacttggtggacgctaagagttctctcgatgacatcccttctgaggacgtcatctcgtggaactccatcgtctctgtctgcgcgagcaaagggcgtacgaaggaagcaactggttacttgaggcagatgctttggcacggcaagacgccctcagtccgctcctttgttgggctcttcgccttatctggtcagaccggacacctccaagttggggttcagatgcacggtatcgctcttaagctcgggttcagctggagcagcgcgcacgtccagactgcactcattagcatgtatgggaactgctgccattttgattgttgcttggcaatcttcaacgaaaccccaagccttgcactggagtgctataatgcaatgatcacgtcatcaattggctgcaaggttttccactccgcgctggaggtcttgtactgtatggttgtcgagggagttatgcctgacaacgtgacgctatctgcgaccatgaaggccatatctttgtcagcttcgccgagtctaatcagctgccagatgctgcattcctgggtcttcaagctgggcttcgaagcggacatggttgtgtgctcctccttgatcagcgcatacgctcgagccggtcaggtgcacagctcccgctcggtgttcgaaagcctgcggagcccaaacgtcgtctgcttcacttcgatgatatctgcgtgcgcgcgacacggagatggcgcaaaaggagtggagctgctcagggagatggtttgtagggggctcaaacctgatgacgtcaccttcctgtgcgcgatcactggatgtgatcaggcaggactgattgaggaaggcaggctggtgtttgagtttatgagagcgacccgcgagctgggccctgacgagaggcacttggcctgcatggttaaccttctcggccgagacgggtttgtggaggaggcgatgaaggtgatgatggagcagcactcgccgctgcggcactacaccaaggcgtggagctcgctcgtccagagttgcaaggcacatggcgaagacgcgctgggaaggagagcggcagatacgctggtagacatgggacgagaggacgcggccaccagcttgcaggtgtcgagatacttctacgagattggggacggcgagaatgtctcgaggattaaaggcatggcaagtgggcaacgggtgaaggagatcagcggtcgcagctcggtcgagatcggccacggaataatctagcagccgaggttaaagaacggtccagaatcttatagagcgctgccttcagatgtacatgaacaagaaagaagtggttgatgccctctcccaccactccaggatagagccttgtatcactgaacttgtttggcaacaacttgagcaacagaatcctctgtttttcaaagcatacgatatgaggctaatgcttaagaatcaaataatggtcttcaacaggcttctccaggatcagttcgagattatgaataaagagttttcttcagggatcccttctatgtctcttcctaatgactctaattccaacctattgaagcaagattcatgctttttgccagagactgctcctggaaatgcaatgccagatggtataatgcacaatggaagttcaagtggtataataaatgacacaccatctggcgatcagttacttaatgctagtaaagacttgcatggccttcatagtcaaatagatgcttcaactagtctacagtcagaccagaatgcaactgctgtgctgtatggtgtagacaacgagacaagcgcaacaataaagaccgagtcttgctactcgagtaatgctgattttgccttctgtgggaacactttcctggaatcatgccagtcgataggtgatgcatctggtggtggatccttcagcagctcagagttgaatgggcaaccactaaacgattcaattttggatatggagtcatcatcatttagcttcttgaaccaaatgccccaaagcttcatgttttcagacctggcagatgatttcaaccaaaatgcagaaataacaccatttctcactcctgagacaaatttctccgattcaacagggggagaccatacaggttgagcgggtcatgcacagcgtaccaaccatttgtacataggcacatgggcagtcgaatctgcattggtgaagaacttgaggaccttttgatctagcttgtttatttctctagtttttgcgtcttgatattgtggtagtttggggcttcgggtctggtgggttgtctagcccatcagaacgcgtaatgggtacggagtattggtcttccagtatgttttcagcgttaatttggctaatttcccccgcttggcttgtacaacaaattttatcagtactgagtaccatgagttgtactgctgtatatgctgcttcccactctctgaattggcagaatgattgatgagaagacactgcttggaggagttgcctcagtttcacactgcatgtatgcagcaagttttggacaagaactcatcagctgcttggaatttcaatagtaaacacctggacacaaaatacaacacaactacatttcctatttactgtgataacagtctaaaaaaatcatccagtttctttgacgagaa

SEQ ID NO: 58090 - DNA, 2305 bp, Zea Mays
tggcctgaaatgaaaagacagacagcgcatggatacccaactgtgtggcacaaacaagcagtgaaacaatgtgaatcaggaaacaaaagagaagaaaagaaaataaaggagaaagattcagtggtggtgctgggtgcggggtgtatcaaatatttccctgagccccggataaccggattccagagcggcggcctgcgacaggaacagtgggtggggccgggagcgcctctcgctctccactaccagtccaccacctcgctcgcagctctttcctcctccttttccttccttttttctttttttcccagcccacctcgctcgctcccttcccttcccagtggaagtggattggttgattgatcgcacagagctcgcctcacatccacacagcccgagctgctgcccgcccacccgcctgtagctcccctcctcacggagcaggcaggcaggcaggctgggattcccgtcgaagcagggcaggagctagggcgggtggaggagcctttgcccgggaacgaggagaggaggtggcagtggcaccccgcggctagggcagcgagagaggggcgaagaggaaggcggcgggcgcgtccgccatggctagcgaggaagtactccacaaggtccagaatcttatagagcgctgccttcagatgtacatgaacaagaaagaagtggttgatgccctctcccaccactccaggatagagccttgtatcactgaacttgtttggcaacaacttgagcaacagaatcctctgtttttcaaagcatacgatatgaggctaatgcttaagaatcaaataatggtcttcaacaggcttctccaggatcagttcgagattatgaataaagagttttcttcagggatcccttctatgtctcttcctaatgactctaattccaacctatgtaagacctttctttccagccttatcatgggcagggattgctcataattatttaacttagtgttctgatttgccttccggagtgaagtgctgtaacaatctgatggaatataaggcgtacatgttactttgcaaagtgatttaaccattgtataagttcaacaaatctggcattcattcggttgaagttttgttttttctcatgagatctcattcacacctgcacaaatacactcctctttcacttgctaataaattcaccttttgctatctccctagtctggcactttaatttggccactttatttacttgtttcagtgaagcaagattcatgctttttgccagagactgctcctggaaatgcaatgccagatggtataatgcacaatggaagttcaagtggtataataaatgacacaccatctggcgatcagttacttaatgctagtaaagacttgcatggccttcatagtcaaatagatgcttcaactagtctacagtcagaccagaatgcaactgctgtgctgtatggtgtagacaacgagacaagcgcaacaataaagaccgagtcttgctactcgagtaatgctgattttgccttctgtgggaacactttcctggaatcatgccagtcgataggtgatgcatctggtggtggatccttcagcagctcagagttgaatgggcaaccactaaacgattcaattttggatatggagtcatcatcatttagcttcttgaaccaaatgccccaaagcttcatgttttcagacctggcagatgatttcaaccaaaatgcagaaataacaccatttctcactcctgagacaaatttctccgattcaacagggggagaccatacaggttgagcgggtcatgcacagcgtaccaaccatttgtacataggcacatgggcagtcgaatctgcattggtgaagaacttgaggaccttttgatctagcttgtttatttctctagtttttgcgtcttgatattgtggtagtttggggcttcgggtctggtgggttgtctagcccatcagaacgcgtaatgggtacggagtattggtcttccagtatgttttcagcgttaatttggctaatttcccccgcttggcttgtacaacaaattttatcagtactgagtaccatgagttgtactgctgtatatgctgcttcccactctctgaattggcagaatgattgatgagaagacactgcttggaggagttgcctcagtttcacactgcatgtatgcagcaagttttggacaagaactcatcagctgcttggaatttcaatagtaaacacctggacacaaaatacaacacaactacatttcctatttactgtgataacagtctaaaaaaatcatccagtttctttgacgagaa

SEQ ID NO: 58091 - DNA, 1517 bp, Zea Mays
tgctgctgcctgctggtaccgtaccgactccgcgtcaaggaacatgctgctttcgggccccatgttcaaattgctaacctagggtttgggtggaacaccaagggtctagacagacatctagaagagtttgtgtatgcttattttgatggattggtccagaatcttatagagcgctgccttcagatgtacatgaacaagaaagaagtggttgatgccctctcccaccactccaggatagagccttgtatcactgaacttgtttggcaacaacttgagcaacagaatcctctgtttttcaaagcatacgatatgaggctaatgcttaagaatcaaataatggtcttcaacaggcttctccaggatcagttcgagattatgaataaagagttttcttcagggatcccttctatgtctcttcctaatgactctaattccaacctattgaagcaagattcatgctttttgccagagactgctcctggaaatgcaatgccagatggtataatgcacaatggaagttcaagtggtataataaatgacacaccatctggcgatcagttacttaatgctagtaaagacttgcatggccttcatagtcaaatagatgcttcaactagtctacagtcagaccagaatgcaactgctgtgctgtatggtgtagacaacgagacaagcgcaacaataaagaccgagtcttgctactcgagtaatgctgattttgccttctgtgggaacactttcctggaatcatgccagtcgataggtgatgcatctggtggtggatccttcagcagctcagagttgaatgggcaaccactaaacgattcaattttggatatggagtcatcatcatttagcttcttgaaccaaatgccccaaagcttcatgttttcagacctggcagatgatttcaaccaaaatgcagaaataacaccatttctcactcctgagacaaatttctccgattcaacagggggagaccatacaggttgagcgggtcatgcacagcgtaccaaccatttgtacataggcacatgggcagtcgaatctgcattggtgaagaacttgaggaccttttgatctagcttgtttatttctctagtttttgcgtcttgatattgtggtagtttggggcttcgggtctggtgggttgtctagcccatcagaacgcgtaatgggtacggagtattggtcttccagtatgttttcagcgttaatttggctaatttcccccgcttggcttgtacaacaaattttatcagtactgagtaccatgagttgtactgctgtatatgctgcttcccactctctgaattggcagaatgattgatgagaagacactgcttggaggagttgcctcagtttcacactgcatgtatgcagcaagttttggacaagaactcatcagctgcttggaatttcaatagtaaacacctggacacaaaatacaacacaactacatttcctatttactgtgataacagtctaaaaaaatcatccagtttctttgacgagaa

SEQ ID NO: 58092 - DNA, 914 bp, Zea Mays
aaatttattttgcagtttatcatattgaaattgaatctgcgcttctgctctccacaaagacgccaacaaaaagtatggcagtgaaaaaatagcttatgaagtttcactgattctctcaaaatggctcacctacagccttgcattctgtagttttttttgtgttatagaaatcccttatggttgcaggctaattggcacttttttctctctctgtccttttcagtttggcaacaacttgagcaacagaatcctctgtttttcaaagcatacgatatgaggctaatgcttaagaatcaaataatggtcttcaacaggcttctccaggatcagttcgagattatgaataaagagttttcttcagggatcccttctatgtctcttcctaatgactctaattccaacctattgaagcaagattcatgctttttgccagagactgctcctggaaatgcaatgccagatggtataatgcacaatggaagttcaagtggtataataaatgacacaccatctggcgatcagttacttaatgctagtaaagacttgcatggccttcatagtcaaatagatgcttcaactagtctacagtcagaccagaatgcaactgctgtgctgtatggtgtagacaacgagacaagcgcaacaataaagaccgagtcttgctactcgagtaatgctgattttgccttctgtgggaacactttcctggaatcatgccagtcgataggtgatgcatctggtggtggatccttcagcagctcagagttgaatgggcaaccactaaacgattcaattttggatatggagtcatcatcatttagcttcttgaaccaaatgccccaaagcttcatgttttcagacctggcagatgatttcaaccaaaatgcagtataagttatttgtcttgttttggg

SEQ ID NO: 58093 - DNA, 2984 bp, Zea Mays
aaaactttctctcttttcttgttaaaaaaacggagctcgagctctactccccatatcatggcgttaccactagtttactactactcgtacagacccacccgatacgacgatcgccgcccgtcgccggccttgcatgtgaccttgtcggagacggtgacccccggtcctgctgccattttgccaccacgacaggtcccaagtacacttggtccagtcctccactgcttgcacggcgccgcgtctgccagccggcaagatcgataaacaacccgaatcacggcacggtacgacgagcagatatgttgatgatcatggagtgaacagcaaccactgcgggcggtggatctaaacaacaacgaacaactcgctgctgctgctgctgatgctacaggaggagaagaaagaatccgcggagcctttgaatccaatccgatcgaacgcaaccaaacctcgaaatggagcaacttttaaactactacaacaagtgagaaaaatagcggggcgggagggaaagaacgagcgctacagtgcaagatgtactgaagcgtcacggcgactcttgtcactggccgtggccggtggatcagcgcgcggccagctagttgctcttgtacggcggcgggggcgacgcgtaggacacggggtacacgggcgggagcggcggcgggggcgacgagtaggacacgccgtggacgggcgagaacgacggcgggttccccgctgctgggtcggacggcggcggaggcggcgacgagtaggccacgccgtgcacgggcgggaacggtaggacgccgccgctgctgccaggtgccgatggcggggtgtgctcctggctgctgccgtggtcgcctggggacggagggtggtagccgggcgtgggtggcaacgaccctggcgcaccgggagtcgtcggcgggaacgtcgatcctggagtcgtcggcgtgggtggcaacgaccctggtgcgcccggggtcgtcggcgggaacgtcgaacctggcgtgcccggagtcgtcggcgtggatggcaacgaccctggtgcgccgggggtcgtcggcgggaatgtcgaacctggcgtgcccggagtcgtcggtgtggacggcgatcctggtgtgcccggcgggtacgctgatcctggtgtgccgggagccgttggcgtgtgcggcggccagacgccaccggggtgctctgtgggtggtggtacgcctacgggttgacccgacggtgcccactgggaccacggcggcggctggtagcctgacggcggagccgagccaccatgggacgaaggcggcattgatggcttggggctattgccgtctgcgggcggcgacgggtacgacggcgtggtggagctccctggtggggatgggtgcgacggtgttgtggagctccctggcggggacgggtgcgacggtgtcgtggagctccctggtggcgacggggtggtagagctccctggcggggatgggtgcgacggtgtcgtagagctccctggtggcgacgggtatgccggtgtgttggagctccctggcggagaagggtacgacggcgtgttggagctccctggcggggatgggtgcgacggtgtcgtggagctccctggtggcgacggtgttgtggagctccctggcggggacggtggctgtgaaggtccaccggggcccgacccaggcgggccggacgtcggaggcggctggcattgcgccgtcctgcagtcgaacggcgcggccgcggcggcgcactgtggcggtgggcgctgcgcaggagcgccagggatgcagttccagcgcccgtcagccgtggcgaccgcgcacccagggcgcgaggtgaagaagttgtcctcgtaggtgaagttcctgagcgtcccctgcaggccgcacaccgccggcggcacggggcccctgagcaggttcccggcgacgttgagctgctggagggcggccatcccgccgacggcgggcgggagcgggccctggaggtggttgccgctgacgtcgaacaccgtgagcttcgtgagcaggccgacctgcggcgggacgcagccggtgaggtcgtcgtcgatgaggacgatctcgttgagcgtggccgccatcctccctatcgacggcgggatgcagccgccgaggcggttgtgcgcgagcacgagcacggaggccggcgagttgccgaggttggccgggatgggcccgcggaggcggttggagttgaggaggatggcgtcgagcgggcggtcgaagagcggcggcgggatggggccctcgaagtcgttgaagcggaggtcgaggtagcggagcgaggggagcgcgagcacgacggcggggaaggcgccgacgaagcggttgttgctgaggtcgagctcgtggaggaggcgcaggtggagcagcgtgtccggcagcaccccgcagaagcggttggagttgaggtggagcagcgccaggtcgggcacgccgagggggaggtcggcggggatgtggcccgcgatgtcggcgtggttgaggtcgatgccggccacggccagcgccccgtcggagggccgcggcgcgcagtagatgccgttgtacgcgcacacgttggggcccgcccagttggaggtgaagttggacgggtcggagaagatggccgtccgcttccacgcctgcagcgccgcgtacgccgcctgcagcgccgggctcgtcggcggctgcgctgctgcggggcgcgcgagggtgagtgtgaggaggaggaggaggaggaggaggttgcgccacccgctggtgatgctgcctcctgcgctggaagcgggaggagcggggatcatggccggcagccgcggcggtgtgccggtggcggcgcggtggttttggtgggggagagactggagagagaggggagtggacagtggagtgaaggaggcgggcgcgggtggcagtgatgtgcagcgcacggtgtccctttgtcaggggcggggtcaggtcacatggcaagcgtaactacgcggaggtccg

SEQ ID NO: 58094 - DNA, 3668 bp, Zea Mays
cgcattcccccgatccggccccgcctgacccccgctgccacggcagctcgacccgaccgaccaactcgccggccggcaggcgccacgtagaaagacacggctcttcaattgttaacgtagaagtataggatggctgtatcactatgctatttctgccccgggctcacaacacggtcccggatgcccgtgaagcggtacaagaagatccttgctgaaatcttccccaaaacacaggatgaagagcctaacgagagaaggattgggaagttgtgcgagtacgcttcgaaaaaccctcttcgagtgccaaagatcacagtttacttggagcagcacatttaccgggacttaagaagtgagcagtacggctttgcaaaagtggtgatgttgatatatcgcagactgtcggtttcctgtaaagaacagatgcctctgtttgcaagtagcctattaagcattgtgcacactcttttagaccaaaagaggcaggacgatttgcgcattgttgggtgtgaaaccttgtttgattttactgtcaatcaggtggatggtacatatcagttcaatttggaagggctggtcccaagactgtgtgaaatagcccaagaagtaggagaagatgaaagggcaagtgccctacgagcggcagccctgcaatctctttcagctatgatctggtttatgggggagctttctcatatctcgtcagagtttgacaatgttgttcaagttgtactggaaaactacaaacctcagaagatgcaaaatgatgatcaaagtaccaatgatgctgacaaccagttggtgcaggaagaccagaaggctgagcacccgccttcccctttcattatcactccggccccctcttgggagaacatagttaatgccaagggaggaatcaacctgccagaggaagatgttagggatcctaaggtttggtccagaatctgtgtgcacaatatggccaagctttctagggaggcaaccacattccgccgcatcttggaatgtttgtttcggtactttggtaacaatagttcatggttatcagaaaatggacttgctttgtgtgtcttgttggacatgcaacttttagtagaaagttcaggacaaaatatgcatttaatgttgtcacttttgataaaacatattgagcacaagacaatgttgaagcagccagacatgcagcttagcatcgtggaggtggcagctacccttgcagaacaatccagtgctatcgcttcaccagcaactgtaggtgccataagtgatcttgtgaggcatttgaaaaggacattccatattactcttggcagcaaagatatggaattagtaaaatggaacgaaaaattccggaagggcatagatgaatgcctagttcagctgtcaaagaaggtgtctgatgctgggccagttcttgacatgatggctgttatgctagaaaacattgcgagcactcctgttgtagctagatcaactgcagctgctgtttatcgcacagctcagataatcgcttctgtgccaaatttgcaatatcagaataaggtgtttcctgaagctctgtttcatcagttgctgttaacaatgatccaccccgaccatgaagctcgtgttgctgcacaccgcatatttgctattgtcttagtcccatcttctgtttcaccttcgattcaagccagtccctcaggccaggtaaagaaacatgacatgcagaggacactctctagggccgtctctgtgttttcttcttcggctgctatctttgacaagatgaaaaaggacaagcactcagaaaattcacaaggagaaagcaaggacaatagtttgcatagcgttggtgaagggaccggacaaccaaagaatcaaaaccttcatgtgtctcaaagccgacgtagtagcatgagaatttctaatttttccatgaaaagaggcccttcaatggccatgagagctccttcagtagctatcagagctccttcaatatctctgagaggtccttcaatgtcttcaagagcatcttctgtgtctgtaaaggaagaccaaatttccccaaagaaatccgacgaggaaacggaatcagtgttggtgaagctgagcgcccgtcagatcacacttttgctatcatccatttgggctcaagcaacatcccctgaaaatactcctgtgaactatgaagccattgctcatacttacagtttgcttctactgttctctggatccaaggcatcaacttttgaggctcttacccagagttttcaggttgcattttctttgaggagctatgcgctcactgaagcagattcattacaaccgtctcggcgtcggtcattgtttactctgtcgacagccatgattattttctcgtcaagagcttacaatgtgttgccactcattccaatctgtaaacaaatgatcaatgatcgcgcggccgatccattccttcgtttggtggatgagagcaaacttacagctgtcaaggattgttcaaatgatccttcaaaaatatatggatcaccagaggacaacgctaatgcactgaagtccctctcagaaatagaactgtcagaaagtcaatctcgagaatgcatagtctccacaatcatgaacaacattgcaaatatgatggatgcggagttgcataatgtgagaagccaactgctaagtgatttcactcccgatgacatgtgtcctacaagcactcagttctttgaaatgcatgttgataatccttcagggtttcatgagactggtcaccatgaagagcagggtttgctgattgacctggggaatgaccatgatgcttttggggaagcttcggaaggcgcagaagctcgcacatcttctgtacctgcatcagatcttctgagtatcgatcagctccttgaaacggttggtgcagaaccagcacctcaggctggagtagtgtcggcagacattggattcaaggatatgactagccactgcgaagccctgacgatcgggaaacagcagaaaatgtctgccttcatgagcttccagcaaagcgtgcaagctgcaggggtgccaggcagccagcccaaccagacgacggagctggaccttttccaagacctgcagttgcctcaggccggggcgcagagcacaaacccattctctgatgagagcgttcagggatacccacagtacatgaacgggcccaacggcgacaacgcacagccaggccaggacttccaacagcagtctctgaagctaccggcggcgagcccgtacgacaatttcctaagggctgctggctgttaggagtccagttacatggacgacaaccacctcacctcaagatagtcccaacggaagatcctgcaatttttccacattttgcagggaaagaagaggggtatgtccgcgtgtgaggtcttagctagagactcaaaccgggttcgacacccattctttatgtatagctgtacgtggttgggctttgagccctttgctgctgctgctgttgttttcaccaatgcaacgtgtagagagggactgtgggggagcagtgccttctaccagactgtacatgtaacatgttgcagaaatatatgaagaaaaaatgacgtttgaaggatagatctggtgtagctcgtcgagttaccagatgatgggatcaaagaagcctttcatatttgcggtggaagttcgtt

SEQ ID NO: 58095 - DNA, 3631 bp, Zea Mays
atttattgatttcctttttgggtcgatgctgattgatcatcgaatgctggttaatggacacggctcttcaattgttaacgtagaagtataggatggctgtatcactatgctatttctgccccgggctcacaacacggtcccggatgcccgtgaagcggtacaagaagatccttgctgaaatcttccccaaaacacaggatgaagagcctaacgagagaaggattgggaagttgtgcgagtacgcttcgaaaaaccctcttcgagtgccaaagatcacagtttacttggagcagcacatttaccgggacttaagaagtgagcagtacggctttgcaaaagtggtgatgttgatatatcgcagactgtcggtttcctgtaaagaacagatgcctctgtttgcaagtagcctattaagcattgtgcacactcttttagaccaaaagaggcaggacgatttgcgcattgttgggtgtgaaaccttgtttgattttactgtcaatcaggtggatggtacatatcagttcaatttggaagggctggtcccaagactgtgtgaaatagcccaagaagtaggagaagatgaaagggcaagtgccctacgagcggcagccctgcaatctctttcagctatgatctggtttatgggggagctttctcatatctcgtcagagtttgacaatgttgttcaagttgtactggaaaactacaaacctcagaagatgcaaaatgatgatcaaagtaccaatgatgctgacaaccagttggtgcaggaagaccagaaggctgagcacccgccttcccctttcattatcactccggccccctcttgggagaacatagttaatgccaagggaggaatcaacctgccagaggaagatgttagggatcctaaggtttggtccagaatctgtgtgcacaatatggccaagctttctagggaggcaaccacattccgccgcatcttggaatgtttgtttcggtactttggtaacaatagttcatggttatcagaaaatggacttgctttgtgtgtcttgttggacatgcaacttttagtagaaagttcaggacaaaatatgcatttaatgttgtcacttttgataaaacatattgagcacaagacaatgttgaagcagccagacatgcagcttagcatcgtggaggtggcagctacccttgcagaacaatccagtgctatcgcttcaccagcaactgtaggtgccataagtgatcttgtgaggcatttgaaaaggacattccatattactcttggcagcaaagatatggaattagtaaaatggaacgaaaaattccggaagggcatagatgaatgcctagttcagctgtcaaagaaggtgtctgatgctgggccagttcttgacatgatggctgttatgctagaaaacattgcgagcactcctgttgtagctagatcaactgcagctgctgtttatcgcacagctcagataatcgcttctgtgccaaatttgcaatatcagaataaggtgtttcctgaagctctgtttcatcagttgctgttaacaatgatccaccccgaccatgaagctcgtgttgctgcacaccgcatatttgctattgtcttagtcccatcttctgtttcaccttcgattcaagccagtccctcaggccaggtaaagaaacatgacatgcagaggacactctctagggccgtctctgtgttttcttcttcggctgctatctttgacaagatgaaaaaggacaagcactcagaaaattcacaaggagaaagcaaggacaatagtttgcatagcgttggtgaagggaccggacaaccaaagaatcaaaaccttcatgtgtctcaaagccgacgtagtagcatgagaatttctaatttttccatgaaaagaggcccttcaatggccatgagagctccttcagtagctatcagagctccttcaatatctctgagaggtccttcaatgtcttcaagagcatcttctgtgtctgtaaaggaagaccaaatttccccaaagaaatccgacgaggaaacggaatcagtgttggtgaagctgagcgcccgtcagatcacacttttgctatcatccatttgggctcaagcaacatcccctgaaaatactcctgtgaactatgaagccattgctcatacttacagtttgcttctactgttctctggatccaaggcatcaacttttgaggctcttacccagagttttcaggttgcattttctttgaggagctatgcgctcactgaagcagattcattacaaccgtctcggcgtcggtcattgtttactctgtcgacagccatgattattttctcgtcaagagcttacaatgtgttgccactcattccaatctgtaaacaaatgatcaatgatcgcgcggccgatccattccttcgtttggtggatgagagcaaacttacagctgtcaaggattgttcaaatgatccttcaaaaatatatggatcaccagaggacaacgctaatgcactgaagtccctctcagaaatagaactgtcagaaagtcaatctcgagaatgcatagtctccacaatcatgaacaacattgcaaatatgatggatgcggagttgcataatgtgagaagccaactgctaagtgatttcactcccgatgacatgtgtcctacaagcactcagttctttgaaatgcatgttgataatccttcagggtttcatgagactggtcaccatgaagagcagggtttgctgattgacctggggaatgaccatgatgcttttggggaagcttcggaaggcgcagaagctcgcacatcttctgtacctgcatcagatcttctgagtatcgatcagctccttgaaacggttggtgcagaaccagcacctcaggctggagtagtgtcggcagacattggattcaaggatatgactagccactgcgaagccctgacgatcgggaaacagcagaaaatgtctgccttcatgagcttccagcaaagcgtgcaagctgcaggggtgccaggcagccagcccaaccagacgacggagctggaccttttccaagacctgcagttgcctcaggccggggcgcagagcacaaacccattctctgatgagagcgttcagggatacccacagtacatgaacgggcccaacggcgacaacgcacagccaggccaggacttccaacagcagtctctgaagctaccggcggcgagcccgtacgacaatttcctaagggctgctggctgttaggagtccagttacatggacgacaaccacctcacctcaagatagtcccaacggaagatcctgcaatttttccacattttgcagggaaagaagaggggtatgtccgcgtgtgaggtcttagctagagactcaaaccgggttcgacacccattctttatgtatagctgtacgtggttgggctttgagccctttgctgctgctgctgttgttttcaccaatgcaacgtgtagagagggactgtgggggagcagtgccttctaccagactgtacatgtaacatgttgcagaaatatatgaagaaaaaatgacgtttgaaggatagatctggtgtagctcgtcgagttaccagatgatgggatcaaagaagcctttcatatttgcggtggaagttcgtt

SEQ ID NO: 58096 - DNA, 3536 bp, Zea Mays
tcactgacagacacggctcttcaattgttaacgtagaagtataggatggctgtatcactatgctatttctgccccgggctcacaacacggtcccggatgcccgtgaagcggtacaagaagatccttgctgaaatcttccccaaaacacaggatgaagagcctaacgagagaaggattgggaagttgtgcgagtacgcttcgaaaaaccctcttcgagtgccaaagatcacagtttacttggagcagcacatttaccgggacttaagaagtgagcagtacggctttgcaaaagtggtgatgttgatatatcgcagactgtcggtttcctgtaaagaacagatgcctctgtttgcaagtagcctattaagcattgtgcacactcttttagaccaaaagaggcaggacgatttgcgcattgttgggtgtgaaaccttgtttgattttactgtcaatcaggtggatggtacatatcagttcaatttggaagggctggtcccaagactgtgtgaaatagcccaagaagtaggagaagatgaaagggcaagtgccctacgagcggcagccctgcaatctctttcagctatggttgttcaagttgtactggaaaactacaaacctcagaagatgcaaaatgatgatcaaagtaccaatgatgctgacaaccagttggtgcaggaagaccagaaggctgagcacccgccttcccctttcattatcactccggccccctcttgggagaacatagttaatgccaagggaggaatcaacctgccagaggaagatgttagggatcctaaggtttggtccagaatctgtgtgcacaatatggccaagctttctagggaggcaaccacattccgccgcatcttggaatgtttgtttcggtactttggtaacaatagttcatggttatcagaaaatggacttgctttgtgtgtcttgttggacatgcaacttttagtagaaagttcaggacaaaatatgcatttaatgttgtcacttttgataaaacatattgagcacaagacaatgttgaagcagccagacatgcagcttagcatcgtggaggtggcagctacccttgcagaacaatccagtgctatcgcttcaccagcaactgtaggtgccataagtgatcttgtgaggcatttgaaaaggacattccatattactcttggcagcaaagatatggaattagtaaaatggaacgaaaaattccggaagggcatagatgaatgcctagttcagctgtcaaagaaggtgtctgatgctgggccagttcttgacatgatggctgttatgctagaaaacattgcgagcactcctgttgtagctagatcaactgcagctgctgtttatcgcacagctcagataatcgcttctgtgccaaatttgcaatatcagaataaggtgtttcctgaagctctgtttcatcagttgctgttaacaatgatccaccccgaccatgaagctcgtgttgctgcacaccgcatatttgctattgtcttagtcccatcttctgtttcaccttcgattcaagccagtccctcaggccaggtaaagaaacatgacatgcagaggacactctctagggccgtctctgtgttttcttcttcggctgctatctttgacaagatgaaaaaggacaagcactcagaaaattcacaaggagaaagcaaggacaatagtttgcatagcgttggtgaagggaccggacaaccaaagaatcaaaaccttcatgtgtctcaaagccgacgtagtagcatgagaatttctaatttttccatgaaaagaggcccttcaatggccatgagagctccttcagtagctatcagagctccttcaatatctctgagaggtccttcaatgtcttcaagagcatcttctgtgtctgtaaaggaagaccaaatttccccaaagaaatccgacgaggaaacggaatcagtgttggtgaagctgagcgcccgtcagatcacacttttgctatcatccatttgggctcaagcaacatcccctgaaaatactcctgtgaactatgaagccattgctcatacttacagtttgcttctactgttctctggatccaaggcatcaacttttgaggctcttacccagagttttcaggttgcattttctttgaggagctatgcgctcactgaagcagattcattacaaccgtctcggcgtcggtcattgtttactctgtcgacagccatgattattttctcgtcaagagcttacaatgtgttgccactcattccaatctgtaaacaaatgatcaatgatcgcgcggccgatccattccttcgtttggtggatgagagcaaacttacagctgtcaaggattgttcaaatgatccttcaaaaatatatggatcaccagaggacaacgctaatgcactgaagtccctctcagaaatagaactgtcagaaagtcaatctcgagaatgcatagtctccacaatcatgaacaacattgcaaatatgatggatgcggagttgcataatgtgagaagccaactgctaagtgatttcactcccgatgacatgtgtcctacaagcactcagttctttgaaatgcatgttgataatccttcagggtttcatgagactggtcaccatgaagagcagggtttgctgattgacctggggaatgaccatgatgcttttggggaagcttcggaaggcgcagaagctcgcacatcttctgtacctgcatcagatcttctgagtatcgatcagctccttgaaacggttggtgcagaaccagcacctcaggctggagtagtgtcggcagacattggattcaaggatatgactagccactgcgaagccctgacgatcgggaaacagcagaaaatgtctgccttcatgagcttccagcaaagcgtgcaagctgcaggggtgccaggcagccagcccaaccagacgacggagctggaccttttccaagacctgcagttgcctcaggccggggcgcagagcacaaacccattctctgatgagagcgttcagggatacccacagtacatgaacgggcccaacggcgacaacgcacagccaggccaggacttccaacagcagtctctgaagctaccggcggcgagcccgtacgacaatttcctaagggctgctggctgttaggagtccagttacatggacgacaaccacctcacctcaagatagtcccaacggaagatcctgcaatttttccacattttgcagggaaagaagaggggtatgtccgcgtgtgaggtcttagctagagactcaaaccgggttcgacacccattctttatgtatagctgtacgtggttgggctttgagccctttgctgctgctgctgttgttttcaccaatgcaacgtgtagagagggactgtgggggagcagtgccttctaccagactgtacatgtaacatgttgcagaaatatatgaagaaaaaatgacgtttgaaggatagatctggtgtagctcgtcgagttaccagatgatgggatcaaagaagcctttcatatttgcggtggaagttcgtt

SEQ ID NO: 58097 - DNA, 1617 bp, Zea Mays
tataatcgattctattccaaatgaatcagtgttggtgaagctgagcgcccgtcagatcacacttttgctatcatccatttgggctcaagcaacatcccctgaaaatactcctgtgaactatgaagccattgctcatacttacagtttgcttctactgttctctggatccaaggcatcaacttttgaggctcttacccagagttttcaggttgcattttctttgaggagctatgcgctcactgaagcagattcattacaaccgtctcggcgtcggtcattgtttactctgtcgacagccatgattattttctcgtcaagagcttacaatgtgttgccactcattccaatctgtaaacaaatgatcaatgatcgcgcggccgatccattccttcgtttggtggatgagagcaaacttacagctgtcaaggattgttcaaatgatccttcaaaaatatatggatcaccagaggacaacgctaatgcactgaagtccctctcagaaatagaactgtcagaaagtcaatctcgagaatgcatagtctccacaatcatgaacaacattgcaaatatgatggatgcggagttgcataatgtgagaagccaactgctaagtgatttcactcccgatgacatgtgtcctacaagcactcagttctttgaaatgcatgttgataatccttcagggtttcatgagactggtcaccatgaagagggtttgctgattgacctggggaatgaccatgatgcttttggggaagcttcggaaggcgcagaagctcgcacatcttctgtacctgcatcagatcttctgagtatcgatcagctccttgaaacggttggtgcagaaccagcacctcaggctggagtagtgtcggcagacattggattcaaggatatgactagccactgcgaagccctgacgatcgggaaacagcagaaaatgtctgccttcatgagcttccagcaaagcgtgcaagctgcaggggtgccaggcagccagcccaaccagacgacggagctggaccttttccaagacctgcagttgcctcaggccggggcgcagagcacaaacccattctctgatgagagcgttcagggatacccacagtacatgaacgggcccaacggcgacaacgcacagccaggccaggacttccaacagcagtctctgaagctaccggcggcgagcccgtacgacaatttcctaagggctgctggctgttaggagtccagttacatggacgacaaccacctcacctcaagatagtcccaacggaagatcctgcaatttttccacattttgcagggaaagaagaggggtatgtccgcgtgtgaggtcttagctagagactcaaaccgggttcgacacccattctttatgtatagctgtacgtggttgggctttgagccctttgctgctgctgctgttgttttcaccaatgcaacgtgtagagagggactgtgggggagcagtgccttctaccagactgtacatgtaacatgttgcagaaatatatgaagaaaaaatgacgtttgaaggatagatctggtgtagctcgtcgagttaccagatgatgggatcaaagaagcctttcatatttgcggtggaagttcgtt

SEQ ID NO: 58098 - DNA, 1169 bp, Zea Mays
caaaaatactatatccaatttaaacataccgcataattgcgtagaggaaatcgaagcctgtcgcataggacagttcggctaggccgaagacatgccggcttgacggagagttgatgcagatctgatctcgcagtaacgtcgaggtagagcgtgctgataacgtgttaaccaaacaaaatcgcttgcatggactcatcctgattctaacgatactggctagactcataccggactggctagactcatactgcaaccaaacacatggatagagtacctacgtgtgtattgcttgatgtgaagttgtttttgattagtcataggtattgtagtgttcatgtctattataagattctagcatacgcgaaagagctagcatatgggtcgaggcactgaaatattttcctcgatcgccccaggccccagcagggcaacagctaagcccagaaaagtcctagtccgacccaccaacgcggctcttcccgcgccagcatgggcccaggaaaacaaccactacacataaaaccggcccacccatcgctagggttcgccccaccaaagcctccgcccccttcttccctgacaccctcgccgccgcgcacgcacgcacgcagggaaccagcgaagagagatgggcgtctacaccttcgtgtgccgcagcgccggcggcggcgagtggaccgccaagcagcactccggcgagatcgagtcgtccttctccatggtcacccccagctccgccgtcttccaggtgatcgtcggtggtggcgcgatgatggttagtggcggcggcggcggcggcgcgtccgccgccgcgtcgggtggtgctgcggccgaagctcccaaggaggagaagaaggaagaggagaaggaagagagcgacgacgacatgggattctccctgttcgactagagacagagttaagctgcgtgtgcatggttgctgttcggtcgtgtcgcgaaacgtgaagagctcaagcggcctttttgttccagtcccacatgtgagagcttgatacgttgtctggaatgaaaaattttctccaaaattcacgaatatatattgcgtacgcacaatactgtagattaaacaatgacttgtgtagagctgtaaaatcgacgcaattatatgaaagcagcactggagtttcaaactgacaagcatttacatc

SEQ ID NO: 58099 - DNA, 3398 bp, Zea Mays
gaacaatttttccccgttggccattgacggacaaacgcgttctccctgaaaagcatgctgtgaggctcgatatcgctgcggctgtcgtgctcccgcagcgcacaggaagaaaaaaatactaactgtcttactaggagcctagagtgtccgaatttttgccattgcttgtcctgacttgccaacctacaatgggatggggaaacactattaccagacgcctcaaggttttctctatggccctgtttatctacttcgactataaggctgttcagaagagagttcaatgggttagcactggtaaaaagagtgctatatggaagaaaacacatgagcgaaatgctcgccgtgtcctcaacctgatgatagagttagaaggtttatgggtgaaactgggccaatatttatccacaagagcagatgtacttcctgaaccctacataaatgtcctcaagcagttgcaggattcgcttcctccacgaccttttgaagaggttcgtgaaacgatagagaaagaacttggagaacctatgagtgatctatttgctgattttgtcctagaccctctcgcaaccgcatcaatagcacaagttcatcgtgcaactctggcagatggcagagaagtagttgtcaaaattcagcatgatggtgtgaaggagatcatattagaggatctgaagaatgcaaaatcattgattgaatggatagcgtgggcagagcctcagtatgattttaatccgatgattgatgaatggtgcaaggaggctccaaaggaacttgatttcaaccatgaagcagagaatactagggctgtctccaggaatcttagtcgcaaaagtgactgtgggagtggcagtgtttccagtactgttgatgtactcattccagaagttattcagtcaactggcaaggttctaattttggaatatatggatgggattcgtttaaatgataatgattcattggaagcatatggtgttgacaagcaaaaactggtcgaagagataacccgtgcatacgctcatcaaatatacattgatggcttctttaacggcgaccctcatcctggcaattttcttgtgagcaaggaacctccacataaaccgattctccttgattttgggctcactaagcgcatatctgaatctatgaggcaggcactagcaaaaatgtttttgtcatgtgcagagggagatcacgtggcactgctgtcagcattttcagagatggggcttaaactgcgggttgacatgcctcagcaggctatggatattgccacagtattctttcgtcagtcaaccacagcaagtgaagcaaaggagaacataaaaacacttaatgaccaaagagagagaaatgtcaaagctcttcaagaaaagatgaaattgaacaagaaggaggttcaacgctttaatcctgttgatgctttccccggggatgccataatatttatgagggtcttgaatctcctcagaggtctttcagcttcactaaatgttaggatagtttatctggacatcatgaggccatttgctgaatcaactttgttagggagtttgacacacggacaaatacctaacagtcagtggatttttgactcacctgctaactctgatgtggagtctaaactgagaaattatctgcttgagttgggaagcgacaaaattttaggaatacaagtctgcgcatataaagatggaaaggtcataatagatactgctgctggtatgctggggaagtatgatccccgacctgttcaacctgattctctttttcctgttttctcagtgactaagggtatcactgctgggatggtacattggcttgtggacaaagggaagctgaagtacgaggaaacagttgccaacatatggccgaattttggaactaacggaaaggagttaataaaggtccatcatcttctaaatcacacatccggtttgcacaatgcactgggtgatgtggtaaagaatgatcctttgttggtatgtgactgggaggagacactaaaccagattacgaagagtacacctgagaccgaacctggttcagcacaaatttaccattacctctccttcggttggctgtgtgggggagtcatagagcatgcatctgggaagaagtttcaagagattctagaagaggctattgttcgtcctcttcacattgagggggagttgtatgttggcattccaccaggtgtcgagtctcggctggcagcgctgacagttgacaccgaggagctccagaagctatcaggaatcagggcaggtgcagatgtgccagcagctctgctgaacaacatcgcgcagatggcgtccggtgtgcccgctattttcaacacgctaaacgtccgtcgggccatcatccctgccgccaacggccactgctctgcccgcgcgctcgctcgatactacgcggcgctagcggccggcggttctgttcccccgccgcactcttcgggcgccatgccgcccctcggcagccacgtgcacacccccaagttcccgaccgcgccgctcaagaagaagaagaagggcgccggaaagaagaagggcgccggcggcggctccatgggagacctcaaggtccaggatataagcggcggcagcagcgacaggaacgggtactgccagctgcgcaccagcgacgccgacagcgaggcggggagcggcagcggcggaggcggcaggatgttcggcagcgacaggatcctcgacgcgttcatgggcgtcggcgagtacgagggcatggcgcaccgggacggcaagttcgggctcgggttcaggaggtacgacgacgccagcagcggcagcggcaggctgaggtgctttgggcactccgggatgggcggctcgaccgggttctgcgacgtggagaacggcttcgccatcgcggtgacggtgaacaagctgtctctgggcagcgtcacgcgcggcgtcgtccggctcgtcctcgaggagctgggcctgcccgtgccggacgagtactcggccaccggggagaaggggcctgacatgatgctcaacctgacgacaacgacgacgactacgccgccgcaactgagatgacgacggcgaaactgagattatcaggttgggttcgtaataatctgtggaacaagatatatagcgagcagaaggaaggttggggtacagggatttggtggacagtatatatacgcgtgccattttgattttgacgtggcatgtaaaactcggcaaattctggtatattacgaagctgggtgctgggaattgtggccagcagtacaagaaatggacatgctagtttgttgacctgtgttttttttatggcggaactttttgttttgtcttctgggcttcactaggtctatgctcgtgcgttgccacggaaaacacatgaaatcgtaatatgtg

SEQ ID NO: 58100 - DNA, 3364 bp, Zea Mays
gacggacaaacgcgttctccctgaaaagcatgctgtgaggctcgatatcgctgcggctgtcgtgctcccgcagcgcacaggaagaaaaaaatactaactgtcttactaggagcctagagtgtccgaatttttgccattgcttgtcctgacttgccaacctacaatgggatggggaaacactattaccagacgcctcaaggttttctctatggccctgtttatctacttcgactataaggctgttcagaagagagttcaatgggttagcactggtaaaaagagtgctatatggaagaaaacacatgagcgaaatgctcgccgtgtcctcaacctgatgatagagttagaaggtttatgggtgaaactgggccaatatttatccacaagagcagatgtacttcctgaaccctacataaatgtcctcaagcagttgcaggattcgcttcctccacgaccttttgaagaggttcgtgaaacgatagagaaagaacttggagaacctatgagtgatctatttgctgattttgtcctagaccctctcgcaaccgcatcaatagcacaagttcatcgtgcaactctggcagatggcagagaagtagttgtcaaaattcagcatgatggtgtgaaggagatcatattagagaatgcaaaatcattgattgaatggatagcgtgggcagagcctcagtatgattttaatccgatgattgatgaatggtgcaaggaggctccaaaggaacttgatttcaaccatgaagcagagaatactagggctgtctccaggaatcttagtcgcaaaagtgactgtgggagtggcagtgtttccagtactgttgatgtactcattccagaagttattcagtcaactggcaaggttctaattttggaatatatggatgggattcgtttaaatgataatgattcattggaagcatatggtgttgacaagcaaaaactggtcgaagagataacccgtgcatacgctcatcaaatatacattgatggcttctttaacggcgaccctcatcctggcaattttcttgtgagcaaggaacctccacataaaccgattctccttgattttgggctcactaagcgcatatctgaatctatgaggcaggcactagcaaaaatgtttttgtcatgtgcagagggagatcacgtggcactgctgtcagcattttcagagatggggcttaaactgcgggttgacatgcctcagcaggctatggatattgccacagtattctttcgtcagtcaaccacagcaagtgaagcaaaggagaacataaaaacacttaatgaccaaagagagagaaatgtcaaagctcttcaagaaaagatgaaattgaacaagaaggaggttcaacgctttaatcctgttgatgctttccccggggatgccataatatttatgagggtcttgaatctcctcagaggtctttcagcttcactaaatgttaggatagtttatctggacatcatgaggccatttgctgaatcaactttgttagggagtttgacacacggacaaatacctaacagtcagtggatttttgactcacctgctaactctgatgtggagtctaaactgagaaattatctgcttgagttgggaagcgacaaaattttaggaatacaagtctgcgcatataaagatggaaaggtcataatagatactgctgctggtatgctggggaagtatgatccccgacctgttcaacctgattctctttttcctgttttctcagtgactaagggtatcactgctgggatggtacattggcttgtggacaaagggaagctgaagtacgaggaaacagttgccaacatatggccgaattttggaactaacggaaaggagttaataaaggtccatcatcttctaaatcacacatccggtttgcacaatgcactgggtgatgtggtaaagaatgatcctttgttggtatgtgactgggaggagacactaaaccagattacgaagagtacacctgagaccgaacctggttcagcacaaatttaccattacctctccttcggttggctgtgtgggggagtcatagagcatgcatctgggaagaagtttcaagagattctagaagaggctattgttcgtcctcttcacattgagggggagttgtatgttggcattccaccaggtgtcgagtctcggctggcagcgctgacagttgacaccgaggagctccagaagctatcaggaatcagggcaggtgcagatgtgccagcagctctgctgaacaacatcgcgcagatggcgtccggtgtgcccgctattttcaacacgctaaacgtccgtcgggccatcatccctgccgccaacggccactgctctgcccgcgcgctcgctcgatactacgcggcgctagcggccggcggttctgttcccccgccgcactcttcgggcgccatgccgcccctcggcagccacgtgcacacccccaagttcccgaccgcgccgctcaagaagaagaagaagggcgccggaaagaagaagggcgccggcggcggctccatgggagacctcaaggtccaggatataagcggcggcagcagcgacaggaacgggtactgccagctgcgcaccagcgacgccgacagcgaggcggggagcggcagcggcggaggcggcaggatgttcggcagcgacaggatcctcgacgcgttcatgggcgtcggcgagtacgagggcatggcgcaccgggacggcaagttcgggctcgggttcaggaggtacgacgacgccagcagcggcagcggcaggctgaggtgctttgggcactccgggatgggcggctcgaccgggttctgcgacgtggagaacggcttcgccatcgcggtgacggtgaacaagctgtctctgggcagcgtcacgcgcggcgtcgtccggctcgtcctcgaggagctgggcctgcccgtgccggacgagtactcggccaccggggagaaggggcctgacatgatgctcaacctgacgacaacgacgacgactacgccgccgcaactgagatgacgacggcgaaactgagattatcaggttgggttcgtaataatctgtggaacaagatatatagcgagcagaaggaaggttggggtacagggatttggtggacagtatatatacgcgtgccattttgattttgacgtggcatgtaaaactcggcaaattctggtatattacgaagctgggtgctgggaattgtggccagcagtacaagaaatggacatgctagtttgttgacctgtgttttttttatggcggaactttttgttttgtcttctgggcttcactaggtctatgctcgtgcgttgccacggaaaacacatgaaatcgtaatatgtg

SEQ ID NO: 58101 - DNA, 3452 bp, Zea Mays
gcacaggaaggtgagtgaggaggaagaaaccgcatgcaaggggacgggagtacgggaccggcgggcggaagacgaacgggattccaaaaaaacgacttgtcgtggcggagcggaatccacaatagcgacgagccgtcggggtctgccggcctggatgcaaaccagtctcgtcgtcacggactcccggaataaatactccctcctgcggcgcccggcggaaaccgccgaattcccctcttcctcgcgcgtgctcagcgattcgagaaaaaaatactaactgtcttactaggagcctagagtgtccgaatttttgccattgcttgtcctgacttgccaacctacaatgggatggggaaacactattaccagacgcctcaaggttttctctatggccctgtttatctacttcgactataaggctgttcagaagagagttcaatgggttagcactggtaaaaagagtgctatatggaagaaaacacatgagcgaaatgctcgccgtgtcctcaacctgatgatagagttagaaggtttatgggtgaaactgggccaatatttatccacaagagcagatgtacttcctgaaccctacataaatgtcctcaagcagttgcaggattcgcttcctccacgaccttttgaagaggttcgtgaaacgatagagaaagaacttggagaacctatgagtgatctatttgctgattttgtcctagaccctctcgcaaccgcatcaatagcacaagttcatcgtgcaactctggcagatggcagagaagtagttgtcaaaattcagcatgatggtgtgaaggagatcatattagaggatctgaagaatgcaaaatcattgattgaatggatagcgtgggcagagcctcagtatgattttaatccgatgattgatgaatggtgcaaggaggctccaaaggaacttgatttcaaccatgaagcagtcaactggcaaggttctaattttggaatatatggatgggattcgtttaaatgataatgattcattggaagcatatggtgttgacaagcaaaaactggtcgaagagataacccgtgcatacgctcatcaaatatacattgatggcttctttaacggcgaccctcatcctggcaattttcttgtgagcaaggaacctccacataaaccgattctccttgattttgggctcactaagcgcatatctgaatctatgaggcaggcactagcaaaaatgtttttgtcatgtgcagagggagatcacgtggcactgctgtcagcattttcagagatggggcttaaactgcgggttgacatgcctcagcaggctatggatattgccacagtattctttcgtcagtcaaccacagcaagtgaagcaaaggagaacataaaaacacttaatgaccaaagagagagaaatgtcaaagctcttcaagaaaagatgaaattgaacaagaaggaggttcaacgctttaatcctgttgatgctttccccggggatgccataatatttatgagggtcttgaatctcctcagaggtctttcagcttcactaaatgttaggatagtttatctggacatcatgaggccatttgctgaatcaactttgttagggagtttgacacacggacaaatacctaacagtcagtggatttttgactcacctgctaactctgatgtggagtctaaactgagaaattatctgcttgagttgggaagcgacaaaattttaggaatacaagtctgcgcatataaagatggaaaggtcataatagatactgctgctggtatgctggggaagtatgatccccgacctgttcaacctgattctctttttcctgttttctcagtgactaagggtatcactgctgggatggtacattggcttgtggacaaagggaagctgaagtacgaggaaacagttgccaacatatggccgaattttggaactaacggaaaggagttaataaaggtccatcatcttctaaatcacacatccggtttgcacaatgcactgggtgatgtggtaaagaatgatcctttgttggtatgtgactgggaggagacactaaaccagattacgaagagtacacctgagaccgaacctggttcagcacaaatttaccattacctctccttcggttggctgtgtgggggagtcatagagcatgcatctgggaagaagtttcaagagattctagaagaggctattgttcgtcctcttcacattgagggggagttgtatgttggcattccaccaggtgtcgagtctcggctggcagcgctgacagttgacaccgaggagctccagaagctatcaggaatcagggcaggtgcagatgtgccagcagctctgctgaacaacatcgcgcagatggcgtccggtgtgcccgctattttcaacacgctaaacgtccgtcgggccatcatccctgccgccaacggccactgctctgcccgcgcgctcgctcgatactacgcggcgctagcggccggcggttctgttcccccgccgcactcttcgggcgccatgccgcccctcggcagccacgtgcacacccccaagttcccgaccgcgccgctcaagaagaagaagaagggcgccggaaagaagaagggcgccggcggcggctccatgggagacctcaaggtccaggatataagcggcggcagcagcgacaggaacgggtactgccagctgcgcaccagcgacgccgacagcgaggcggggagcggcagcggcggaggcggcaggatgttcggcagcgacaggatcctcgacgcgttcatgggcgtcggcgagtacgagggcatggcgcaccgggacggcaagttcgggctcgggttcaggaggtacgacgacgccagcagcggcagcggcaggctgaggtgctttgggcactccgggatgggcggctcgaccgggttctgcgacgtggagaacggcttcgccatcgcggtgacggtgaacaagctgtctctgggcagcgtcacgcgcggcgtcgtccggctcgtcctcgaggagctgggcctgcccgtgccggacgagtactcggccaccggggagaaggggcctgacatgatgctcaacctgacgacaacgacgacgactacgccgccgcaactgagatgacgacggcgaaactgagattatcaggttgggttcgtaataatctgtggaacaagatatatagcgagcagaaggaaggttggggtacagggatttggtggacagtatatatacgcgtgccattttgattttgacgtggcatgtaaaactcggcaaattctggtatattacgaagctgggtgctgggaattgtggccagcagtacaagaaatggacatgctagtttgttgacctgtgttttttttatggcggaactttttgttttgtcttctgggcttcactaggtctatgctcgtgcgttgccacggaaaacacatgaaatcgtaatatgtg

SEQ ID NO: 58102 - DNA, 3506 bp, Zea Mays
gatgatcaagtaaagcagttgaaacagcgtccccttggtgttggaatcatgcgaaagatcatgaaaaaaatactaactgtcttactaggagcctagagtgtccgaatttttgccattgcttgtcctgacttgccaacctacaatgggatggggaaacactattaccagacgcctcaaggttttctctatggccctgtttatctacttcgactataaggctgttcagaagagagttcaatgggttagcactggtaaaaagagtgctatatggaagaaaacacatgagcgaaatgctcgccgtgtcctcaacctgatgatagagttagaaggtttatgggtgaaactgggccaatatttatccacaagagcagatgtacttcctgaaccctacataaatgtcctcaagcagttgcaggattcgcttcctccacgaccttttgaagaggttcgtgaaacgatagagaaagaacttggagaacctatgagtgatctatttgctgattttgtcctagaccctctcgcaaccgcatcaatagcacaagttcatcgtgcaactctggcagatggcagagaagtagttgtcaaaattcagcatgatggtgtgaaggagatcatattagaggtttatctctaacctgcaagtatgctgtctagcacagttggagtccattacatttttctattggtggccaggatctgaagaatgcaaaatcattgattgaatggatagcgtgggcagagcctcagtatgattttaatccgatgattgatgaatggtgcaaggaggctccaaaggaacttgatttcaaccatgaagcagagaatactagggctgtctccaggaatcttagtcgcaaaagtgactgtgggagtggcagtgtttccagtactgttgatgtactcattccagaagttattcagtcaactggcaaggttctaattttggaatatatggatgggattcgtttaaatgataatgattcattggaagcatatggtgttgacaagcaaaaactggtcgaagagataacccgtgcatacgctcatcaaatatacattgatggcttctttaacggcgaccctcatcctggcaattttcttgtgagcaaggaacctccacataaaccgattctccttgattttgggctcactaagcgcatatctgaatctatgaggcaggcactagcaaaaatgtttttgtcatgtgcagagggagatcacgtggcactgctgtcagcattttcagagatggggcttaaactgcgggttgacatgcctcagcaggctatggatattgccacagtattctttcgtcagtcaaccacagcaagtgaagcaaaggagaacataaaaacacttaatgaccaaagagagagaaatgtcaaagctcttcaagaaaagatgaaattgaacaagaaggaggttcaacgctttaatcctgtgagttggaatgtctagcttgctacttttcagtttccacagccaattgatggggtgtcacatggacattttcatgcttttaggttgatgctttccccggggatgccataatatttatgagggtcttgaatctcctcagaggtctttcagcttcactaaatgttaggatagtttatctggacatcatgaggccatttgctgaatcaactttgttagggagtttgacacacggacaaatacctaacagtcagtggatttttgactcacctgctaactctgatgtggagtctaaactgagaaattatctgcttgagttgggaagcgacaaaattttaggaatacaagtctgcgcatataaagatggaaaggtcataatagatactgctgctggtatgctggggaagtatgatccccgacctgttcaacctgattctctttttcctgttttctcagtgactaagggtatcactgctgggatggtacattggcttgtggacaaagggaagctgaagtacgaggaaacagttgccaacatatggccgaattttggaactaacggaaaggagttaataaaggtccatcatcttctaaatcacacatccggtttgcacaatgcactgggtgatgtggtaaagaatgatcctttgttggtatgtgactgggaggagacactaaaccagattacgaagagtacacctgagaccgaacctggttcagcacaaatttaccattacctctccttcggttggctgtgtgggggagtcatagagcatgcatctgggaagaagtttcaagagattctagaagaggctattgttcgtcctcttcacattgagggggagttgtatgttggcattccaccaggtgtcgagtctcggctggcagcgctgacagttgacaccgaggagctccagaagctatcaggaatcagggcaggtgcagatgtgccagcagctctgctgaacaacatcgcgcagatggcgtccggtgtgcccgctattttcaacacgctaaacgtccgtcgggccatcatccctgccgccaacggccactgctctgcccgcgcgctcgctcgatactacgcggcgctagcggccggcggttctgttcccccgccgcactcttcgggcgccatgccgcccctcggcagccacgtgcacacccccaagttcccgaccgcgccgctcaagaagaagaagaagggcgccggaaagaagaagggcgccggcggcggctccatgggagacctcaaggtccaggatataagcggcggcagcagcgacaggaacgggtactgccagctgcgcaccagcgacgccgacagcgaggcggggagcggcagcggcggaggcggcaggatgttcggcagcgacaggatcctcgacgcgttcatgggcgtcggcgagtacgagggcatggcgcaccgggacggcaagttcgggctcgggttcaggaggtacgacgacgccagcagcggcagcggcaggctgaggtgctttgggcactccgggatgggcggctcgaccgggttctgcgacgtggagaacggcttcgccatcgcggtgacggtgaacaagctgtctctgggcagcgtcacgcgcggcgtcgtccggctcgtcctcgaggagctgggcctgcccgtgccggacgagtactcggccaccggggagaaggggcctgacatgatgctcaacctgacgacaacgacgacgactacgccgccgcaactgagatgacgacggcgaaactgagattatcaggttgggttcgtaataatctgtggaacaagatatatagcgagcagaaggaaggttggggtacagggatttggtggacagtatatatacgcgtgccattttgattttgacgtggcatgtaaaactcggcaaattctggtatattacgaagctgggtgctgggaattgtggccagcagtacaagaaatggacatgctagtttgttgacctgtgttttttttatggcggaactttttgttttgtcttctgggcttcactaggtctatgctcgtgcgttgccacggaaaacacatgaaatcgtaatatgtg

SEQ ID NO: 58103 - DNA, 3220 bp, Zea Mays
gtcaaggttttgaagctgcgatttgtccatgtaaaaaaatactaactgtcttactaggagcctagagtgtccgaatttttgccattgcttgtcctgacttgccaacctacaatgggatggggaaacactattaccagacgcctcaaggttttctctatggccctgtttatctacttcgactataaggctgttcagaagagagttcaatgggttagcactggtaaaaagagtgctatatggaagaaaacacatgagcgaaatgctcgccgtgtcctcaacctgatgatagagttagaaggtttatgggtgaaactgggccaatatttatccacaagagcagatgtacttcctgaaccctacataaatgtcctcaagcagttgcaggattcgcttcctccacgaccttttgaagaggttcgtgaaacgatagagaaagaacttggagaacctatgagtgatctatttgctgattttgtcctagaccctctcgcaaccgcatcaatagcacaagttcatcgtgcaactctggcagatggcagagaagtagttgtcaaaattcagcatgatggtgtgaaggagatcatattagaggatctgaagaatgcaaaatcattgattgaatggatagcgtgggcagagcctcagtatgattttaatccgatgattgatgaatggtgcaaggaggctccaaaggaacttgatttcaaccatgaagcagtcaactggcaaggttctaattttggaatatatggatgggattcgtttaaatgataatgattcattggaagcatatggtgttgacaagcaaaaactggtcgaagagataacccgtgcatacgctcatcaaatatacattgatggcttctttaacggcgaccctcatcctggcaattttcttgtgagcaaggaacctccacataaaccgattctccttgattttgggctcactaagcgcatatctgaatctatgaggcaggcactagcaaaaatgtttttgtcatgtgcagagggagatcacgtggcactgctgtcagcattttcagagatggggcttaaactgcgggttgacatgcctcagcaggctatggatattgccacagtattctttcgtcagtcaaccacagcaagtgaagcaaaggagaacataaaaacacttaatgaccaaagagagagaaatgtcaaagctcttcaagaaaagatgaaattgaacaagaaggaggttcaacgctttaatcctgttgatgctttccccggggatgccataatatttatgagggtcttgaatctcctcagaggtctttcagcttcactaaatgttaggatagtttatctggacatcatgaggccatttgctgaatcaactttgttagggagtttgacacacggacaaatacctaacagtcagtggatttttgactcacctgctaactctgatgtggagtctaaactgagaaattatctgcttgagttgggaagcgacaaaattttaggaatacaagtctgcgcatataaagatggaaaggtcataatagatactgctgctggtatgctggggaagtatgatccccgacctgttcaacctgattctctttttcctgttttctcagtgactaagggtatcactgctgggatggtacattggcttgtggacaaagggaagctgaagtacgaggaaacagttgccaacatatggccgaattttggaactaacggaaaggagttaataaaggtccatcatcttctaaatcacacatccggtttgcacaatgcactgggtgatgtggtaaagaatgatcctttgttggtatgtgactgggaggagacactaaaccagattacgaagagtacacctgagaccgaacctggttcagcacaaatttaccattacctctccttcggttggctgtgtgggggagtcatagagcatgcatctgggaagaagtttcaagagattctagaagaggctattgttcgtcctcttcacattgagggggagttgtatgttggcattccaccaggtgtcgagtctcggctggcagcgctgacagttgacaccgaggagctccagaagctatcaggaatcagggcaggtgcagatgtgccagcagctctgctgaacaacatcgcgcagatggcgtccggtgtgcccgctattttcaacacgctaaacgtccgtcgggccatcatccctgccgccaacggccactgctctgcccgcgcgctcgctcgatactacgcggcgctagcggccggcggttctgttcccccgccgcactcttcgggcgccatgccgcccctcggcagccacgtgcacacccccaagttcccgaccgcgccgctcaagaagaagaagaagggcgccggaaagaagaagggcgccggcggcggctccatgggagacctcaaggtccaggatataagcggcggcagcagcgacaggaacgggtactgccagctgcgcaccagcgacgccgacagcgaggcggggagcggcagcggcggaggcggcaggatgttcggcagcgacaggatcctcgacgcgttcatgggcgtcggcgagtacgagggcatggcgcaccgggacggcaagttcgggctcgggttcaggaggtacgacgacgccagcagcggcagcggcaggctgaggtgctttgggcactccgggatgggcggctcgaccgggttctgcgacgtggagaacggcttcgccatcgcggtgacggtgaacaagctgtctctgggcagcgtcacgcgcggcgtcgtccggctcgtcctcgaggagctgggcctgcccgtgccggacgagtactcggccaccggggagaaggggcctgacatgatgctcaacctgacgacaacgacgacgactacgccgccgcaactgagatgacgacggcgaaactgagattatcaggttgggttcgtaataatctgtggaacaagatatatagcgagcagaaggaaggttggggtacagggatttggtggacagtatatatacgcgtgccattttgattttgacgtggcatgtaaaactcggcaaattctggtatattacgaagctgggtgctgggaattgtggccagcagtacaagaaatggacatgctagtttgttgacctgtgttttttttatggcggaactttttgttttgtcttctgggcttcactaggtctatgctcgtgcgttgccacggaaaacacatgaaatcgtaatatgtg

SEQ ID NO: 58104 - DNA, 2374 bp, Zea Mays
atttaaagaaaggaaaccgttttcgatttccttcctacgcgtctcgcgttggcagcgcgatccttcggagccgacgaatcccaccactgcccgcgccgcctccgcagacgacgcaactgacagtcaccgacgcgacgcggctcgcctcctccgcccttctgttcagcctcctcgcccgcgatggctccgggcaccgacgccggctacggccagtgggcggcggcgtgccccccgctgcggcggaacctgcagctgctttcgcccgacgaggttgagctagcaaaaatgctgttgaatgaaggccagattcacctgttcgaacactggcctgaaccaggtgtcgatgatgacaataaaagaggcttctttgatcaggttcgccgacttaattcaagctatcctggaggtctggtatcttacatccagaatgccaaaaaacttcttgcggattcaaaggaaggcaaaaacccatatgatggtttcaccccttctgtgccttcaggggaggttttgacttttggcaatgacaattttgtttcactggaaacagctgggataaaagaagcctgcaatgctgcatttgttcttgtagccggagggcttggcgaaaggcttggctacaaaggaattaaggtagcacttccccgggaaacaactactggaaaatgtttccttcaacactatatagagtctatcctggcttttcaagaggccagctgcaaaatggttgatgaggggtgccaaacaaagattccatttgttattatgacttctgatgatacaaatgcgctaactatcaagcttttagagtcaaactcctacttcggaatggaaccatctcaagtgaaaatactaaagcaggaaaaagtagcgtgtctagctgacaatgatgcaaggcttgcattagacccaagtgacaagtacaaaattcagacaaagccacatgggcatggagatgttcattctcttctttattcaagtggcttgcttgaacaatgactgaaggacggaagtgggttctctttttccaggatacaaatggattgcttttcaatgcaataccatcagcattaggtgtcagtgccaccaagggttacaatgtaaattctctcgctgttcctaggaaagccaaggaagcaattggaggaattaccaaacttactcatgtcgatggtagaacaatggtcatcaacgtagagtacaatcagcttgatccactccttcgtgcaactggacatcctgatggagattcaaattgcgagacaggctattctccatatcctggaaatataaaccagttgatactggagcttggaccatatattgaggagctcaagaaaacacatggcgccatttctgaatttgtaaatcccaagtatactgattcgaccaagacagcatttaaatcatccactcgtctagaatgcatgatgcaagactatccaaagacgttgcctccctcagcaaaagttggattcacagtgatggatacatggcttgcttacgctcctgtgaagaataatcccgaagacgcagctaaagttccaaagggcaacccttatcatagtgcaacatccggagagatggcaatttacagggcgaacagccttattctgagaaaggctggtgctcagatagctgatcctgttgttcacaccttcaacggacaagaggtagaggtttggccacgcgtaacctggagcccacggtggggtctcaccttcaagagtgtcaaggagaaagtgcacgggaactcttcagtttctcagaggtcagctttggtcatcaatggtcagaacgtcttccttgaaggcctctcgttggacggcactcttgttgtcaacgccgcggatgaagcagaggttaaacttaccggtcatatacagaataaaggctggactatccagcatgtcgactacaaggacgcctcggagaaggaagagatcaggatccgcggatttaagttggagaagattgagcagctagaggtgaactacacggagccaggaaaccatagcttgagtgcatgaaacaaaacattcttggttgacccgactagcttcctaccgattgggaatagttcgcattgcctcccagattctgggaggccattgccagcataagttgaagctgttgtattttagttcaaaattaaactagtggatgacaaatatttaagaatggaggtagtaataaggagccaagtgcttcaccaatcattccaaattcaatattctttatgtatatacgtactatttcatagccaaacgttttctcctcacctgtgtaatcggagttgattatttatctgggatctgatgttcatgttacaattttgaattttagaattgtgtgtgtattagttatattacta

SEQ ID NO: 58105 - DNA, 2499 bp, Zea Mays
atttaaagaaaggaaaccgttttcgatttccttcctacgcgtctcgcgttggcagcgcgatccttcggagccgacgaatcccaccactgcccgcgccgcctccgcagacgacgcaactgacagtcaccgacgcgacgcggctcgcctcctccgcccttctgttcagcctcctcgcccgcgatggctccgggcaccgacgccggctacggccagtgggcggcggcgtgccccccgctgcggcggaacctgcagctgctttcgcccgacgaggttgagctagcaaaaatgctgttgaatgaaggccagattcacctgttcgaacactggcctgaaccaggtgtcgatgatgacaataaaagaggcttctttgatcaggttcgccgacttaattcaagctatcctggaggtctggtatcttacatccagaatgccaaaaaacttcttgcggattcaaaggaaggcaaaaacccatatgatggtttcaccccttctgtgccttcaggggaggttttgacttttggcaatgacaattttgtttcactggaaacagctgggataaaagaagcctgcaatgctgcatttgttcttgtagccggagggcttggcgaaaggcttggctacaaaggaattaaggtagcacttccccgggaaacaactactggaaaatgtttccttcaacactatatagagtctatcctggcttttcaagaggccagctgcaaaatggttgatgaggggtgccaaacaaagattccatttgttattatgacttctgatgatacaaatgcgctaactatcaagcttttagagtcaaactcctacttcggaatggaaccatctcaagtgaaaatactaaagcaggaaaaagtagcgtgtctagctgacaatgatgcaaggcttgcattagacccaagtgacaagtacaaaattcagacaaagccacatgggcatggagatgttcattctcttctttattcaagtggcttgcttgaacaatggaagactgaaggacggaagtgggttctctttttccaggatacaaatggattgcttttcaatgtttgtacactggcttccctactgtgctataattttattgttaaaaatagagcatttttactatccttgaaaatgtacagggaggtaccaaaattattacatgaatctggtacctaaggtaccaaattgtagtgccaaggcaataccatcagcattaggtgtcagtgccaccaagggttacaatgtaaattctctcgctgttcctaggaaagccaaggaagcaattggaggaattaccaaacttactcatgtcgatggtagaacaatggtcatcaacgtagagtacaatcagcttgatccactccttcgtgcaactggacatcctgatggagattcaaattgcgagacaggctattctccatatcctggaaatataaaccagttgatactggagcttggaccatatattgaggagctcaagaaaacacatggcgccatttctgaatttgtaaatcccaagtatactgattcgaccaagacagcatttaaatcatccactcgtctagaatgcatgatgcaagactatccaaagacgttgcctccctcagtgatggatacatggcttgcttacgctcctgtgaagaataatcccgaagacgcagctaaagttccaaagggcaacccttatcatagtgcaacatccggagagatggcaatttacagggcgaacagccttattctgagaaaggctggtgctcagatagctgatcctgttgttcacaccttcaacggacaagaggtagaggtttggccacgcgtaacctggagcccacggtggggtctcaccttcaagagtgtcaaggagaaagtgcacgggaactcttcagtttctcagaggtcagctttggtcatcaatggtcagaacgtcttccttgaaggcctctcgttggacggcactcttgttgtcaacgccgcggatgaagcagaggttaaacttaccggtcatatacagaataaaggctggactatccagcatgtcgactacaaggacgcctcggagaaggaagagatcaggatccgcggatttaagttggagaagattgagcagctagaggtgaactacacggagccaggaaaccatagcttgagtgcatgaaacaaaacattcttggttgacccgactagcttcctaccgattgggaatagttcgcattgcctcccagattctgggaggccattgccagcataagttgaagctgttgtattttagttcaaaattaaactagtggatgacaaatatttaagaatggaggtagtaataaggagccaagtgcttcaccaatcattccaaattcaatattctttatgtatatacgtactatttcatagccaaacgttttctcctcacctgtgtaatcggagttgattatttatctgggatctgatgttcatgttacaattttgaattttagaattgtgtgtgtattagttatattacta

SEQ ID NO: 58106 - DNA, 2739 bp, Zea Mays
atttaaagaaaggaaaccgttttcgatttccttcctacgcgtctcgcgttggcagcgcgatccttcggagccgacgaatcccaccactgcccgcgccgcctccgcagacgacgcaactgacagtcaccgacgcgacgcggctcgcctcctccgcccttctgttcagcctcctcgcccgcgatggctccgggcaccgacgccggctacggccagtgggcggcggcgtgccccccgctgcggcggaacctgcagctgctttcgcccgacgaggttgagctagcaaaaatgctgttgaatgaaggccagattcacctgttcgaacactggcctgaaccaggtgtcgatgatgacaataaaagaggcttctttgatcaggttcgccgacttaattcaagctatcctggaggtctggtatcttacatccagaatgccaaaaaacttcttgcggattcaaaggaaggcaaaaacccatatgatggtttcaccccttctgtgccttcaggggaggttttgacttttggcaatgacaattttgtttcactggaaacagctgggataaaagaagcctgcaatgctgcatttgttcttgtagccggagggcttggcgaaaggcttggctacaaaggaattaaggtagcacttccccgggaaacaactactggaaaatgtttccttcaacactatatagagtctatcctggcttttcaagaggccagctgcaaaatggttgatgaggggtgccaaacaaagattccatttgttattatgacttctgatgatacaaatgcgctaactatcaagcttttagagtcaaactcctacttcggaatggaaccatctcaagtgaaaatactaaagcaggaaaaagtagcgtgtctagctgacaatgatgcaaggcttgcattagacccaagtgacaagtacaaaattcagacaaagccacatgggcatggagatgttcattctcttctttattcaagtggcttgcttgaacaatggaagactgaaggacggaagtgggttctctttttccaggatacaaatggattgcttttcaatgcaataccatcagcattaggtgtcagtgccaccaagggttacaatgtaaattctctcgctgttcctaggaaagccaaggaagcaattggaggaattaccaaacttactcatgtcgatggtagaacaatggtcatcaacgtagagtacaatcagcttgatccactccttcgtgcaactggacatcctgatggagattcaaattgcgagacaggctattctccatatcctggaaatataaaccaggtaaactatttgttccaaagggataatttaccatgagttcagacatggcaagtgatctgtggctcttggttcaccaaatactgaaaacatgtcttattgatattccccttcggatgagggtgaaccatgaaccgtctattaatgattgtcctgctcttatgttttggagatttaacgctaacaccaatatgagttttgcggatgctgttaccttcaatgtcacattatgtgtgttataacctttcatgctcattttgtccattgcttttaaaactggacagaactctgtcaacattgttatatgatgttacgttcaaggtgcatattttgttgtactaagaaatacactgagcttttgtagttgatactggagcttggaccatatattgaggagctcaagaaaacacatggcgccatttctgaatttgtaaatcccaagtatactgattcgaccaagacagcatttaaatcatccactcgtctagaatgcatgatgcaagactatccaaagacgttgcctccctcagcaaaagttggattcacagtgatggatacatggcttgcttacgctcctgtgaagaataatcccgaagacgcagctaaagttccaaagggcaacccttatcatagtgcaacatccggagagatggcaatttacagggcgaacagccttattctgagaaaggctggtgctcagatagctgatcctgttgttcacaccttcaacggacaagaggtagaggtttggccacgcgtaacctggagcccacggtggggtctcaccttcaagagtgtcaaggagaaagtgcacgggaactcttcagtttctcagaggtcagctttggtcatcaatggtcagaacgtcttccttgaaggcctctcgttggacggcactcttgttgtcaacgccgcggatgaagcagaggttaaacttaccggtcatatacagaataaaggctggactatccagcatgtcgactacaaggacgcctcggagaaggaagagatcaggatccgcggatttaagttggagaagattgagcagctagaggtgaactacacggagccaggaaaccatagcttgagtgcatgaaacaaaacattcttggttgacccgactagcttcctaccgattgggaatagttcgcattgcctcccagattctgggaggccattgccagcataagttgaagctgttgtattttagttcaaaattaaactagtggatgacaaatatttaagaatggaggtagtaataaggagccaagtgcttcaccaatcattccaaattcaatattctttatgtatatacgtactatttcatagccaaacgttttctcctcacctgtgtaatcggagttgattatttatctgggatctgatgttcatgttacaattttgaattttagaattgtgtgtgtattagttatattacta

SEQ ID NO: 58107 - DNA, 2731 bp, Zea Mays
atttaaagaaaggaaaccgttttcgatttccttcctacgcgtctcgcgttggcagcgcgatccttcggagccgacgaatcccaccactgcccgcgccgcctccgcagacgacgcaactgacagtcaccgacgcgacgcggctcgcctcctccgcccttctgttcagcctcctcgcccgcgatggctccgggcaccgacgccggctacggccagtgggcggcggcgtgccccccgctgcggcggaacctgcagctgctttcgcccgacgaggttgagctagcaaaaatgctgttgaatgaaggccagattcacctgttcgaacactggcctgaaccaggtgtcgatgatgacaataaaagaggcttctttgatcaggttcgccgacttaattcaagctatcctggaggtctggtatcttacatccagaatgccaaaaaacttcttgcggattcaaaggaaggcaaaaacccatatgatggtttcaccccttctgtgccttcaggggaggttttgacttttggcaatgacaattttgtttcactggaaacagctgggataaaagaagcctgcaatgctgcatttgttcttgtagccggagggcttggcgaaaggcttggctacaaaggaattaaggtagcacttccccgggaaacaactactggaaaatgtttccttcaacactatatagagtctatcctggcttttcaagaggccagctgcaaaatggttgatgaggggtgccaaacaaagattccatttgttattatgacttctgatgatacaaatgcgctaactatcaagcttttagagtcaaactcctacttcggaatggaaccatctcaagtgaaaatactaaagcaggaaaaagtagcgtgtctagctgacaatgatgcaaggcttgcattagacccaagtgacaagtacaaaattcagacaaagccacatgggcatggagatgttcattctcttctttattcaagtggcttgcttgaacaatgactgaaggacggaagtgggttctctttttccaggatacaaatggattgcttttcaatgcaataccatcagcattaggtgtcagtgccaccaagggttacaatgtaaattctctcgctgttcctaggaaagccaaggaagcaattggaggaattaccaaacttactcatgtcgatgaacaatggtcatcaacgtagagtacaatcagcttgatccactccttcgtgcaactggacatcctgatggagattcaaattgcgagacaggctattctccatatcctggaaatataaaccaggtaaactatttgttccaaagggataatttaccatgagttcagacatggcaagtgatctgtggctcttggttcaccaaatactgaaaacatgtcttattgatattccccttcggatgagggtgaaccatgaaccgtctattaatgattgtcctgctcttatgttttggagatttaacgctaacaccaatatgagttttgcggatgctgttaccttcaatgtcacattatgtgtgttataacctttcatgctcattttgtccattgcttttaaaactggacagaactctgtcaacattgttatatgatgttacgttcaaggtgcatattttgttgtactaagaaatacactgagcttttgtagttgatactggagcttggaccatatattgaggagctcaagaaaacacatggcgccatttctgaatttgtaaatcccaagtatactgattcgaccaagacagcatttaaatcatccactcgtctagaatgcatgatgcaagactatccaaagacgttgcctccctcagcaaaagttggattcacagtgatggatacatggcttgcttacgctcctgtgaagaataatcccgaagacgcagctaaagttccaaagggcaacccttatcatagtgcaacatccggagagatggcaatttacagggcgaacagccttattctgagaaaggctggtgctcagatagctgatcctgttgttcacaccttcaacggacaagaggtagaggtttggccacgcgtaacctggagcccacggtggggtctcaccttcaagagtgtcaaggagaaagtgcacgggaactcttcagtttctcagaggtcagctttggtcatcaatggtcagaacgtcttccttgaaggcctctcgttggacggcactcttgttgtcaacgccgcggatgaagcagaggttaaacttaccggtcatatacagaataaaggctggactatccagcatgtcgactacaaggacgcctcggagaaggaagagatcaggatccgcggatttaagttggagaagattgagcagctagaggtgaactacacggagccaggaaaccatagcttgagtgcatgaaacaaaacattcttggttgacccgactagcttcctaccgattgggaatagttcgcattgcctcccagattctgggaggccattgccagcataagttgaagctgttgtattttagttcaaaattaaactagtggatgacaaatatttaagaatggaggtagtaataaggagccaagtgcttcaccaatcattccaaattcaatattctttatgtatatacgtactatttcatagccaaacgttttctcctcacctgtgtaatcggagttgattatttatctgggatctgatgttcatgttacaattttgaattttagaattgtgtgtgtattagttatattacta

SEQ ID NO: 58108 - DNA, 2159 bp, Zea Mays
ggcccacaatgcgattagggagcatggttctcgacttctcgtattcatttggttgagctagcaaaaatgctgttgaatgaaggccagattcacctgttcgaacactggcctgaaccaggtgtcgatgatgacaataaaagaggcttctttgatcaggttcgccgacttaattcaagctatcctggaggtctggtatcttacatccagaatgccaaaaaacttcttgcggattcaaaggaaggcaaaaacccatatgatggtttcaccccttctgtgccttcaggggaggttttgacttttggcaatgacaattttgtttcactggaaacagctgggataaaagaagcctgcaatgctgcatttgttcttgtagccggagggcttggcgaaaggcttggctacaaaggaattaaggtagcacttccccgggaaacaactactggaaaatgtttccttcaacactatatagagtctatcctggcttttcaagaggccagctgcaaaatggttgatgaggggtgccaaacaaagattccatttgttattatgacttctgatgatacaaatgcgctaactatcaagcttttagagtcaaactcctacttcggaatggaaccatctcaagtgaaaatactaaagcaggaaaaagtagcgtgtctagctgacaatgatgcaaggcttgcattagacccaagtgacaagtacaaaattcagacaaagccacatgggcatggagatgttcattctcttctttattcaagtggcttgcttgaacaatggaagactgaaggacggaagtgggttctctttttccaggatacaaatggattgcttttcaatgcaataccatcagcattaggtgtcagtgccaccaagggttacaatgtaaattctctcgctgttcctaggaaagccaaggaagcaattggaggaattaccaaacttactcatgtcgatggtagaacaatggtcatcaacgtagagtacaatcagcttgatccactccttcgtgcaactggacatcctgatggagattcaaattgcgagacaggctattctccatatcctggaaatataaaccagttgatactggagcttggaccatatattgaggagctcaagaaaacacatggcgccatttctgaatttgtaaatcccaagtatactgattcgaccaagacagcatttaaatcatccactcgtctagaatgcatgatgcaagactatccaaagacgttgcctccctcagcaaaagttggattcacagtgatggatacatggcttgcttacgctcctgtgaagaataatcccgaagacgcagctaaagttccaaagggcaacccttatcatagtgcaacatccggagagatggcaatttacagggcgaacagccttattctgagaaaggctggtgctcagatagctgatcctgttgttcacaccttcaacggacaagaggtagaggtttggccacgcgtaacctggagcccacggtggggtctcaccttcaagagtgtcaaggagaaagtgcacgggaactcttcagtttctcagaggtcagctttggtcatcaatggtcagaacgtcttccttgaaggcctctcgttggacggcactcttgttgtcaacgccgcggatgaagcagaggttaaacttaccggtcatatacagaataaaggctggactatccagcatgtcgactacaaggacgcctcggagaaggaagagatcaggatccgcggatttaagttggagaagattgagcagctagaggtgaactacacggagccaggaaaccatagcttgagtgcatgaaacaaaacattcttggttgacccgactagcttcctaccgattgggaatagttcgcattgcctcccagattctgggaggccattgccagcataagttgaagctgttgtattttagttcaaaattaaactagtggatgacaaatatttaagaatggaggtagtaataaggagccaagtgcttcaccaatcattccaaattcaatattctttatgtatatacgtactatttcatagccaaacgttttctcctcacctgtgtaatcggagttgattatttatctgggatctgatgttcatgttacaattttgaattttagaattgtgtgtgtattagttatattacta

SEQ ID NO: 58109 - DNA, 1366 bp, Zea Mays
gactgaaggacggaagtgggttctctttttccaggatacaaatggattgcttttcaatgcaataccatcagcattaggtgtcagtgccaccaagggttacaatgtaaattctctcgctgttcctaggaaagccaaggaagcaattggaggaattaccaaacttactcatgtcgatggtagaacaatggtcatcaacgtagagtacaatcagcttgatccactccttcgtgcaactggacatcctgatggagattcaaattgcgagacaggctattctccatatcctggaaatataaaccagttgatactggagcttggaccatatattgaggagctcaagaaaacacatggcgccatttctgaatttgtatactgattcgaccaagacagcatttaaatcatccactcgtctagaatgcatgatgcaagactatccaaagacgttgcctccctcagcaaaagttggattcacagtgatggatacatggcttgcttacgctcctgtgaagaataatcccgaagacgcagctaaagttccaaagggcaacccttatcatagtgcaacatccggagagatggcaatttacagggcgaacagccttattctgagaaaggctggtgctcagatagctgatcctgttgttcacaccttcaacggacaagaggtagaggtttggccacgcgtaacctggagcccacggtggggtctcaccttcaagagtgtcaaggagaaagtgcacgggaactcttcagtttctcagaggtcagctttggtcatcaatggtcagaacgtcttccttgaaggcctctcgttggacggcactcttgttgtcaacgccgcggatgaagcagaggttaaacttaccggtcatatacagaataaaggctggactatccagcatgtcgactacaaggacgcctcggagaaggaagagatcaggatccgcggatttaagttggagaagattgagcagctagaggtgaactacacggagccaggaaaccatagcttgagtgcatgaaacaaaacattcttggttgacccgactagcttcctaccgattgggaatagttcgcattgcctcccagattctgggaggccattgccagcataagttgaagctgttgtattttagttcaaaattaaactagtggatgacaaatatttaagaatggaggtagtaataaggagccaagtgcttcaccaatcattccaaattcaatattctttatgtatatacgtactatttcatagccaaacgttttctcctcacctgtgtaatcggagttgattatttatctgggatctgatgttcatgttacaattttgaattttagaattgtgtgtgtattagttatattacta

SEQ ID NO: 58110 - DNA, 1357 bp, Zea Mays
tgaatctggtacctaaggtaccaaattgtagtgccaaggcaataccatcagcattaggtgtcagtgccaccaagggttacaatgtaaattctctcgctgttcctaggaaagccaaggaagcaattggaggaattaccaaacttactcatgtcgatggtagaacaatggtcatcaacgtagagtacaatcagcttgatccactccttcgtgcaactggacatcctgatggagattcaaattgcgagacaggctattctccatatcctggaaatataaaccagttgatactggagcttggaccatatattgaggagctcaagaaaacacatggcgccatttctgaatttgtaaatcccaagtatactgattcgaccaagacagcatttaaatcatccactcgtctagaatgcatgatgcaagactatccaaagacgttgcctccctcagcaaaagttggattcacagtgatggatacatggcttgcttacgctcctgtgaagaataatcccgaagacgcagctaaagttccaaagggcaacccttatcatagtgcaacatccggagagatggcaatttacagggcgaacagccttattctgagaaaggctggtgctcagatagctgatcctgttgttcacaccttcaacggacaagaggtagaggtttggccacgcgtaacctggagcccacggtggggtctcaccttcaagagtgtcaaggagaaagtgcacgggaactcttcagtttctcagaggtcagctttggtcatcaatggtcagaacgtcttccttgaaggcctctcgttggacggcactcttgttgtcaacgccgcggatgaagcagaggttaaacttaccggtcatatacagaataaaggctggactatccagcatgtcgactacaaggacgcctcggagaaggaagagatcaggatccgcggatttaagttggagaagattgagcagctagaggtgaactacacggagccaggaaaccatagcttgagtgcatgaaacaaaacattcttggttgacccgactagcttcctaccgattgggaatagttcgcattgcctcccagattctgggaggccattgccagcataagttgaagctgttgtattttagttcaaaattaaactagtggatgacaaatatttaagaatggaggtagtaataaggagccaagtgcttcaccaatcattccaaattcaatattctttatgtatatacgtactatttcatagccaaacgttttctcctcacctgtgtaatcggagttgattatttatctgggatctgatgttcatgttacaattttgaattttagaattgtgtgtgtattagttatattacta

SEQ ID NO: 58111 - DNA, 1212 bp, Zea Mays
ccaaattgtagtgccaaggcaataccatcagcattaggtgtcagtgccaccaagggttacaatgtaaattctctcgctgttcctaggaaagccaaggaagcaattggaggaattaccaaacttactcatgtcgatgttgatactggagcttggaccatatattgaggagctcaagaaaacacatggcgccatttctgaatttgtaaatcccaagtatactgattcgaccaagacagcatttaaatcatccactcgtctagaatgcatgatgcaagactatccaaagacgttgcctccctcagcaaaagttggattcacagtgatggatacatggcttgcttacgctcctgtgaagaataatcccgaagacgcagctaaagttccaaagggcaacccttatcatagtgcaacatccggagagatggcaatttacagggcgaacagccttattctgagaaaggctggtgctcagatagctgatcctgttgttcacaccttcaacggacaagaggtagaggtttggccacgcgtaacctggagcccacggtggggtctcaccttcaagagtgtcaaggagaaagtgcacgggaactcttcagtttctcagaggtcagctttggtcatcaatggtcagaacgtcttccttgaaggcctctcgttggacggcactcttgttgtcaacgccgcggatgaagcagaggttaaacttaccggtcatatacagaataaaggctggactatccagcatgtcgactacaaggacgcctcggagaaggaagagatcaggatccgcggatttaagttggagaagattgagcagctagaggtgaactacacggagccaggaaaccatagcttgagtgcatgaaacaaaacattcttggttgacccgactagcttcctaccgattgggaatagttcgcattgcctcccagattctgggaggccattgccagcataagttgaagctgttgtattttagttcaaaattaaactagtggatgacaaatatttaagaatggaggtagtaataaggagccaagtgcttcaccaatcattccaaattcaatattctttatgtatatacgtactatttcatagccaaacgttttctcctcacctgtgtaatcggagttgattatttatctgggatctgatgttcatgttacaattttgaattttagaattgtgtgtgtattagttatattacta

SEQ ID NO: 58112 - DNA, 1065 bp, Zea Mays
gttgtagttgatactggagcttggaccatatattgaggagctcaagaaaacacatggcgccatttctgaatttgtaaatcccaagtatactgattcgaccaagacagcatttaaatcatccactcgtctagaatgcatgatgcaagactatccaaagacgttgcctccctcagtgatggatacatggcttgcttacgctcctgtgaagaataatcccgaagacgcagctaaagttccaaagggcaacccttatcatagtgcaacatccggagagatggcaatttacagggcgaacagccttattctgagaaaggctggtgctcagatagctgatcctgttgttcacaccttcaacggacaagaggtagaggtttggccacgcgtaacctggagcccacggtggggtctcaccttcaagagtgtcaaggagaaagtgcacgggaactcttcagtttctcagaggtcagctttggtcatcaatggtcagaacgtcttccttgaaggcctctcgttggacggcactcttgttgtcaacgccgcggatgaagcagaggttaaacttaccggtcatatacagaataaaggctggactatccagcatgtcgactacaaggacgcctcggagaaggaagagatcaggatccgcggatttaagttggagaagattgagcagctagaggtgaactacacggagccaggaaaccatagcttgagtgcatgaaacaaaacattcttggttgacccgactagcttcctaccgattgggaatagttcgcattgcctcccagattctgggaggccattgccagcataagttgaagctgttgtattttagttcaaaattaaactagtggatgacaaatatttaagaatggaggtagtaataaggagccaagtgcttcaccaatcattccaaattcaatattctttatgtatatacgtactatttcatagccaaacgttttctcctcacctgtgtaatcggagttgattatttatctgggatctgatgttcatgttacaattttgaattttagaattgtgtgtgtattagttatattacta

SEQ ID NO: 58113 - DNA, 1929 bp, Zea Mays
ggattcgtccacacccaggcacataaaagccgcctctcgccgccgactgcaaaccctcgtttttctctctcctgcgctgcgccgtccttcacctccgccgccgaatccgagactctgatctcgggttcaccgcagcgcacagagcacccctgactcccggcccgatccgcgctctcctctccgacgcttcaggaatggcacccgagggttctcagtttgatgctaagcactatgattctaaaatgcaggagctgctgagcactggtgagactgaggagttcttcacttcatatgatgaagtttttgaaagttttgatgacatgggccttcaagagaatcttctgagaggcatttatgcatatggttttgagaaaccatctgcaattcagcagagaggaattgttcccttctgcaaggggcttgatgtcattcagcaagcacaatctggccctggttcttgctcccacccgtgagcttgcacagcaaattgagaaagttatgcgcgcacttggtgactaccttggtgttaaagtccatgcatgcgttggaggaacatctgttcgtgaggaccaaaggattctcgccagtggtgtgcatgttgttgttggtacacctggtcgtgtgtttgacatgctgcgtagacagtccctccgccctgataacatcaagatgtttgttcttgacgaagctgatgaaatgctttctcgtggtttcaaggatcagatttatgacatcttccagcttctgccatccaagattcaggttggagtcttctctgctaccatgccacctgaggcccttgagattacccgcaagttcatgaacaaaccagtgagaattcttgtgaagagagatgagctgacccttgagggtatcaagcagttctatgtgaatgtggacaaggaagactggaagctggacacactgtgtgacctgtatgagaccctggccattacccagagtgtcatctttgtcaacacccgccgcaaggtggactggctcactgacaagatgaggagcagggaccacaccgtttctgccactcatggtgacatggaccagaacactagagacatcatcatgagggagttccggtctggctcctcccgtgtgctcatcaccactgacctgcttgctcgtggtattgatgttcagcaggtgtccctggtcatcaactatgatcttcccacccagccagagaactacctgcatcgtattggtcgtagtggtcgttttggtaggaagggtgttgccatcaactttgtgacccgcgacgacgaacgtatgctgtttgacattcagaagttctacaacgtgttgattgaggagctgcctgccaatgttgctgaccttctgtgatcaatttcaagaaaaaacaaaacaaaaaagggtggtgaggaacctggtaaggcttggttttgtcgaaataccgtgggagagggggtgataaggacggtggggtttctatgttgaagtcgtggtcatggacaatttgtgattttttctcctttatgccatgttttggaatttttgtagctgcctaggccttgtggtaatgtgctgctgtgggggttcattagtatgaagaggaagacgctgctggcgctgagtctttctctttattagtattttgtttaaaactatgtatgaccgaatggtggtatttatttgtgtcatccttgactcttattctgctgcaaccagatgtatcgtgccatgtctgcaccactggtctttgctatcctgagtaaaacctgtttactctgtcgagcttgtcgctgatacaccgatcctagctgttttgagtaaaacctgtttactctgttgagcttgtcacctggtgatgcaaggtgcttattgactggtaatgtattttgaagtcgttatactatctgaaaccccttcctgagcatttgaggtgagtttgtt

SEQ ID NO: 58114 - DNA, 1710 bp, Zea Mays
ggattcgtccacacccaggcacataaaagccgcctctcgccgccgactgcaaaccctcgtttttctctctcctgcgctgcgccgtccttcacctccgccgccgaatccgagactctgatctcgggttcaccgcagcgcacagagcacccctgactcccggcccgatccgcgctctcctctccgacgcttcagtcatggcaggaatggcacccgagggttctcagtttgatgctaagcactatgattctaaaatgcaggagctgctgagcactggtgagactgaggagttcttcacttcatatgatgaagtttttgaaagttttgatgacatgggccttcaagagaatcttctgagaggcatttatgcatatggttttgagaaaccatctgcaattcagcagagaggaattgttcccttctgcaaggggcttgatgtcattcagcaagcacaatctggtacaggaaagacagcaaccttctgttctgggatcttgcagcagcttgactatggtctggttgaatgccaggccctggttcttgctcccacccgtgagcttgcacagcaaattgagaaagttatgcgcgcacttggtgactaccttggtgttaaagtccatgcatgcgttggaggaacatctgttcgtgaggaccaaaggattctcgccagtggtgtgcatgttgttgttggtacacctggtcgtgtgtttgacatgctgcgtagacagtccctccgccctgataacatcaagatgtttgttcttgacgaagctgatgaaatgctttctcgtggtttcaaggatcagatttatgacatcttccagcttctgccatccaagattcaggttggagtcttctctgctaccatgccacctgaggcccttgagattacccgcaagttcatgaacaaaccagtgagaattcttgtgaagagagatgagctgacccttgagggtatcaagcagttctatgtgaatgtggacaaggaagactggaagctggacacactgtgtgacctgtatgagaccctggccattacccagagtgtcatctttgtcaacacccgccgcaaggtggactggctcactgacaagatgaggagcagggaccacaccgtttctgccactcatggtgacatggaccagaacactagagacatcatcatgagggagttccggtctggctcctcccgtgtgctcatcaccactgacctgcttgctcgtggtattgatgttcagcaggtgtccctggtcatcaactatgatcttcccacccagccagagaactacctgcatcgtattggtcgtagtggtcgttttggtaggaagggtgttgccatcaactttgtgacccgcgacgacgaacgtatgctgtttgacattcagaagttctacaacgtgttgattgaggagctgcctgccaatgttgctgaccttctgtgatcaatttcaagaaaaaacaaaacaaaaaagggtggtgaggaacctgatgtatcgtgccatgtctgcaccactggtctttgctatcctgagtaaaacctgtttactctgtcgagcttgtcgctgatacaccgatcctagctgttttgagtaaaacctgtttactctgttgagcttgtcacctggtgatgcaaggtgcttattgactggtaatgtattttgaagtcgttatactatctgaaaccccttcctgagcatttgaggtgagtttgtt

SEQ ID NO: 58115 - DNA, 1952 bp, Zea Mays
ggattcgtccacacccaggcacataaaagccgcctctcgccgccgactgcaaaccctcgtttttctctctcctgcgctgcgccgtccttcacctccgccgccgaatccgagactctgatctcgggttcaccgcagcgcacagagcacccctgactcccggcccgatccgcgctctcctctccgacgcttcagtcatggcaggaatggcacccgagggttctcagtttgatgctaagcactatgattctaaaatgcaggagctgctgagcactggtgagactgaggagttcttcacttcatatgatgaagtttttgaaagttttgatgacatgggccttcaagagaatcttctgagaggcatttatgcatatgcagagaggaattgttcccttctgcaaggggcttgatgtcattcagcaagcacaatctggtacaggaaagacagcaaccttctgttctgggatcttgcagcagcttgactatggtctggttgaatgccaggccctggttcttgctcccacccgtgagcttgcacagcaaattgagaaagttatgcgcgcacttggtgactaccttggtgttaaagtccatgcatgcgttggaggaacatctgttcgtgaggaccaaaggattctcgccagtggtgtgcatgttgttgttggtacacctggtcgtgtgtttgacatgctgcgtagacagtccctccgccctgataacatcaagatgtttgttcttgacgaagctgatgaaatgctttctcgtggtttcaaggatcagatttatgacatcttccagcttctgccatccaagattcaggttggagtcttctctgctaccatgccacctgaggcccttgagattacccgcaagttcatgaacaaaccagtgagaattcttgtgaagagagatgagctgacccttgagggtatcaagcagttctatgtgaatgtggacaaggaagactggaagctggacacactgtgtgacctgtatgagaccctggccattacccagagtgtcatctttgtcaacacccgccgcaaggtggactggctcactgacaagatgaggagcagggaccacaccgtttctgccactcatggtgacatggaccagaacactagagacatcatcatgagggagttccggtctggctcctcccgtgtgctcatcaccactgacctgcttgctcgtggtattgatgttcagcaggtgtccctggtcatcaactatgatcttcccacccagccagagaactacctgcatcgtattggtcgtagtggtcgttttggtaggaagggtgttgccatcaactttgtgacccgcgacgacgaacgtatgctgtttgacattcagaagttctacaacgtgttgattgaggagctgcctgccaatgttgctgaccttctgtgatcaatttcaagaaaaaacaaaacaaaaaagggtggtgaggaacctggtaaggcttggttttgtcgaaataccgtgggagagggggtgataaggacggtggggtttctatgttgaagtcgtggtcatggacaatttgtgattttttctcctttatgccatgttttggaatttttgtagctgcctaggccttgtggtaatgtgctgctgtgggggttcattatctttctctttattagtattttgtttaaaactatgtatgaccgaatggtggtatttatttgtgtcatccttgactcttattctgctgcaaccagatgtatcgtgccatgtctgcaccactggtctttgctatcctgagtaaaacctgtttactctgtcgagcttgtcgctgatacaccgatcctagctgttttgagtaaaacctgtttactctgttgagcttgtcacctggtgatgcaaggtgcttattgactggtaatgtattttgaagtcgttatactatctgaaaccccttcctgagcatttgaggtgagtttgtt

SEQ ID NO: 58116 - DNA, 1907 bp, Zea Mays
ggattcgtccacacccaggcacataaaagccgcctctcgccgccgactgcaaaccctcgtttttctctctcctgcgctgcgccgtccttcacctccgccgccgaatccgagactctgatctcgggttcaccgcagcgcacagagcacccctgactcccggcccgatccgcgctctcctctccgacgcttcagtcatggcaggaatggcacccgagggttctcagtttgatgctaagcactatgattctaaaatgcaggagctgctgagcactggtgagactgaggagttcttcacttcatatgatgaagtttttgaaagttttgatgacatgggccttcaagagaatcttctgagaggcatttatgcatatggttttgagaaaccatctgcaattcagcagagaggaattgttcccttctgcaaggggcttgatgtcattcagcaagcacaatctggccctggttcttgctcccacccgtgagcttgcacagcaaattgagaaagttatgcgcgcacttggtgactaccttggtgttaaagtccatgcatgcgttggaggaacatctgttcgtgaggaccaaaggattctcgccagtggtgtgcatgttgttgttggtacacctggtcgtgtgtttgacatgctgcgtagacagtccctccgccctgataacatcaagatgtttgttcttgacgaagctgatgaaatgctttctcgtggtttcaaggatcagatttatgacatcttccagcttctgccatccaagattcaggttggagtcttctctgctaccatgccacctgaggcccttgagattacccgcaagttcatgaacaaaccagtgagaattcttgtgaagagagatgagctgacccttgagggtatcaagcagttctatgtgaatgtggacaaggaagactggaagctggacacactgtgtgacctgtatgagaccctggccattacccagagtgtcatctttgtcaacacccgccgcaaggtggactggctcactgacaagatgaggagcagggaccacaccgtttctgccactcatggtgacatggaccagaacactagagacatcatcatgagggagttccggtctggctcctcccgtgtgctcatcaccactgacctgcttgctcgtggtattgatgttcagcaggtgtccctggtcatcaactatgatcttcccacccagccagagaactacctgcatcgtattggtcgtagtggtcgttttggtaggaagggtgttgccatcaactttgtgacccgcgacgacgaacgtatgctgtttgacattcagaagttctacaacgtgttgattgaggagctgcctgccaatgttgctgaccttctgtgatcaatttcaagaaaaaacaaaacaaaaaagggtggtgaggaacctggtaaggcttggttttgtcgaaataccgtgggagagggggtgataaggacggtggggtttctatgttgaagtcgtggtcatggacaatttgtgattttttctcctttatgccatgttttggaatttttgtagctgcctaggccttgtggtaatgtgctgctgtgggggttcattatctttctctttattagtattttgtttaaaactatgtatgaccgaatggtggtatttatttgtgtcatccttgactcttattctgctgcaaccagatgtatcgtgccatgtctgcaccactggtctttgctatcctgagtaaaacctgtttactctgtcgagcttgtcgctgatacaccgatcctagctgttttgagtaaaacctgtttactctgttgagcttgtcacctggtgatgcaaggtgcttattgactggtaatgtattttgaagtcgttatactatctgaaaccccttcctgagcatttgaggtgagtttgtt

SEQ ID NO: 58117 - DNA, 1903 bp, Zea Mays
ggtccatctggcggcgctgcccgtgtggatctgtgccgattcggtgggagtggtagtcattttgacggttctggattgagggacagtcatggcaggaatggcacccgagggttctcagtttgatgctaagcactatgattctaaaatgcaggagctgctgagcactggtgagactgaggagttcttcacttcatatgatgaagtttttgaaagttttgatgacatgggccttcaagagaatcttctgagaggcatttatgcatatggttttgagaaaccatctgcaattcagcagagaggaattgttcccttctgcaaggggcttgatgtcattcagcaagcacaatctggtacaggaaagacagcaaccttctgttctgggatcttgcagcagcttgactatggtctggttgaatgccaggccctggttcttgctcccacccgtgagcttgcacagcaaattgagaaagttatgcgcgcacttggtgactaccttggtgttaaagtccatgcatgcgttggaggaacatctgttcgtgaggaccaaaggattctcgccagtggtgtgcatgttgttgttggtacacctggtcgtgtgtttgacatgctgcgtagacagtccctccgccctgataacatcaagatgtttgttcttgacgaagctgatgaaatgctttctcgtggtttcaaggatcagatttatgacatcttccagcttctgccatccaagattcaggttggagtcttctctgctaccatgccacctgaggcccttgagattacccgcaagttcatgaacaaaccagtgagaattcttgtgaagagagatgagctgacccttgagggtatcaagcagttctatgtgaatgtggacaaggaagactggaagctggacacactgtgtgacctgtatgagaccctggccattacccagagtgtcatctttgtcaacacccgccgcaaggtggactggctcactgacaagatgaggagcagggaccacaccgtttctgccactcatggtgacatggaccagaacactagagacatcatcatgagggagttccggtctggctcctcccgtgtgctcatcaccactgacctgcttgctcgtggtattgatgttcagcaggtgtccctggtcatcaactatgatcttcccacccagccagagaactacctgcatcgtattggtcgtagtggtcgttttggtaggaagggtgttgccatcaactttgtgacccgcgacgacgaacgtatgctgtttgacattcagaagttctacaacgtgttgattgaggagctgcctgccaatgttgctgaccttctgtgatcaatttcaagaaaaaacaaaacaaaaaagggtggtgaggaacctggtaaggcttggttttgtcgaaataccgtgggagagggggtgataaggacggtggggtttctatgttgaagtcgtggtcatggacaatttgtgattttttctcctttatgccatgttttggaatttttgtagctgcctaggccttgtggtaatgtgctgctgtgggggttcattagtatgaagaggaagacgctgctggcgctgagtctttctctttattagtattttgtttaaaactatgtatgaccgaatggtggtatttatttgtgtcatccttgactcttattctgctgcaaccagatgtatcgtgccatgtctgcaccactggtctttgctatcctgagtaaaacctgtttactctgtcgagcttgtcgctgatacaccgatcctagctgttttgagtaaaacctgtttactctgttgagcttgtcacctggtgatgcaaggtgcttattgactggtaatgtattttgaagtcgttatactatctgaaaccccttcctgagcatttgaggtgagtttgtt

SEQ ID NO: 58118 - DNA, 1768 bp, Zea Mays
ttctaacccggttacctgtggactcttgagctgcgtggtgtcctagttatggagtcgagaatccatctaaaatcttgcctagggtcttcagcgcctcaagcaaggttgcggccatgccattttggagtccatctggcgatattagctggcaaggtttagggagggttttgtgctgtgctgtggaaaatttgatgagcggctgcgtggacatgtgacaagtttttggattttgatcagttatatcagaggagtgcttatggatgatttcatggctgtagcttgctaggccctgctttcctgtttgtacagatacatcatggcaccacgcagtaggccttcgtctaaaaggcctctctggttcatcgtgttggttgcatttgtctgtgcagtagccattggagcctacctttatactccacggcattacacagcatgttatctggtaccatcagaagcctgcaattctcggcctcctccagaacctgctagggtatacactgatgatgagatcgctgctcgtgctatcatgagagacatcatccgggcacggccagtgcagtcaaagaatccaaaaattgctttcatgttcttgacgcccagttcattgccatttgagaaactgtgggaaaaattcttcatgggacatgaagaccgatacaccatatatgtgcatgcatcaagagatagaccaattcatgcaagtccagtattctctggcagggatattcgaagtgaaaaggtgatctggggcacaatttctatggttgatgctgaaaagcggctcttggcccatgccctacaagaccctgaaaaccagcattttgtcttgctttctgagagctgtgtctgtgtgccacttcataactttgattatatatatagttatctcatggagacaaacgtcagttttgttgactgttttgatgatcctggtccacatggagcaggtagatattctgaccatatgttacctgaaattgtgaagaaagattggagaaagggtgcacagtggtttacagtgaaacggcagcatgcagttcttattcttgctgacaccctttactatgggaagttcaagcgttactgtaagccaggaaatgagtggcataactgctattcagatgagcactacttgccaactctcttcaatatggctgacccgactggaattgcaaactggtcagtgacgcacgtagattggtccgaagggaaatggcatcccaaagtctacagggctgtggatacgagcttcgagctgctcaagaacatctcgtccattgatgagagcgtccatgtcagcagcaacgcgaagcatgtagcgcagaggaggccgtgcgtgtggaacggcatgaagcggccctgctacctgttcgcgcgcaagttctaccccgaggcgcttggcaacctgatgaacatattctcgaacttcaccgtcatctgagcagctgaatggaggcaggaacacagctaagcaactctgtcggatcagagtccagacgtcgccaactacctgctgccgcaactctagtagatagattgctggtgatggctgctgagctaaggttatttgccagctcttgagacggcaagttttgctggtgtggaacgatggctaggttggtgcgatttgcgaatgtgacgtgtggacttctgttgttgatactgctgcagatgaattgtgattaaattttatgatctttcatctaaaatccaatgtctcacgcacatattaaatcatgctctttcatctaagatccaatgtctcacg

SEQ ID NO: 58119 - DNA, 1614 bp, Zea Mays
cttgtatttcgtattatccctaataacttgagttcatttatgggtagaaactggcaagttccaggtttttggattttgatcagttatatcagaggagtgcttatggatgatttcatggctgtagcttgctaggccctgctttcctgtttgtacagatacatcatggcaccacgcagtaggccttcgtctaaaaggcctctctggttcatcgtgttggttgcatttgtctgtgcagtagccattggagcctacctttatactccacggcattacacagcatgttatctggtaccatcagaagcctgcaattctcggcctcctccagaacctgctagggtatacactgatgatgagatcgctgctcgtgctatcatgagagacatcatccgggcacggccagtgcagtcaaagaatccaaaaattgctttcatgttcttgacgcccagttcattgccatttgagaaactgtgggaaaaattcttcatgggacatgaagaccgatacaccatatatgtgcatgcatcaagagatagaccaattcatgcaagtccagtattctctggcagggatattcgaagtgaaaaggtgatctggggcacaatttctatggttgatgctgaaaagcggctcttggcccatgccctacaagaccctgaaaaccagcattttgtcttgctttctgagagctgtgtctgtgtgccacttcataactttgattatatatatagttatctcatggagacaaacgtcagttttgttgactgttttgatgatcctggtccacatggagcaggtagatattctgaccatatgttacctgaaattgtgaagaaagattggagaaagggtgcacagtggtttacagtgaaacggcagcatgcagttcttattcttgctgacaccctttactatgggaagttcaagcgttactgtaagccaggaaatgagtggcataactgctattcagatgagcactacttgccaactctcttcaatatggctgacccgactggaattgcaaactggtcagtgacgcacgtagattggtccgaagggaaatggcatcccaaagtctacagggctgtggatacgagcttcgagctgctcaagaacatctcgtccattgatgagagcgtccatgtcagcagcaacgcgaagcatgtagcgcagaggaggccgtgcgtgtggaacggcatgaagcggccctgctacctgttcgcgcgcaagttctaccccgaggcgcttggcaacctgatgaacatattctcgaacttcaccgtcatctgagcagctgaatggaggcaggaacacagctaagcaactctgtcggatcagagtccagacgtcgccaactacctgctgccgcaactctagtagatagattgctggtgatggctgctgagctaaggttatttgccagctcttgagacggcaagttttgctggtgtggaacgatggctaggttggtgcgatttgcgaatgtgacgtgtggacttctgttgttgatactgctgcagatgaattgtgattaaattttatgatctttcatctaaaatccaatgtctcacgcacatattaaatcatgctctttcatctaagatccaatgtctcacg

SEQ ID NO: 58120 - DNA, 223 bp, Zea Mays
tcgcccacccaccctcgaagtatttataacgtcaaagaataatatcacttcaggaacattgaactggtacgacagtgcaacacaaccgtatcagtttgtttcacttctgccacacacacactgttgttcttgtatatgctcaccgtatatgccacacacacacacacactatagttgagagaggccatgtcacctgactctatatgctaaccgtggatccgac

SEQ ID NO: 58121 - DNA, 2291 bp, Zea Mays
aaacagatagcctttcgtctctttcagcttcagaggccaccagcgcctggacgctcgcgccccggcctcgccgccatggcttcctccctggccgccctccactcagccgccgccagccacctcccacaccctcgacgtcagaggaccgccgccctcgcgcgcgcctctcctctcctccgcctgccgcttcgcctccgctcccgccgggtccccgggtcgccgccaagttggcgaccggcgccgctggcggcacggcaaccggcagggcgaggcggagcgtaggcgtcgacgtcgccgccctcgccgcggcgctgcgcgacgccagaacggccgacgacgtggagtcctcggtgaacgccttcttgagcgacgacgaggcccggctcctgccgctccaggtgtacacgtgcgtgatccgggggctcggcaagggcaacagcccggacgccgcgttcgccgtcgtcgagcacctcaagcggagaggggtggtgccgaaccagttcgtgtacaactgcctcctcggcgccgtcaagagctgcggcgagctcggccgggtccaggccgtcctcgacgacatggaggcgcagggggtgcccccgaacatcgtcaccttcaacacgctgatgtcgatccacgtccagcagggcagggtggaggacgccctcagggtgtacgccgacgtccaggggcgcgggctcgtgccgaccgccgcgacctactccacggtgatgtccgcctacaagaaggcgggggacgcgtccgcggctatccagctcttcgccctgctcagggagaggtacaggaacggggagctggtggggagccgtggtgacccggagcaggagctcgtcaagctcgagaagctgaccgtccgggcgtgctacctgtcgatgcggcggtcgctcgtcggggggaagaatccggtcggcgaggcgctgaaggtcctcctggacatggacgaagcaggtgtccggccggagcggagcgactacgagcggctcgtctgggcgtgcacccgggacgagcactacgccatcggcaaggagctgtaccagaggattcgcgacggtggcgacgagatcagcctgtccgtctgtaaccacctgatctggctaatgggcaaggcgaagaaatggtgggcggctctcgagatctacgaggacctgctggacaaagggccgaagccgaacaacctgtcccacgagctgatcatgtcgcacttcaacgtcctcctggacgccgccaagcgaaggggcatctggaggtggggcgtcaggctgctggacaagatgcaggagaagggcctgaagcccggaggcaaggagtggaacgcggtcctcctcgcgtgctcaagggcctccgagacgtctgcggctgtggacgtcttcaagaagatggtggagcgagggctgaagccggacgtggtctcctacggagcgttgctgagcgcgctcgagaaaggcaggctctacgacgaggcactgagggtctgggaacacatgcgcaggctcggcatcgaacccaacctctacgcgtacacgatcctggcgtcgatctacatcggcaagggcgaccacgccatggcggacgctgttcttcacgacatgctgtcgaagcggatcgcgccgaccgtcgtcaccttcaacgcgataatcagcgcgtgcgcgaggagcggttcgggtgggaacgccttcgagtggttccacaggatgaagatgaagggcattgagccgaatgagatcacgtaccaggtgttgattgaggctcttgtgcaggatgggaagccaagacttgcctatgagatgtacatgaaggcttgcggccagggtcttcagcttcctgcaaagtcgtatgacaccgtgctggaggcgtgtagggcttatggttccgtagtagatgtagctactctgggtcctcgaccttcgaaaggggtggaagtggaacccatcaggatagagaatagcttctcccgtttctctcagttcaaggatgtgcatggcagctctcatcgttttgcaggcgttggaatgtatgggttttacggatacagaatggcaaggtaaacaaaccaagcatgtaacctactatcaatccccctctccctcttgtaatcaccctcccaaacccaatgccacatttttaaaacatttgactcgtgtatttgtaagctcactaagttgcgaaaaaaaaatactagtgcactgccctttatgttagtgtggaccaaaaaagcgatgcaactttttggtgcgcatgtgttctttggaccaaccttttaaacaagacgtttc

SEQ ID NO: 58122 - DNA, 1861 bp, Zea Mays
gagtctacactattgactttaatagatagtagagaagtagcgactagggacactgtactgcaaaaactagtggatccgacgtctgtgatctgtcaacaaaaacccggacccacacggccgcctcctgcatgtccaccctccaaatcgaaaacagatcgaaatcctagggtagggttaccctccaccccaatccccatcgtccgttccgatccgatccctcaccgtccatcaatgtcccactcccaccatgacggaagcaagccctaccagccgcgccgggggcccgagcgccccccgcagccggcggacgggatagccgtcccgcctcctgccgccgttgccccgtcggtggagcacctcgtggcggccgccgccgaggcggaggcgttgagtcgcttgggcgcggaacaacagcagctgctgcaggggcacgagcaggaggttggggaggaagaaggggaggacgaggaggaagacgagatggaggacgacgacgacgacgacgatgagcaggaagggcagcacggcggcatcggtgtggagcacgttcccatggacgcagatgctgctgctgccgccgccgtggcggccgctggcgcgcagatggacccgcactcggtgttggtgcctgggaccgtgccacccatggcgaccaaccagctcaccctctcgttccagggcgaggtctatgtattcgactctgtctcccctgataaggtccaagccgtgcttctgctgcttggaggcagggagctgagtagcctgagcggagcgtcgtcctctgcaccttataaggttgaactttccacatcgggtggcatcactgatgagatttagggaaaagcggaaggagcggaactttgataagaagatccggtacaatgtccggaaggaagttgcacttaggatgcagcgtaatagaggtcagtttacatcttcaaaaccaaagcctgatgaaatagcagcatcagaaatggcagctgcagatggctctctgaattgggcactagttgaaggccgacctccatctgctgctgaatgtcatcactgtggtattaatgcaacagctacaccaatgatgcgtcggggacctgatggaccaagaacactatgcaacgcttgtggcctcatgtgggcaaataagggtctcctgagggacctatccaaatctcctgtacctcttcactctatacaacaatcagctccaattctaaatggtggtaacggaagtgccatgtctgcgcttggctctgagctagagaatgctgcagcagccatgggcaatggccacgagccataaggtagtggtgtttagccatgtgctaaagccacgagcatcatcgcgcaatgatctctgcagtaggcggtcagttggagcctgcttagatatatggaatcctgcgcctgtaggttttaagagctgcgacagtgttttgtcccgtgtagtcatgtttgcagccgtcgcagctatagcaagtttgtttcttgtcttgagtcgtgactgttaagaactgatgaagttcattacttacgtgcgtgtagttatacttagatatgagatgttctagccatgcagcaacgttttctatcaatgtcagtaattagggagcgagcgtttgtctcatggattgggcctcgaaacaaagaatcgacgcccaggagctaaactacagaaacatttcagctagagtaggtctggaatgatggaagagaagacaacaatgcaaatgaaattgataaaataacttaatataatatgggacaactatggttcaaatgaaaaagtatggttgacttagatttatgagacatgagatcttacatatataatggtcttgtttagaaagcttgctatacaaac

SEQ ID NO: 58123 - DNA, 1095 bp, Zea Mays
gttgggatatgtgatgttgaatcttataggttgaactttccacatcgggtggcatcactgatgagatttagggaaaagcggaaggagcggaactttgataagaagatccggtacaatgtccggaaggaagttgcacttaggatgcagcgtaatagaggtcagtttacatcttcaaaaccaaagcctgatgaaatagcagcatcagaaatggcagctgcagatggctctctgaattgggcactagttgaaggccgacctccatctgctgctgaatgtcatcactgtggtattaatgcaacagctacaccaatgatgcgtcggggacctgatggaccaagaacactatgcaacgcttgtggcctcatgtgggcaaataagggtctcctgagggacctatccaaatctcctgtacctcttcactctatacaacaatcagctccaattctaaatggtggtaacggaagtgccatgtctgcgcttggctctgagctagagaatgctgcagcagccatgggcaatggccacgagccataaggtagtggtgtttagccatgtgctaaagccacgagcatcatcgcgcaatgatctctgcagtaggcggtcagttggagcctgcttagatatatggaatcctgcgcctgtaggttttaagagctgcgacagtgttttgtcccgtgtagtcatgtttgcagccgtcgcagctatagcaagtttgtttcttgtcttgagtcgtgactgttaagaactgatgaagttcattacttacgtgcgtgtagttatacttagatatgagatgttctagccatgcagcaacgttttctatcaatgtcagtaattagggagcgagcgtttgtctcatggattgggcctcgaaacaaagaatcgacgcccaggagctaaactacagaaacatttcagctagagtaggtctggaatgatggaagagaagacaacaatgcaaatgaaattgataaaataacttaatataatatgggacaactatggttcaaatgaaaaagtatggttgacttagatttatgagacatgagatcttacatatataatggtcttgtttagaaagcttgctatacaaac

SEQ ID NO: 58124 - DNA, 793 bp, Zea Mays
cttagactatgtaatggagtaatggatcaagaggcgtgtgtgaataagaaaaccgcgtgccagaaccatgacccagggtctcctgagggacctatccaaatctcctgtacctcttcactctatacaacaatcagctccaattctaaatggtggtaacggaagtgccatgtctgcgcttggctctgagctagagaatgctgcagcagccatgggcaatggccacgagccataaggtagtggtgtttagccatgtgctaaagccacgagcatcatcgcgcaatgatctctgcagtaggcggtcagttggagcctgcttagatatatggaatcctgcgcctgtaggttttaagagctgcgacagtgttttgtcccgtgtagtcatgtttgcagccgtcgcagctatagcaagtttgtttcttgtcttgagtcgtgactgttaagaactgatgaagttcattacttacgtgcgtgtagttatacttagatatgagatgttctagccatgcagcaacgttttctatcaatgtcagtaattagggagcgagcgtttgtctcatggattgggcctcgaaacaaagaatcgacgcccaggagctaaactacagaaacatttcagctagagtaggtctggaatgatggaagagaagacaacaatgcaaatgaaattgataaaataacttaatataatatgggacaactatggttcaaatgaaaaagtatggttgacttagatttatgagacatgagatcttacatatataatggtcttgtttagaaagcttgctatacaaac

SEQ ID NO: 58125 - DNA, 2439 bp, Zea Mays
cacccgccggcttccgttcccaactgctcgagtggactcggctccaaaccctacccccaccgcgcgaatggccgacgtgcttgagcccgcctccgacgcgccgcgcgtgcgccgcccgccgccgccacccccggacagtccggaggaccgctcgccgcggcttcccccgcctccgcccggcgggcctccggcgccgagccggaagcggagccgctccccgccgccaccgcctccgctcggctcgtcgcggcctcagaggtaccgggaccaccgtggcggcggcgggcgaggcgggagcagccccagcccgccgccgtaccggggcagccgccgtcactccccgccccgttacgggtacgatgataggaggcgaggttatgaccatgatcgaggtggcggcagaggtgggtacgatgatgacagaaaccatggtagatatctgaaccgtggtccagattggcctgattcggggtatggggcggccaatgatggtccaggggtcacccaaagggaaggtttgatgacatacaaacagttcatgctagttcttgaggatgatatttcaccaagtgaagctgaacgcaggtaccaagaatatagaactgagtatatcacaactcagaaacgtgcttattttgatctccacaaaaacgaagattggctgaaagacaagtaccacccaactaacctattatctgttatcgaaaggaggaatgaacgttgcaaggttatagcaaaggatttctttcttgatttgcagaatggaactctggacctaggccctggaataactgggggtgcagcaagtaaaccaggtggtagtgatggaaattctgatgatgatacggacaatgacaagagaagaaagcatggcaaagattcctcaaagggaactgattctatttctggtgccctcaaggctcatccagttagttctgaatcacgccgagtccaagctgacatagagcaaactctagctcttgtgcgtaagcttgattctgagaagggcattgaggaaaatgtactgtcaagtggtgatcatgacaagtcagatgtagacaaatcacacataggatctatggggcctataattataatcagaggtttaacgactgtcaaaggcctagagggtgttgagctcctagacactattcttacctatttatggcgtattcatggtgttgattactatggcacgtcagagtcgcatgaggccaagggccttcgtcacgtgagagtagacagtaagacttctagcacatctgatgtcagtgctgctgattgggagaagaagctggatactttctggcaggaaagactgaatggtcaagacccactggtcatacttactgctaaggacaaaattgatgcagcagctgctgaagttttagaacctctcgtcaggaaaatcagggatgaaaaatatggatggaaatatggctgtggagccaagggctgtacaaaactttttcatgctcctgagtttgtccacaagcatttgaggctcaaacatccagaccttgtattggagtctacgtcaaaagttcgagaggatctttatttccaaaactacatgaaggaccctaatgcaccaggtggaaccccagtgatgcaactgtctgcaccagacagaggaagacggagacctagcatggacagtcgtctgaaatttgaccgtggcagtaacaaagaacatgataaagctgagagagatggaggcagatatggtagagacgatcactctccaagccgtgatgggcctgatgatcagatgtttgatggtttccgtggacggccctctaatgctccttttgttgctgaattcccccctccaccgatattgatgccagtacctggtgctggtcccctaggaccatttgttcctgcacctccagagatagcgatgcatatgctgagagagcaagggccacctcctccgtttgaaccaaatggcgcaccacatggcagcacaggaatgctcgggccaatgctgggtggttcagcaccgattatagctatgcctccgaatttccgccatgaccctcgccgtctgagaagttataacgacctcgatgcccctgatgaggaagttactgtccttgactacagaagcttgtagggtccagcatccattggagatttgggctgtttcctctttatatgaaggggaaaaaaggaaggttatggacaagtaaatgaatttttttggtcgcctgtgtatcctgttagattctgttgtaacttgaatagccggaatttctatttgctctcgcgttcgtcgaaccatactccctgaatgcgctgccgttgctacagttgttggccaactttctttgacacaacgctgtagtactccctgtcccaaaaaaataggacagatattttttttgagatgtcttttgaagcgaaactttgacgataatttatttttaaaatatg

SEQ ID NO: 58126 - DNA, 2597 bp, Zea Mays
cacccgccggcttccgttcccaactgctcgagtggactcggctccaaaccctacccccaccgcgcgaatggccgacgtgcttgagcccgcctccgacgcgccgcgcgtgcgccgcccgccgccgccacccccggacagtccggaggaccgctcgccgcggcttcccccgcctccgcccggcgggcctccggcgccgagccggaagcggagccgctccccgccgccaccgcctccgctcggctcgtcgcggcctcagaggtaccgggaccaccgtggcggcggcgggcgaggcgggagcagccccagcccgccgccgtaccggggcagccgccgtcactcgccgcccaggaggtccccgtcgccgccgttcaagcggtcgcggagggacgacgggtacgaccgccgcgggggccgagggagcccgccccgttacgggtacgatgataggaggcgaggttatgaccatgatcgaggtggcggcagaggtgggtacgatgatgacagaaaccatggtagatatctgaaccgtggtccagattggcctgattcggggtatggggcggccaatgatggtccaggggtcacccaaagtcaaatggagaatctgatgagaacattctctatccgttaacaagcaaacagcagaggcttcgtttttccttcacaatggaaggtttgatgacatacaaacagttcatgctagttcttgaggatgatatttcaccaagtgaagctgaacgcaggtaccaagaatatagaactgagtatatcacaactcagaaacgtgcttattttgatctccacaaaaacgaagattggctgaaagacaagtaccacccaactaacctattatctgttatcgaaaggaggaatgaacgttgcaaggttatagcaaaggatttctttcttgatttgcagaatggaactctggacctaggccctggaataactgggggtgcagcaagtaaaccaggtggtagtgatggaaattctgatgatgatacggacaatgacaagagaagaaagcatggcaaagattcctcaaagggaactgattctatttctggtgccctcaaggctcatccagttagttctgaatcacgccgagtccaagctgacatagagcaaactctagctcttgtgcgtaagcttgattctgagaagggcattgaggaaaatgtactgtcaagtggtgatcatgacaagtcagatgtagacaaatcacacataggatctatggggcctataattataatcagaggtttaacgactgtcaaaggcctagagggtgttgagctcctagacactattcttacctatttatggcgtattcatggtgttgattactatggcacgtcagagtcgcatgaggccaagggccttcgtcacgtgagagtagacagtaagacttctagcacatctgatgtcagtgctgctgattgggagaagaagctggatactttctggcaggaaagactgaatggtcaagacccactggtcatacttactgctaaggacaaaattgatgcagcagctgctgaagttttagaacctctcgtcaggaaaatcagggatgaaaaatatggatggaaatatggctgtggagccaagggctgtacaaaactttttcatgctcctgagtttgtccacaagcatttgaggctcaaacatccagaccttgtattggagtctacgtcaaaagttcgagaggatctttatttccaaaactacatgaaggaccctaatgcaccaggtggaaccccagtgatgcaactgtctgcaccagacagaggaagacggagacctagcatggacagtcgtctgaaatttgaccgtggcagtaacaaagaacatgataaagctgagagagatggaggcagatatggtagagacgatcactctccaagccgtgatgggcctgatgatcagatgtttgatggtttccgtggacggccctctaatgctccttttgttgctgaattcccccctccaccgatattgatgccagtacctggtgctggtcccctaggaccatttgttcctgcacctccagagatagcgatgcatatgctgagagagcaagggccacctcctccgtttgaaccaaatggcgcaccacatggcagcacaggaatgctcgggccaatgctgggtggttcagcaccgattatagctatgcctccgaatttccgccatgaccctcgccgtctgagaagttataacgacctcgatgcccctgatgaggaagttactgtccttgactacagaagcttgtagggtccagcatccattggagatttgggctgtttcctctttatatgaaggggaaaaaaggaaggttatggacaagtaaatgaatttttttggtcgcctgtgtatcctgttagattctgttgtaacttgaatagccggaatttctatttgctctcgcgttcgtcgaaccatactccctgaatgcgctgccgttgctacagttgttggccaactttctttgacacaacgctgtagtactccctgtcccaaaaaaataggacagatattttttttgagatgtcttttgaagcgaaactttgacgataatttatttttaaaatatg

SEQ ID NO: 58127 - DNA, 2639 bp, Zea Mays
cacccgccggcttccgttcccaactgctcgagtggactcggctccaaaccctacccccaccgcgcgaatggccgacgtgcttgagcccgcctccgacgcgccgcgcgtgcgccgcccgccgccgccacccccggacagtccggaggaccgctcgccgcggcttcccccgcctccgcccggcgggcctccggcgccgagccggaagcggagccgctccccgccgccaccgcctccgctcggctcgtcgcggcctcagaggtaccgggaccaccgtggcggcggcgggcgaggcgggagcagccccagcccgccgccgtaccggggcagccgccgtcactcgccgcccaggaggtccccgtcgccgccgttcaagcggtcgcggagggacgacgggtacgaccgccgcgggggccgagggagcccgccccgttacgggtacgatgataggaggcgaggttatgaccatgatcgaggtggcggcagaggtgggtacgatgatgacagaaaccatggtagatatctgaaccgtggtccagattggcctgattcggggtatggggcggccaatgatggtccaggggtcacccaaaggtatatacatgaaagtagaggctgtatatgttttggatgcagtcaaatggagaatctgatgagaacattctctatccgttaacaagcaaacagcagaggcttcgtttttccttcacaatggaaggtttgatgacatacaaacagttcatgctagttcttgaggatgatatttcaccaagtgaagctgaacgcaggtaccaagaatatagaactgagtatatcacaactcagaaacgtgcttattttgatctccacaaaaacgaagattggctgaaagacaagtaccacccaactaacctattatctgttatcgaaaggaggaatgaacgttgcaaggttatagcaaaggatttctttcttgatttgcagaatggaactctggacctaggccctggaataactgggggtgcagcaagtaaaccaggtggtagtgatggaaattctgatgatgatacggacaatgacaagagaagaaagcatggcaaagattcctcaaagggaactgattctatttctggtgccctcaaggctcatccagttagttctgaatcacgccgagtccaagctgacatagagcaaactctagctcttgtgcgtaagcttgattctgagaagggcattgaggaaaatgtactgtcaagtggtgatcatgacaagtcagatgtagacaaatcacacataggatctatggggcctataattataatcagaggtttaacgactgtcaaaggcctagagggtgttgagctcctagacactattcttacctatttatggcgtattcatggtgttgattactatggcacgtcagagtcgcatgaggccaagggccttcgtcacgtgagagtagacagtaagacttctagcacatctgatgtcagtgctgctgattgggagaagaagctggatactttctggcaggaaagactgaatggtcaagacccactggtcatacttactgctaaggacaaaattgatgcagcagctgctgaagttttagaacctctcgtcaggaaaatcagggatgaaaaatatggatggaaatatggctgtggagccaagggctgtacaaaactttttcatgctcctgagtttgtccacaagcatttgaggctcaaacatccagaccttgtattggagtctacgtcaaaagttcgagaggatctttatttccaaaactacatgaaggaccctaatgcaccaggtggaaccccagtgatgcaactgtctgcaccagacagaggaagacggagacctagcatggacagtcgtctgaaatttgaccgtggcagtaacaaagaacatgataaagctgagagagatggaggcagatatggtagagacgatcactctccaagccgtgatgggcctgatgatcagatgtttgatggtttccgtggacggccctctaatgctccttttgttgctgaattcccccctccaccgatattgatgccagtacctggtgctggtcccctaggaccatttgttcctgcacctccagagatagcgatgcatatgctgagagagcaagggccacctcctccgtttgaaccaaatggcgcaccacatggcagcacaggaatgctcgggccaatgctgggtggttcagcaccgattatagctatgcctccgaatttccgccatgaccctcgccgtctgagaagttataacgacctcgatgcccctgatgaggaagttactgtccttgactacagaagcttgtagggtccagcatccattggagatttgggctgtttcctctttatatgaaggggaaaaaaggaaggttatggacaagtaaatgaatttttttggtcgcctgtgtatcctgttagattctgttgtaacttgaatagccggaatttctatttgctctcgcgttcgtcgaaccatactccctgaatgcgctgccgttgctacagttgttggccaactttctttgacacaacgctgtagtactccctgtcccaaaaaaataggacagatattttttttgagatgtcttttgaagcgaaactttgacgataatttatttttaaaatatg

SEQ ID NO: 58128 - DNA, 2023 bp, Zea Mays
ggagaatctgatgagaacattctctatccgttaacaagcaaacagcagaggcttcgtttttccttcacaatggaaggtttgatgacatacaaacagttcatgctagttcttgaggatgatatttcaccaagtgaagctgaacgcaggtaccaagaatatagaactgagtatatcacaactcagaaacgtgcttattttgatctccacaaaaacgaagattggctgaaagacaagtaccacccaactaacctattatctgttatcgaaaggaggaatgaacgttgcaaggttatagcaaaggatttctttcttgatttgcagaatggaactctggacctaggccctggaataactgggggtgcagcaagtaaaccaggtggtagtgatggaaattctgatgatgatacggacaatgacaagagaagaaagcatggcaaagattcctcaaagggaactgattctatttctggtgccctcaaggctcatccagttagttctgaatcacgccgagtccaagctgacatagagcaaactctagctcttgtgcgtaagcttgattctgagaagggcattgaggaaaatgtactgtcaagtggtgatcatgacaagtcagatgtagacaaatcacacataggatctatggggcctataattataatcagaggtttaacgactgtcaaaggcctagagggtgttgagctcctagacactattcttacctatttatggcgtattcatggtgttgattactatggcacgtcagagtcgcatgaggccaagggccttcgtcacgtgagagtagacagtaagacttctagcacatctgatgtcagtgctgctgattgggagaagaagctggatactttctggcaggaaagactgaatggtcaagacccactggtcatacttactgctaaggacaaaattgatgcagcagctgctgaagttttagaacctctcgtcaggaaaatcagggatgaaaaatatggatggaaatatggctgtggagccaagggctgtacaaaactttttcatgctcctgagtttgtccacaagcatttgaggctcaaacatccagaccttgtattggagtctacgtcaaaagttcgagaggatctttatttccaaaactacatgaaggaccctaatgcaccaggtggaaccccagtgatgcaactgtctgcaccagacagaggaagacggagacctagcatggacagtcgtctgaaatttgaccgtggcagtaacaaagaacatgataaagctgagagagatggaggcagatatggtagagacgatcactctccaagccgtgatgggcctgatgatcagatgtttgatggtttccgtggacggccctctaatgctccttttgttgctgaattcccccctccaccgatattgatgccagtacctggtgctggtcccctaggaccatttgttcctgcacctccagagatagcgatgcatatgctgagagagcaagggccacctcctccgtttgaaccaaatggcgcaccacatggcagcacaggaatgctcgggccaatgctgggtggttcagcaccgattatagctatgcctccgaatttccgccatgaccctcgccgtctgagaagctcttacgtggcttttgttgcagttataacgacctcgatgcccctgatgaggaagttactgtccttgactacagaagcttgtagggtccagcatccattggagatttgggctgtttcctctttatatgaaggggaaaaaaggaaggttatggacaagtaaatgaatttttttggtcgcctgtgtatcctgttagattctgttgtaacttgaatagccggaatttctatttgctctcgcgttcgtcgaaccatactccctgaatgcgctgccgttgctacagttgttggccaactttctttgacacaacgctgtagtactccctgtcccaaaaaaataggacagatattttttttgagatgtcttttgaagcgaaactttgacgataatttatttttaaaatatg

SEQ ID NO: 58129 - DNA, 1133 bp, Zea Mays
ttccccactgttttataggcagctggtgctcctccgaaagcgaagtccagcgccccccgctcccccgttcgcgcaaagacgccaaacccacccaccgaaatctctccccgaacttacccctcgccggcgccggcgatgtgcccgacgaagcccggtcgccctgcccaggcggccgccggctccggcgagaagagctggcgggagcaggccgtggccgccagctcgctgcggccggtcgacctggaccggggcaccaacggctgggcctcgccgccgggggacctcttccacctgcgcgcgcgcggctacttctcctgcggcggcgggaagcgcggcaaggcgccgtccgccgcggagtggctgctccgccccgccggcgtcgactggctccgctctcacgcgcgcctcgaccacgtgctcgcccgccatgacaaccgcgtcgccgccgcattccgccgcgcgcgcctcaggaacgaccccaccgcgcacttcctcctcgccgtcaatctccaggtgccgggccggccggacgcgtacagcgcggtgttctacttcgcggcggaggcacccatcgcgccggactcgctgctcgggcgcttcgtccagggcgacgacgcgtaccgcaacgcgcgcttcaagatcgccaaccgcatcgtcaacggcccctggctcttgcgcgccaccgtcggcaactacgcggcctgcctgctcgggcgcgcgctcacgtgccgctaccacaggggcgtcgactacctggagatcgacgtggacatcggcagctcggcgatcgccagcgccatcctgcacctcgcgctcggcgccgtcacgtcggtcaccatcgacatggggttcctcgtcgagtcccagtccgaggaggagctgcccgagaggctgttcggcgccgtgcgcatcgcgcggatggagatgggcgcggccaggtacgtggagctgcctcctaatgaggccatgcctgagacggtctgcagcggcagggccggggccggtttcagggtaagctccgggaaggtggtcaaccatagccgccaacaagaccgtgccggcggtaaggtgggcaggtcgatgagttgcccggagcgagagcgcggagggtggactgaattgttaagtggagg

SEQ ID NO: 58130 - DNA, 1593 bp, Zea Mays
ttccccactgttttataggcagctggtgctcctccgaaagcgaagtccagcgccccccgctcccccgttcgcgcaaagacgccaaacccacccaccgaaatctctccccgaacttacccctcgccggcgccggcgatgtgcccgacgaagcccggtcgccctgcccaggcggccgccggctccggcgagaagagctggcgggagcaggccgtggccgccagctcgctgcggccggtcgacctggaccggggcaccaacggctgggcctcgccgccgggggacctcttccacctgcgcgcgcgcggctacttctcctgcggcggcgggaagcgcggcaaggcgccgtccgccgcggagtggctgctccgccccgccggcgtcgactggctccgctctcacgcgcgcctcgaccacgtgctcgcccgccatgacaaccgcgtcgccgccgcattccgccgcgcgcgcctcaggaacgaccccaccgcgcacttcctcctcgccgtcaatctccaggtgccgggccggccggacgcgtacagcgcggtgttctacttcgcggcggaggcacccatcgcgccggactcgctgctcgggcgcttcgtccagggcgacgacgcgtaccgcaacgcgcgcttcaagatcgccaaccgcatcgtcaacggcccctggctcttgcgcgccaccgtcggcaactacgcggcctgcctgctcgggcgcgcgctcacgtgccgctaccacaggggcgtcgactacctggagatcgacgtggacatcggcagctcggcgatcgccagcgccatcctgcacctcgcgctcggcgccgtcacgtcggtcaccatcgacatggggttcctcgtcgagtcccagtccgaggaggagctgcccgagaggctgttcggcgccgtgcgcatcgcgcggatggagatgggcgcggccaggtacgtggagctgcctcctaatgaggccatgcctgagacggtctgcagcggcagggccggggccggtttcagggtaagctccgggaaggtggtcaaccatagccgccaacaagaccgtgccggcggtaaggtgggcaggtcgatgagttgcccggagcgagagcgcggagggaaataggcctccttttttccagagaaataggtgcaaagtacgcgggtgcagtgcagaaagaaaccatccaccggtgggagcgagagcggtggcgagaaaaggccgggtaacccgacacataaggcgctcaagctggtgccattaccacgaatggcacacctcgttcacgaagtactcgtcgaccccggcttggcttgagcagctcagctgcagccatccacatacatgagggcatgtatagctctaagacggtggttcggttttctaaatataaaagacagttaagaaactgatataactacgagactttacactataaatataattaagaaataatattaattctaagactctagaccataaatatagttagaaaccaatatatatggagatggaatatgtatggagatgggctgctcaggaagggctcgtgctcgtgtcttgtatttttttttcagttatcccagagcccgtcatttaaag

SEQ ID NO: 58131 - DNA, 836 bp, Zea Mays
tctggaatctcacttcttttttattaacggaatctcactattgtcaatctcctgaaacatacaaactggctaaccagtatatttcaaaaaggaaaaataaaaaatgaaatgaaactatatccttactgtcggctacaccaatggaactaactaaagctacaaatataaacattgctcactattgcgggaagcatcaatatcctcacttgttgggtctttttctcccaatgaataaaaaataagcaatggttgaagaggtcaggctattctaccagactgggcaaaggcaaggcatactttgcgagagacgcttgaggtaacaccagcatcatatatgccagcgggtaccagcaatcacatgcagcgtcttactttttttttggggggtgtgcaatgtacctagagaagcttatgctacatcaccaactgaaccgccgccatggcggcctaccatataccgggaatcagtagagcaccaggcagttctggtgtgtgcgacacaggcgccaaccttctgtttcatatatagataggtttcacatcgttaacaccgaagcttagtccacaagacgggcacctcttctgacggctaccaagcgacttctgtatgcactggttgcagaagagatggtagcatttggcaatcacaacctacaaacagaaggttatggttcatggtacctttttccctcggattcgcttccgttacaagtaaaccgcctcagtacatgacttgcacttctgcacgtctattgaagtgtctatggtttcttttgtactcaaaccgtagataatggcgatgcataaactcgtctcgacgtggaactattcatggg

SEQ ID NO: 58132 - DNA, 1444 bp, Zea Mays
gaaaacggccccctcgtggtcgtcagataaaaacgtccgagatcgatggctttaattggggattcacctctcagtaaccccgtgtcttcttcaaacccacacatgaaactgatctctctgccgtttccgaccgcttcgatcgcaggtagggagcaagcgaggcagtcgtagtcccccgcgcgccgccaccaccaccgtctactactagtctactagtatactcgtgccttgacgaccccgccaggcgtcttctcttctcttctctcctatccgtcgtccatagctagcgatcgaccgacccatcttcctcttcatcgcgcgcccggtggtgttgggctaggctagctactggtagctaggtgcggcgtgcagtagtgtctcagctcttgtgctccatgtataccactactcgtgccatggagaaagaagaggggttcgggaagtcatggcttggcctggggatcggcggcggtggccgcgatctgaatctgatgaagcggagccgaccactacgaccggtgcggctggacctgctgttcccgccgagtgtggagggaggagaagctgccgcgaggagcaggaaggctggtgcaggtgcactgcggaatatgtcgttgaagcaggtcgcaggcgacgacgatggtgggcagtcgtcgcacggtggtccgagccccagcgacgacgacgacggcgcaggcgcgcggaagaagctccggctcaccacggagcagtccaagctgctcgaggacaccttccgcgcccacaacatactctcccacaagcatgaggtggcgcggcaggtggatctaagcgccaggcaggtggaagtgtggttccagaacaggagggcaagaacaaagctgaagcaaacggaggtggactgcgagaccctgaggcgctggcgcgagagcctggcagacgagaacctgcggctgaggctggagctggagcagctgcagcggtgggcgaccgccgccgctggtcagtcctccgcgtccccgtcgccggccacggccacggcgagcgtctgtccgtcgtgcgacaaggtcgtcgtcgtcaccgtgacgagctgtggggagacaagcggcaagagctccaccagcagctactcctccagtcctcctcttgacatgctcgatcgatcggttcaatgagcagtttgtggattcacttatgcagctagctagttatatatatgtaggctaatagcgtgcatgcatgccggccggcggccgccaataacttcgtcggcatgacgacgacgacgaccctattatgatactatcatactgcaataaccattccttcaaatcgagatcatcgctagttcattccagctgaaacagatctggatattaatcgtggcgtagacagtgggtggtccgaatagaccatgctaatgccataccctaaaccgggccatggaactactggccagtcctgt

SEQ ID NO: 58133 - DNA, 1108 bp, Zea Mays
gtttgggccttgcaacggacatcttctgactagtccgcgtggattcctcttctttcttcggctggcctctctcacgcgcgacgattgggcagcaagcggcgacacccttcgccaggtcggcaccggtgacgagcacccgccaggagaaatggccgaacacctcttcaaagataaattcaaggtgagcagggtcgatcctgatggcaagaaattcgacaaaggttactcgaatcgaagctcacagcgagaatgaaatgtaatgtgcatgcaactagctagatgttgctactgaggtctattcaatgcgtgttggtgacacgttcaacatggttctagctctcactctgaacctggatggatcaacagacactggctactacacacaggtgacacacctaattagtctcatattccctctgttttttacatgctgcaatggttttgtcccaagtcaaatatttatatctttgatcatcatttttttcaaaaaaaatgtatatgcggtatatgtttttagattcactattatgagaagtatttcaatagtatatatagttcacatgttgtgaaactacatggatttttttattgaaattgctgatcaaagataggaatgtttgacttaggacaaaacctaatacgacatgtaaaaaagcagagggagtagcttgatctcgacaatatggaacttttgtgatgggaatacagatccgatcgaatgtgtttgaggtgccatactatttttcaatgttgtcttggacttgtcttccacgaggcatagttttactgggtaaacaacatgatgccattcctttcatgcagccttggaagaaaaactcttgctgacgattatgaatacatcatgcatgaattctgatgcattggggggggggggggggcatggttaatatgtcatacatggttatatagatgcccggcgaagaaactcggtgcagtttatttcacgaaacagttgaaacgcgtggcatcgctatatatctgctgttttagttgcatgatttgttcaactttattcatcttaatatataggcactccagtgcagctagctttcagctggaccagaggctgtttcttctcgtaaagaag

SEQ ID NO: 58134 - DNA, 768 bp, Zea Mays
atgttcagattggcttatgttgcaccagagtcacgagtggtgggagctggagacttggttgatgagccaaaaaaagttgctatccattatcttcgtggttactttttacttgatttctttgttgtgcttccactccctcaggtgatgatactgctagtagttcctaaagttgggttatctgctgcaaactatgctaagaatttattgcgtgtcactgttcttcttcaatatgtcccccgtatcatcagattcgtaccacttcttgatgagggttaaccaatgtctacgagatgcttgttctatatcgaccattccatattgtgattcttttatagactgtggacgtggcattgggagtggactgtacagacagcagtggttcaatgactcgggtgcagaagcttgttttaacactggaaatgatgctactttccaatatggaatttatgagcaggctgttttgctcactacagaagacagtgctgtaaaacgatatatatattcattattttgggggtttcagcaaataagtaccttagcaggaaaccttgtcccgagttactttatatgggaagttctgttcacgatggctattattggtctgggactgttgctttttgcattgcttattggaaacatgcaaaattttctgcaagctcttggaagaagatgttggtagaagtgttgtattgaagatcgtcaattttttctaattttgattggaagtatatgcttgtacagtcatgtactgcgacgtgttgtgtcctg

SEQ ID NO: 58135 - DNA, 1048 bp, Zea Mays
cgccactgcttttgcaacagcgccggctcgctgtgcttctgtccttcgccatagcgcccatgccgctgcttttcattttactacatatatggagcaccttcactcgtctcttcctctttccctccgcctggtactcggcgcaagtgcctttctcctcctcgactccgtcgccgtgatctgctacgtagcagaagggcaggcacgcgcagatcctctggctgtcctgtcggcctcttctgcagctgttccagacagtggaagcaactattagacaagccaagtttaacagtacagtacacgtgaatacttcgccctcaagtcctgaacccacacagccaacaaatacgtgtagtactcatcagatatatggcacaggagatgacgatgttgctggttccgcagacgttgatgctgagtaacgttgcagtgcttttggacacgagcaccaccagctatggaggcccgcttttggaaactgaggatcgcttttgggaactatcccagttcatctaggttgctgttagaacttcccccctactgtgtagggcgtatggttttatgcttgtaagatatggacagcgctatgctgtgtgcttgactgcaagatatgccttttgttgcttggtcatagctatgctatgcatgcaatcctgcgaggaccatactcgcgatgtgtaaagcatgcctatatagtctaggcctgaccaaataagaaacgttgcttcctttggtgcttctactatttctctttgtcgttctgtgctactaccagccatgtatttgtcgttaatatgtaaagcatgcctatatagtctatgtgttgttctgtgctactgccatccatctattatgtgctactaccagccatctctttatcttatagtacaggaaataaacgtcggagcagctcctatgtcccgttgaagaacgaagacaatccaattctggatgatgagtgagaaagatactaagttcgttattccgtgagtacgttgatgctccctgcttacggcagtaaggattatgcaaaagtatggctcctttttcc

SEQ ID NO: 58136 - DNA, 820 bp, Zea Mays
cggctcgctgtgcttctgtccttcgccatagcgcccatgccgctgcttttcattttactacatatatggagcaccttcactcgtctcttcctctttccctccgcctggtactcggcgcaagtgcctttctcctcctcgactccgtcgccgtgatctgctacgtagcagaagggcaggcacgcgcagatcctctggctgtcctgtcggcctcttctgcagctgttccagttcagcagcgtgcttcccctagagggaaactccggacgactacaacgatcgccctaggcacaatcatttccgactatttcttccttcgacttgaactggtacctgttcgacatcctacttctcaaggaaatctgccaatttgaacacaagtcttttccaatctgagaaggccgctactttgtcaaggttctgggagtgagaagatgaggatcaactgctgcagcatctggcgcaacaaggcactgaggaggatgtgtttcagtgaaaggggtgctgtgagcagcacccagtgtgtgctcacatcagatgctggcccagacactcttgtcgtccgaacatcctttcggaggaattatgctgatcctaacgaagtcactgctgtcattttgggtggtgctggggaagacgaccggggaaggaaaagccagcaagagggacacaaagagcaccaccagcacaagttgaccctcccaactatttcgaattataccattcacgatgccactgacggcaccgacaatggcaaacaggaaggatagcccatgtatgtattataactgtgctgtaggatagtcaatgtataaccgagtca

SEQ ID NO: 58137 - DNA, 1437 bp, Zea Mays
tttcattttactacatatatggagcaccttcactcgtctcttcctctttccctccgcctggtactcggcgcaagtgcctttctcctcctcgactccgtcgccgtgatctgctacgtagcagaagggcaggcacgcgcagatcctctggctgtcctgtcggcctcttctgcagctgttccagtgcttttggacacgagcaccaccagctatggaggcccgcttttggaaactgaggatcgcttttgggaactatcccagttcatctaggttgctgttagaacttcccccctactgtgtagggcgtatggttttatgcttgtaagatatggacagcgctatgctgtgtgcttgactgcaagatatgccttttgttgcttggtcatagctatgctatgcatgcaatcctgcgaggaccatactcgcgatgtgtaaagcatgcctatatagtctaggcctgaccaaataagaaacgttgcttcctttggtgcttctactatttctctttgtcgttctgtgctactaccagccatgtatttgtcgttaatatgtaaagcatgcctatatagtctatgtgttgttctgtgctactgccatccatctattatgtgctactaccagccatctctttatcttatagtacaggaaataaacgtcggagcagctcctatgtcccgttgaagaacgaagacaatccaattctggatgatgagtgagaaagatactaaggtgtgcttcacctatgcagttcagcagcgtgcttcccctagagggaaactccggacgactacaacgatcgccctaggcacaatcatttccgactatttcttccttcgacttgaactggtacctgttcgacatcctacttctcaaggcttcataaacttctatcagtctgctgaggatttcagtgcttcattaaggttctgggagtgagaagatgaggatcaactgctgcagcatctggcgcaacaaggcactgaggaggatgtgtttcagtgaaaggggtgctgtgagcagcacccagtgtgtgctcacatcagatgctggcccagacactcttgtcgtccgaacatcctttcggaggaattatgctgatcctaacgaagtcactgctgtcattttgggtggtggtaccgagactcagcttctccctctcacatcggcacatcgctagggttcaggctcttttagtgaaactggtgtgctttacctctgaatctttgctggtggcatctttgtagctggggaagacgaccggggaaggaaaagccagcaagagggacacaaagagcaccaccagcacaagttgaccctcccaactatttcgaattataccattcacgatgccactgacggcaccgacaatggcaaacaggaaggatagcccatgtatgtattataactgtgctgtaggatagtcaatgtataaccgagtca

SEQ ID NO: 58138 - DNA, 2450 bp, Zea Mays
aatcatttttctgtgtggtagtttaggttagctttcacttgcttcaattgaccctttcaagagctgaaaatttcttgttaggtgagcaaaagcatcctttgtcaactaaactcgcctaatatgctgaatcctacttaggaaacagtcacatagccatgcttttagatttgtgattttgctgttttatgctgtcattgcttaatgccttaaaaggatatggaaacaatacaaataatagtcatactaataatttcattaccaacgttaggcatgttgttaacttcggtagtattcattatcattggtggtaggtgagtaggtctatgtgacatctgaccaccattttggaatttggctcatatgggcccatttgtatgtgttgatgtcagattgtgggggtttagtcccaccttggttgttgagtgtgggttagaccaacatataaggactgtacattgtgagaagggtgggtgctctcgccctgttccatttgagaagaggaagtgaaagaaagagctagctagatgagcaaaccaacaggttgcttccccttactttgcttgtccttgtccagcgtgagatgggtgaggcgagctgagacggtgacagatccaaaatgcccaagggttgcaatactgaagtgtctgctatgctgctttggtcacattgcacttaaattctgttcacttttctgaaatcgcattagtagtgacaagcaccatgttctcattcagagtaaaggcaatatatgacgtgtcaaacgacccagtcgtttactttcgtctagctcgaatggtatgtgcaaatacttatattttatgttaaacagctttccagtctgcttaccactataggcaggtgcacttgatggtttatggcatgatatatcataatgtatggactaatttggaatattcaacatattttaaatcaatgtgtcctttgtattacctcttttacagtgggttgtaatgtttatgagaaatggagattgggacttttaactgtcatatttactgacatccaggattctatggttgttaatttagtttccacattgaaattctgtgtattgttaattttttcttttatgtttgcatgtgcttctttctattttgatcactgtgggctgttctactgatgcattgtgtgcttgacctgttcctatcagcatggaactgcatccttcgatgcattgattgtctatggtacaaattgatatttcataattcatataaacaaatacataatgcatctatatctatatgtatctctacaaatcaatgcagagtggactacatttgcttttatgtgacccgcagaagatttctgcactaatcaatcatttagcattagtcatatttctatctttagctaggacatgccacttgtgccttttccttctcttcatttttaaatgtcatctccattctgatgtggtgttccttcaggaaaggggaagatctcagttctatatccaaacaagactaccacccccaagtcagttaaagaccttgaatttgatggtttctccttgactactgaccttcgtgagaatttgcaggacggacctttcaattttgttttgcttgatggcacctggagcaattctgctgcactgtacagaaggttgaaggagagatggactgcagtatggggagatgaagctctaccttgtattgcactatctacacttagtgcctcagtgatgcataaactacgaccgcagcctgcctgggatcgtacctgcactgcagcagctgcagctggcctcctctgggagttgagctcgcggcctgagctcatctcatttgggttggaaaagcaagccgaggcggtggagtgctcgttagacaacttgctggatgctctcactgccaggcggcttcgtctgggccgatcgataactcggaaacagagacatagtaggaactgcatatagggaaagaagaaactcacagtaacagaggagcatggtgtgccatcaagtggaaggctgatttcattcttttttgtagaactcaggagctgatcattgtcaacaagttttctcccctttctatataggttactagatcttcagttcagtgctgtagattacttttaatggtcattgacatgagctgttaccgctgctactgtcgaagaggagggttaccaaatattagggtgctaaaacttgggttgtattctgacagattttgccataccatgaaatcaagttgttttctcatgccaataggttacagctgacaaacaatccctcccatcctctcttttccagtcgcgtattgtatggtatcgtgcccagtaagggcttattcggttttaccccaatccatatggattgagggggattgagggggtttcaatccctagtaagtcaaaatccctcccaatccgtatcaatcccctccaatccatatggattgaaaataaccgaacatgcc

SEQ ID NO: 58139 - DNA, 1672 bp, Zea Mays
gtggtagtttaggttagctttcacttgcttcaattgaccctttcaagagctgaaaatttcttgttaggtgagcaaaagcatcctttgtcaactaaactcgcctaatatgctgaatcctacttaggaaacagtcacatagccatgcttttagatttgtgattttgctgttttatgctgtcattgcttaatgccttaaaaggatatggaaacaatacaaataatagtcatactaataatttcattaccaacgttaggcatgttgttaacttcggtagtattcattatcattggtggtaggtgagtaggtctatgtgacatctgaccaccattttggaatttggctcatatgggcccatttgtatgtgttgatgtcagattgtgggggtttagtcccaccttggttgttgagtgtgggttagaccaacatataaggactgtacattgtgagaagggtgggtgctctcgccctgttccatttgagaagaggaagtgaaagaaagagctagctagatgagcaaaccaacaggttgcttccccttactttgcttgtccttgtccagcgtgagatgggtgaggcgagctgagacggtgacagatccaaaatgcccaaggagtaaaggcaatatatgacgtgtcaaacgacccagtcgtttactttcgtctagctcgaatggaaaggggaagatctcagttctatatccaaacaagactaccacccccaagtcagttaaagaccttgaatttgatggtttctccttgactactgaccttcgtgagaatttgcaggacggacctttcaattttgttttgcttgatggcacctggagcaattctgctgcactgtacagaaggttgaaggagagatggactgcagtatggggagatgaagctctaccttgtattgcactatctacacttagtgcctcagtgatgcataaactacgaccgcagcctgcctgggatcgtacctgcactgcagcagctgcagctggcctcctctgggagttgagctcgcggcctgagctcatctcatttgggttggaaaagcaagccgaggcggtggagtgctcgttagacaacttgctggatgctctcactgccaggcggcttcgtctgggccgatcgataactcggaaacagagacatagtaggaactgcatatagggaaagaagaaactcacagtaacagaggagcatggtgtgccatcaagtggaaggctgatttcattcttttttgtagaactcaggagctgatcattgtcaacaagttttctcccctttctatataggttactagatcttcagttcagtgctgtagattacttttaatggtcattgacatgagctgttaccgctgctactgtcgaagaggagggttaccaaatattagggtgctaaaacttgggttgtattctgacagattttgccataccatgaaatcaagttgttttctcatgccaataggttacagctgacaaacaatccctcccatcctctcttttccagtcgcgtattgtatggtatcgtgcccagtaagggcttattcggttttaccccaatccatatggattgagggggattgagggggtttcaatccctagtaagtcaaaatccctcccaatccgtatcaatcccctccaatccatatggattgaaaataaccgaacatgcc

SEQ ID NO: 58140 - DNA, 1063 bp, Zea Mays
gtagtttaggttagctttcacttgcttcaattgaccctttcaagagctgaaaatttcttgttaggaaaggggaagatctcagttctatatccaaacaagactaccacccccaagtcagttaaagaccttgaatttgatggtttctccttgactactgaccttcgtgagaatttgcaggacggacctttcaattttgttttgcttgatggcacctggagcaattctgctgcactgtacagaaggttgaaggagagatggactgcagtatggggagatgaagctctaccttgtattgcactatctacacttagtgcctcagtgatgcataaactacgaccgcagcctgcctgggatcgtacctgcactgcagcagctgcagctggcctcctctgggagttgagctcgcggcctgagctcatctcatttgggttggaaaagcaagccgaggcggtggagtgctcgttagacaacttgctggatgctctcactgccaggcggcttcgtctgggccgatcgataactcggaaacagagacatagtaggaactgcatatagggaaagaagaaactcacagtaacagaggagcatggtgtgccatcaagtggaaggctgatttcattcttttttgtagaactcaggagctgatcattgtcaacaagttttctcccctttctatataggttactagatcttcagttcagtgctgtagattacttttaatggtcattgacatgagctgttaccgctgctactgtcgaagaggagggttaccaaatattagggtgctaaaacttgggttgtattctgacagattttgccataccatgaaatcaagttgttttctcatgccaataggttacagctgacaaacaatccctcccatcctctcttttccagtcgcgtattgtatggtatcgtgcccagtaagggcttattcggttttaccccaatccatatggattgagggggattgagggggtttcaatccctagtaagtcaaaatccctcccaatccgtatcaatcccctccaatccatatggattgaaaataaccgaacatgcc

SEQ ID NO: 58141 - DNA, 1115 bp, Zea Mays
gttagctttcacttgcttcaattgaccctttcaagagctgaaaatttcttgttagagtaaaggcaatatatgacgtgtcaaacgacccagtcgtttactttcgtctagctcgaatggaaaggggaagatctcagttctatatccaaacaagactaccacccccaagtcagttaaagaccttgaatttgatggtttctccttgactactgaccttcgtgagaatttgcaggacggacctttcaattttgttttgcttgatggcacctggagcaattctgctgcactgtacagaaggttgaaggagagatggactgcagtatggggagatgaagctctaccttgtattgcactatctacacttagtgcctcagtgatgcataaactacgaccgcagcctgcctgggatcgtacctgcactgcagcagctgcagctggcctcctctgggagttgagctcgcggcctgagctcatctcatttgggttggaaaagcaagccgaggcggtggagtgctcgttagacaacttgctggatgctctcactgccaggcggcttcgtctgggccgatcgataactcggaaacagagacatagtaggaactgcatatagggaaagaagaaactcacagtaacagaggagcatggtgtgccatcaagtggaaggctgatttcattcttttttgtagaactcaggagctgatcattgtcaacaagttttctcccctttctatataggttactagatcttcagttcagtgctgtagattacttttaatggtcattgacatgagctgttaccgctgctactgtcgaagaggagggttaccaaatattagggtgctaaaacttgggttgtattctgacagattttgccataccatgaaatcaagttgttttctcatgccaataggttacagctgacaaacaatccctcccatcctctcttttccagtcgcgtattgtatggtatcgtgcccagtaagggcttattcggttttaccccaatccatatggattgagggggattgagggggtttcaatccctagtaagtcaaaatccctcccaatccgtatcaatcccctccaatccatatggattgaaaataaccgaacatgcc

SEQ ID NO: 58142 - DNA, 2764 bp, Zea Mays
cactgttcccttgtctttgccgaaacagcgaggcttcctcccaattccaatccaagccccaactaacgacctccgcccattccgctcgcggttgcctccgcctccgcctccgcctccgcgcctaacccaatccagagccagggcagggcaaccaaaccctaggccctcgcgctcgtggtatccatgggctgaccgcgtcccggtggggagcccggatccagagctagggttccgtcctcggcggcaacgccatggagtgggacagcgagtccgacggcgccggcagcgtcggcgtcgacgagcaggaagaggagcaggagcaggaggaggaggaggaggagcggggaggcgagggaggaggtggcgacgccggtgggatgttcacgctcgcgattgaaggcatgctgcgcgcgtcaggtccgtgcgggctcgtcgtcaccgacgcgctcgagcccgactgtcccatcatctacgccaaccgcggcttcgaggaggctacgggctaccgcgccgaggagtttcttggcaggaactgtgtagagggccatttgctcgaaggagacatcccctagttaatgctgcagtggtttcagagattcaaagatgcataaacaacagcattgagttccgtggcgatttattaaatttcagaaaagatggatcgccactgatgaacaggttgcatctgacccctatatatggagatgatgaaactataacccattatatgggcatccagttcttcactgatgctaatgttgatttgggaccattgccctgtccaatgacaaaggaaccagtgaggtcaacacggtttgctccagataactcatttcgacccatttctgcggggccagagcacagcaatttctgccgggaatattctagcctcttccagttaacggatgaagtgctttgccaaagtatactgtcaaggttgacaccaagagatatagcatctgtgagctccgtgtgcaggtgcttgtatcatttgacaagaaatgaagatctctggagaatggtttgccagaatgcttggggtagtgaaactactcgagctcttgagacggtgcccgctgcaagaaggttgggctggggacgtctggcaagagaactgaccaccctggaagctgttgcctggaggaaattgacagttgggggtgcagtggagccatctcgatgcaatttcagtgcctgtgccgtagggaaccgtgttgttctatttggtggggaaggtgttaacatgcagccgatgaatgacacgtttgtattggatttaaacgctagcaatccagagtggaggcatataaatgtgagtgcagctcctccaggtcgctggggccatactctgtcatgcttaaatggctcttggttggttgtttttggtggatgtggaaggcagggtctgcttaatgatgtattcatgttggatttggatgcaaaacaaccaacctggcgtgagatacctggagttgcacccccagttccacgttcatggcacagctcctgcactttggatgggacgaagttagtagtttctggtggctgtgccgattcaggtgtacttctcagtgacacatatcttcttgatgtaaccatggataggccagtttggagagaggttcctgcatcctggaaaccgccttctaggctggggcactcaatgtctgtctatgatggtaggaagatcctgatgtttggtggtcttgctaagagcggccctctgcggctcaggtctagtgatgtgtacacaatggacttaagtgaagaagaaccttgctggcgatgcctcactggtagtggaatgcctggggctggaaatccagctggcgcaggtccacctcctcgcctcgatcatgttggtgtgagcctgccaggtggaagaattttgatatttggtggctcagtggcaggtcttcactcagcatcacagctttatctgttggatccaactgaagaaaagccgacctggagaattttgagtgttcctgggcaccctccccgattcgcctggggccacagcacctgtgttgttggaggaacaaaagcgatagtgcttggtggacaaactggggaagagtggatgcttacagaaatacatgagctctctttggcaaacaactcagtctgagttcatggtggacaaaccggggaagagtggatgcttacagaaatacatgagctctctttggcaagcaactcagtctgagttcagggtggccaaaccggggaagagtggatgcttacagaaatacatgagctctctttggcaagcaactcagtctgagttcaggaatggttcttagtcatgctccttgcaaactaattgcggcttcttatgcgacctgaagcttgattgccttcaccttcagagtatcatctggcagctacatggctttacttgggagatgaaatggttttcactggtttgctcgctttatgtaggcagagggtagcgatatgttcatttttattgccgtttgcttggccttctttttaccagataattacagttcataagctactattgtggaatgagtaccagattttatatgtattctcagatgtttccgacttgcaatatgttaggaaaacaaaggactaccttgtacatagtttaagcttttgttgtacggtacatggagaccttgatgctgctgtcttgcggcacaggcgcacaactgctgagatggcgtgatgtaaggtgatcaccgatcgaccatgtttttgtgcagaacttgtattatgcagaaatttcatcccg

SEQ ID NO: 58143 - DNA, 2835 bp, Zea Mays
cgacctccgcccattccgctcgcggttgcctccgcctccgcctccgcctccgcgcctaacccaatccagagccagggcagggcaaccaaaccctaggccctcgcgctcgtggtatccatgggctgaccgcgtcccggtggggagcccggatccagagctagggttccgtcctcggcggcaacgccatggagtgggacagcgagtccgacggcgccggcagcgtcggcgtcgacgagcaggaagaggagcaggagcaggaggaggaggaggaggagcggggaggcgagggaggaggtggcgacgccggtgggatgttcacgctcgcgattgaaggcatgctgcgcgcgtcaggtccgtgcgggctcgtcgtcaccgacgcgctcgagcccgactgtcccatcatctacgccaaccgcggcttcgaggaggctacgggctaccgcgccgaggagtttcttggcaggaactggattgcttggcatgataccatactactgattacaaagaaaaccatatgcttggctttagctggcatgatattgctgttttgaggtcatgttcttcaatattgtttcgagagagaaatatctaagtcgattcctgcagtgtagagggccatttgctcgaaggagacatcccctagttaatgctgcagtggtttcagagattcaaagatgcataaacaacagcattgagttccgtggcgatttattaaatttcagaaaagatggatcgccactgatgaacaggttgcatctgacccctatatatggagatgatgaaactataacccattatatgggcatccagttcttcactgatgctaatgttgatttgggaccattgccctgtccaatgacaaaggaaccagtgaggtcaacacggtttgctccagataactcatttcgacccatttctgcggggccagagcacagcaatttctgccgggaatattctagcctcttccagttaacggatgaagtgctttgccaaagtatactgtcaaggttgacaccaagagatatagcatctgtgagctccgtgtgcaggtgcttgtatcatttgacaagaaatgaagatctctggagaatggtttgccagaatgcttggggtagtgaaactactcgagctcttgagacggtgcccgctgcaagaaggttgggctggggacgtctggcaagagaactgaccaccctggaagctgttgcctggaggaaattgacagttgggggtgcagtggagccatctcgatgcaatttcagtgcctgtgccgtagggaaccgtgttgttctatttggtggggaaggtgttaacatgcagccgatgaatgacacgtttgtattggatttaaacgctagcaatccagagtggaggcatataaatgtgagtgcagctcctccaggtcgctggggccatactctgtcatgcttaaatggctcttggttggttgtttttggtggatgtggaaggcagggtctgcttaatgatgtattcatgttggatttggatgcaaaacaaccaacctggcgtgagatacctggagttgcacccccagttccacgttcatggcacagctcctgcactttggatgggacgaagttagtagtttctggtggctgtgccgattcaggtgtacttctcagtgacacatatcttcttgatgtaaccatggataggccagtttggagagaggttcctgcatcctggaaaccgccttctaggctggggcactcaatgtctgtctatgatggtaggaagatcctgatgtttggtggtcttgctaagagcggccctctgcggctcaggtctagtgatgtgtacacaatggacttaagtgaagaagaaccttgctggcgatgcctcactggtagtggaatgcctggggctggaaatccagctggcgcaggtccacctcctcgcctcgatcatgttggtgtgagcctgccaggtggaagaattttgatatttggtggctcagtggcaggtcttcactcagcatcacagctttatctgttggatccaactgaagaaaagccgacctggagaattttgagtgttcctgggcaccctccccgattcgcctggggccacagcacctgtgttgttggaggaacaaaagcgatagtgcttggtggacaaactggggaagagtggatgcttacagaaatacatgagctctctttggcaaacaactcagtctgagttcatggtggacaaaccggggaagagtggatgcttacagaaatacatgagctctctttggcaagcaactcagtctgagttcagggtggccaaaccggggaagagtggatgcttacagaaatacatgagctctctttggcaagcaactcagtctgagttcaggaatggttcttagtcatgctccttgcaaactaattgcggcttcttatgcgacctgaagcttgattgccttcaccttcagagtatcatctggcagctacatggctttacttgggagatgaaatggttttcactggtttgctcgctttatgtaggcagagggtagcgatatgttcatttttattgccgtttgcttggccttctttttaccagataattacagttcataagctactattgtggaatgagtaccagattttatatgtattctcagatgtttccgacttgcaatatgttaggaaaacaaaggactaccttgtacatagtttaagcttttgttgtacggtacatggagaccttgatgctgctgtcttgcggcacaggcgcacaactgctgagatggcgtgatgtaaggtgatcaccgatcgaccatgtttttgtgcagaacttgtattatgcagaaatttcatcccg

SEQ ID NO: 58144 - DNA, 2262 bp, Zea Mays
cttcaatattgtttcgagagagaaatatctaagtgtagagggccatttgctcgaaggagacatcccctagttaatgctgcagtggtttcagagattcaaagatgcataaacaacagcattgagttccgtggcgatttattaaatttcagaaaagatggatcgccactgatgaacaggttgcatctgacccctatatatggagatgatgaaactataacccattatatgggcatccagttcttcactgatgctaatgttgatttgggaccattgccctgtccaatgacaaaggaaccagtgaggtcaacacggtttgctccagataactcatttcgacccatttctgcggggccagagcacagcaatttctgccgggaatattctagcctcttccagttaacggatgaagtgctttgccaaagtatactgtcaaggttgacaccaagagatatagcatctgtgagctccgtgtgcaggtgcttgtatcatttgacaagaaatgaagatctctggagaatggtttgccagaatgcttggggtagtgaaactactcgagctcttgagacggtgcccgctgcaagaaggttgggctggggacgtctggcaagagaactgaccaccctggaagctgttgcctggaggaaattgacagttgggggtgcagtggagccatctcgatgcaatttcagtgcctgtgccgtagggaaccgtgttgttctatttggtggggaaggtgttaacatgcagccgatgaatgacacgtttgtattggatttaaacgctagcaatccagagtggaggcatataaatgtgagtgcagctcctccaggtcgctggggccatactctgtcatgcttaaatggctcttggttggttgtttttggtggatgtggaaggcagggtctgcttaatgatgtattcatgttggatttggatgcaaaacaaccaacctggcgtgagatacctggagttgcacccccagttccacgttcatggcacagctcctgcactttggatgggacgaagttagtagtttctggtggctgtgccgattcaggtgtacttctcagtgacacatatcttcttgatgtaaccatggataggccagtttggagagaggttcctgcatcctggaaaccgccttctaggctggggcactcaatgtctgtctatgatggtaggaagatcctgatgtttggtggtcttgctaagagcggccctctgcggctcaggtctagtgatgtgtacacaatggacttaagtgaagaagaaccttgctggcgatgcctcactggtagtggaatgcctggggctggaaatccagctggcgcaggtccacctcctcgcctcgatcatgttggtgtgagcctgccaggtggaagaattttgatatttggtggctcagtggcaggtcttcactcagcatcacagctttatctgttggatccaactgaagaaaagccgacctggagaattttgagtgttcctgggcaccctccccgattcgcctggggccacagcacctgtgttgttggaggaacaaaagcgatagtgcttggtggacaaactggggaagagtggatgcttacagaaatacatgagctctctttggcaaacaactcagtctgagttcatggtggacaaaccggggaagagtggatgcttacagaaatacatgagctctctttggcaagcaactcagtctgagttcagggtggccaaaccggggaagagtggatgcttacagaaatacatgagctctctttggcaagcaactcagtctgagttcaggaatggttcttagtcatgctccttgcaaactaattgcggcttcttatgcgacctgaagcttgattgccttcaccttcagagtatcatctggcagctacatggctttacttgggagatgaaatggttttcactggtttgctcgctttatgtaggcagagggtagcgatatgttcatttttattgccgtttgcttggccttctttttaccagataattacagttcataagctactattgtggaatgagtaccagattttatatgtattctcagatgtttccgacttgcaatatgttaggaaaacaaaggactaccttgtacatagtttaagcttttgttgtacggtacatggagaccttgatgctgctgtcttgcggcacaggcgcacaactgctgagatggcgtgatgtaaggtgatcaccgatcgaccatgtttttgtgcagaacttgtattatgcagaaatttcatcccg

SEQ ID NO: 58145 - DNA, 2219 bp, Zea Mays
atgccttcagctgtgctgaagttgtttcacgtaggagccccacaggatggtacaggcaggaggatcaggccaccgtcgaggaacgcgctcttcgctgtgttccagcgagaagatgagggatcgagggcggcgcaggtggcgagctcgtgggcggaacagactggtgagagcaagaggatggatcaggagcttgagccccaggaggggagctgtttgagcggatgcccaccaggaacaatgtttcctagatcacgatgtttgggccacttttggaagaggtcagggatgacatgttttcaagcttggaggacatcaccaacgcaccatatgcagatctgctctctattaattcaatgaggaaaggaaaggggtcatagaaattagtcttggcagatggaggggaacgtctcaatgactgagagacatgccagtgaggagcagtttagtcggttcttgctttatgaagtggatgcaattagaaagacgtacgagcgggccaacatctcgcggtggctcgccttgggcaaccggacctgcccgaccacgatgcaggagctctaggacgacgccctcacccccaacgccactctccgacaactcatcgccgcctgtttatcttagatattgtttgaacgtatgggatgttggaggacagaagacaatcatgtcttactggagaaattactttgagcagactaatgggttagtttggtttgctgatagttcagacataaggaggcttgatgattgccgtgctgaactccacaatctcttgaaagaagaggataaaggtttacctatctaggcagtgttctattgttgatttttgcaaataagcaagacatgcaaggagctctaaaaccaactggaatcgcgaagattttacttagttcgatgtgggagcaaaaggatatgccaaattgaatgtagtttcatcagttatgctctattatggatgttcagaggcatccaatttcagtgtgtactgcaatacttgggtccacctagtcactctccgacagctcatcgccgcttggttctcctgtcggtacacaaggtttaagaagcgctacgcggacttccacggccgcgctgccgatctcgtccacggcctccggggcacggcgatgcccaggagacaggccctcgaggaagagcaatgtacagaagagaaaggtatctcgactattccaaagcacaagtatgcatccaaagcctgttccccaaaaggaacctttatctgcagctctctctgcgcttactcttgttgtgcaatttaatgggtggctatcatttttcctcttgctttattataaacttcctctgcggccagaaactcacaagacatactatgaatacactggcttgtggcacatctatgggctccttgccatgaattcatggttctggagtgccatatatcacagttgtgacacaatttggacagaaaaagctatatttttcatcagatgctgcctttctagggtattccctcattttgacgatagttgattaatcattctggaacttgtactaacaattgaagcaagtggaggcatagcaccaattgtgtctgtgctgcagctctggatgtcagtagacaagaggtgtatcagagagaagcacttcaaggttaatttgttgagcaaattggagatgctggattttgtattttggtaggtgatgtatgcttttcagcatggcgtattttattgaactggtcaagtcctgcagaagctgaaactgatcatggataagactttgccttgtgtcacaatgggtgcatttgctggtggtccttggatcaggttgctcatgggtggtgaatgatctgacgacttcagaagaggatagatctgagattacctttcatgcatgtcaaggaagttaagtagctgatgccatcaaagcaatggagaaacgtcaggtgaaccgcgagcagaattctgtggcgcatttgttagcgcagttagttaggactctgttcatacaactgttcgattaagccaaatacctaatttagttttatattggttgttgtcaaagaatttgtgaaatattgaggttgataatatatgtggcgttcgtttttatgtaatcattgttcactaatattttgtcgaatattttatattatatagacattactaagaacgtaaggggtcgctcgtgctctgtaaaggtacaaacaatcatgattgtggaggagcgtgacggcg

SEQ ID NO: 58146 - DNA, 2198 bp, Zea Mays
atgccttcagctgtgctgaagttgtttcacgtaggagccccacaggatggtacaggcaggaggatcaggccaccgtcgaggaacgcgctcttcgctgtgttccagcgagaagatgagggatcgagggcggcgcaggtggcgagctcgtgggcggaacagactggtgagagcaagaggatggatcaggagcttgagccccaggaggggagctgtttgagcggatgcccaccaggaacaatgtttcctagatcacgatgtttgggccacttttggaagaggtcagggatgacatgttttcaagcttggaggacatcaccaacgcaccatatgcagatctgctctctattaattcaatgaggaaaggaaaggggtcatagaaattagtcttggcagatggaggggaacgtctcaatgactgaggcacatttttactaaattatccctaaattatttgtatttttaaaataacatgtaatcttgttgatctggtttactcaagatgcatcaagtttgtacttggagaagaatcctggagttattttacttgtttccttgatttgtagagacatgccagtgaggagcagtttagtcggttcttgctttatgaagtggatgcaattagaaagacgtacgagcgggccaacatctcgcggtggctcgccttgggcaaccggacctgcccgaccacgatgcaggagctctaggacgacgccctcacccccaacgccactctccgacaactcatcgccgcctggttctcccgcctggtttctgcattttgttttcttatctgtcaatcatgtttttccatattactgcaggtgggtctgattaattatttaaatgtagtttatcttagatattgtttgaacgtatgggatgttggaggacagaagacaatcatgtcttactggagaaattactttgagcagactaatgggttagtttggtttgctgatagttcagacataaggaggcttgatgattgccgtgctgaactccacaatctcttgaaagaagaggataaaggtttacctatctaggcagtgttctattgttgatttttgcaaataagcaagacatgcaaggagctctaaaaccaactggaatcgcgaagagtcactctccgacagctcatcgccgcttggttctcctgtcggtacacaaggtttaagaagcgctacgcggacttccacggccgcgctgccgatctcgtccacggcctccggggcacggcgatgcccaggagacaggccctcgaggaagagcaatgtacagaagagaaaggtatctcgactattccaaagcacaagtatgcatccaaagcctgttccccaaaaggaacctttatctgcagctctctctgcgcttactcttgttgtgcaatttaatgggtggctatcatttttcctcttgctttattataaacttcctctgcggccagaaactcacaagacatactatgaatacactggcttgtggcacatctatgggctccttgccatgaattcatggttctggagtgccatatatcacagttgtgacacaatttggacagaaaaagctatatttttcatcagatgctgcctttctagggtattccctcattttgacgatagttgattaatcattctggaacttgtactaacaattgaagcaagtggaggcatagcaccaattgtgtctgtgctgcagctctggatgtcagtagacaagaggtgtatcagagagaagcacttcaaggttaatttgttgagcaaattggagatgctggattttgtattttggttgctcatgggtggtgaatgatctgacgacttcagaagaggatagatctgagattacctttcatgcatgtcaaggaagttaagtagctgatgccatcaaagcaatggagaaacgtcaggtgaaccgcgagcagaattctgtggcgcatttgttagcgcagttagttaggactctgttcatacaactgttcgattaagccaaatacctaatttagttttatattggttgttgtcaaagaatttgtgaaatattgaggttgataatatatgtggcgttcgtttttatgtaatcattgttcactaatattttgtcgaatattttatattatatagacattactaagaacgtaaggggtcgctcgtgctctgtaaaggtacaaacaatcatgattgtggaggagcgtgacggcg

SEQ ID NO: 58147 - DNA, 2358 bp, Zea Mays
atgccttcagctgtgctgaagttgtttcacgtaggagccccacaggatggtacaggcaggaggatcaggccaccgtcgaggaacgcgctcttcgctgtgttccagcgagaagatgagggatcgagggcggcgcaggtggcgagctcgtgggcggaacagactggtgagagcaagaggatggatcaggagcttgagccccaggaggggagctgtttgagcggatgcccaccaggaacaatgtttcctagatcacgatgtttgggccacttttggaagaggtcagggatgacatgttttcaagcttggaggacatcaccaacgcaccatatgcagatctgctctctattaattcaatgaggaaaggaaaggggtcatagaaattagtcttggcagatggaggggaacgtctcaatgactgaggcacatttttactaaattatccctaaattatttgtatttttaaaataacatgtaatcttgttgatctggtttactcaagatgcatcaagtttgtacttggagaagaatcctggagttattttacttgtttccttgatttgtagagacatgccagtgaggagcagtttagtcggttcttgctttatgaagtggatgcaattagaaagacgtacgagcgggccaacatctcgcggtggctcgccttgggcaaccggacctgcccgaccacgatgcaggagctctaggacgacgccctcacccccaacgccactctccgacaactcatcgccgcctggttctcccgcctggtttctgcattttgttttcttatctgtcaatcatgtttttccatattactgcaggtgggtctgattaattatttaaatgtagtttatcttagatattgtttgaacgtatgggatgttggaggacagaagacaatcatgtcttactggagaaattactttgagcagactaatgggttagtttggtttgctgatagttcagacataaggaggcttgatgattgccgtgctgaactccacaatctcttgaaagaagaggataaaggtttacctatctaggcagtgttctattgttgatttttgcaaataagcaagacatgcaaggagctctaaaaccaactggaatcgcgaagattttacttagttcgatgtgggagcaaaaggatatgccaaattgaatgtagtttcatcagttatgctctattatggatgttcagaggcatccaatttcagtgtgtactgcaatacttgggtccacctagtcactctccgacagctcatcgccgcttggttctcctgtcggtacacaaggtttaagaagcgctacgcggacttccacggccgcgctgccgatctcgtccacggcctccggggcacggcgatgcccaggagacaggccctcgaggaagagcaatgtacagaagagaaaggtatctcgactattccaaagcacaagtatgcatccaaagcctgttccccaaaaggaacctttatctgcagctctctctgcgcttactcttgttgtgcaatttaatgggtggctatcatttttcctcttgctttattataaacttcctctgcggccagaaactcacaagacatactatgaatacactggcttgtggcacatctatgggctccttgccatgaattcatggttctggagtgccatatatcacagttgtgacacaatttggacagaaaaagctatatttttcatcagatgctgcctttctagggtattccctcattttgacgatagttggtgagcatgtagtagcaagtttcatgggctctgattaatcattctggaacttgtactaacaattgaagcaagtggaggcatagcaccaattgtgtctgtgctgcagctctggatgtcagtagacaagaggtgtatcagagagaagcacttcaaggttaatttgttgagcaaattggagatgctggattttgtattttggttgctcatgggtggtgaatgatctgacgacttcagaagaggatagatctgagattacctttcatgcatgtcaaggaagttaagtagctgatgccatcaaagcaatggagaaacgtcaggtgaaccgcgagcagaattctgtggcgcatttgttagcgcagttagttaggactctgttcatacaactgttcgattaagccaaatacctaatttagttttatattggttgttgtcaaagaatttgtgaaatattgaggttgataatatatgtggcgttcgtttttatgtaatcattgttcactaatattttgtcgaatattttatattatatagacattactaagaacgtaaggggtcgctcgtgctctgtaaaggtacaaacaatcatgattgtggaggagcgtgacggcg

SEQ ID NO: 58148 - DNA, 2245 bp, Zea Mays
atgccttcagctgtgctgaagttgtttcacgtaggagccccacaggatggtacaggcaggaggatcaggccaccgtcgaggaacgcgctcttcgctgtgttccagcgagaagatgagggatcgagggcggcgcaggtggcgagctcgtgggcggaacagactggtgagagcaagaggatggatcaggagcttgagccccaggaggggagctgtttgagcggatgcccaccaggaacaatgtttcctagatcacgatgtttgggccacttttggaagaggtcagggatgacatgttttcaagcttggaggacatcaccaacgcaccatatgcagatctgctctctattaattcaatgaggaaaggaaaggggtcatagaaattagtcttggcagatggaggggaacgtctcaatgactgagagacatgccagtgaggagcagtttagtcggttcttgctttatgaagtggatgcaattagaaagacgtacgagcgggccaacatctcgcggtggctcgccttgggcaaccggacctgcccgaccacgatgcaggagctctaggacgacgccctcacccccaacgccactctccgacaactcatcgccgcctgtttatcttagatattgtttgaacgtatgggatgttggaggacagaagacaatcatgtcttactggagaaattactttgagcagactaatgggttagtttggtttgctgatagttcagacataaggaggcttgatgattgccgtgctgaactccacaatctcttgaaagaagaggataaaggtttacctatctaggcagtgttctattgttgatttttgcaaataagcaagacatgcaaggagctctaaaaccaactggaatcgcgaaggtaagcgaacttcagtcatttattatatgcattagagacatgttttcctgtctatgacatcatttttaacttgtactgtgtttttccggtcctcatggttgccaagattttacttagttcgatgtgggagcaaaaggatatgccaaattgaatgtagtttcatcagttatgctctattatggatgttcagaggcatccaatttcagtgtgtactgcaatacttgggtccacctgtacgtggtagatgttctgcattttgttttcttataaattagatttggcttccattatgttgttctcttttggaacagagtcactctccgacagctcatcgccgcttggttctcctgtcggtacacaaggtttaagaagcgctacgcggacttccacggccgcgctgccgatctcgtccacggcctccggggcacggcgatgcccaggagacaggccctcgaggaagagcaatgtacagaagagaaaggtatctcgactattccaaagcacaagtatgcatccaaagcctgttccccaaaaggaacctttatctgcagctctctctgcgcttactcttgttgtgcaatttaatgggtggctatcatttttcctcttgctttattataaacttcctctgcggccagaaactcacaagacatactatgaatacactggcttgtggcacatctatgggctccttgccatgaattcatggttctggagtgccatatatcacagttgtgacacaatttggacagaaaaagctatatttttcatcagatgctgcctttctaggattaatcattctggaacttgtactaacaattgaagcaagtggaggcatagcaccaattgtgtctgtgctgcagctctggatgtcagtagacaagaggtgtatcagagagaagcacttcaaggttaatttgttgagcaaattggagatgctggattttgtattttggttgctcatgggtggtgaatgatctgacgacttcagaagaggatagatctgagattacctttcatgcatgtcaaggaagttaagtagctgatgccatcaaagcaatggagaaacgtcaggtgaaccgcgagcagaattctgtggcgcatttgttagcgcagttagttaggactctgttcatacaactgttcgattaagccaaatacctaatttagttttatattggttgttgtcaaagaatttgtgaaatattgaggttgataatatatgtggcgttcgtttttatgtaatcattgttcactaatattttgtcgaatattttatattatatagacattactaagaacgtaaggggtcgctcgtgctctgtaaaggtacaaacaatcatgattgtggaggagcgtgacggcg

SEQ ID NO: 58149 - DNA, 2186 bp, Zea Mays
atgccttcagctgtgctgaagttgtttcacgtaggagccccacaggatggtacaggcaggaggatcaggccaccgtcgaggaacgcgctcttcgctgtgttccagcgagaagatgagggatcgagggcggcgcaggtggcgagctcgtgggcggaacagactggtgagagcaagaggatggatcaggagcttgagccccagagacatgccagtgaggagcagtttagtcggttcttgctttatgaagtggatgcaattagaaagacgtacgagcgggccaacatctcgcggtggctcgccttgggcaaccggacctgcccgaccacgatgcaggagctctaggacgacgccctcacccccaacgccactctccgacaactcatcgccgcctggttctcccgcctggtttctgcattttgttttcttatctgtcaatcatgtttttccatattactgcaggtgggtctgattaattatttaaatgtagtttatcttagatattgtttgaacgtatgggatgttggaggacagaagacaatcatgtcttactggagaaattactttgagcagactaatgggttagtttggtttgctgatagttcagacataaggaggcttgatgattgccgtgctgaactccacaatctcttgaaagaagaggataaaggtttacctatctaggcagtgttctattgttgatttttgcaaataagcaagacatgcaaggagctctaaaaccaactggaatcgcgaagagtcactctccgacagctcatcgccgcttggttctcctgtcggtacacaaggtttaagaagcgctacgcggacttccacggccgcgctgccgatctcgtccacggcctccggggcacggcgatgcccaggagacaggccctcgaggaagagcaatgtacagaagagaaaggtatctcgactattccaaagcacaagtatgcatccaaagcctgttccccaaaaggtgcgtgaactttgttcttgattttgtcagactaaatgtgggtgaactttgtactgcagtttttgtttaaataaactttggactgtttaaattactgatgcatccaaccactgtttttctttattgtttgttgatacacgaccagatgcccagttgagttcacccaaaaggtttattacaacacgaaaaaatctgagataaaatgttttttatttaaatgaactttgtattgcagtatttatagacatattttggcacccggtcgtttactatttttgttttattaatacctcttgtgtttccctttcacttcctttgtataaactgtatgcctctgttttcattctcaggaacctttatctgcagctctctctgcgcttactcttgttgtgcaatttaatgggtggctatcatttttcctcttgctttattataaacttcctctgcggccagaaactcacaagacatactatgaatacactggcttgtggcacatctatgggctccttgccatgaattcatggttctggagtgccatatatcacagttgtgacacaatttggacagaaaaagctatatttttcatcagatgctgcctttctagggtattccctcattttgacgatagttgattaatcattctggaacttgtactaacaattgaagcaagtggaggcatagcaccaattgtgtctgtgctgcagctctggatgtcagtagacaagaggtgtatcagagagaagcacttcaaggttaatttgttgagcaaattggagatgctggattttgtattttggttgctcatgggtggtgaatgatctgacgacttcagaagaggatagatctgagattacctttcatgcatgtcaaggaagttaagtagctgatgccatcaaagcaatggagaaacgtcaggtgaaccgcgagcagaattctgtggcgcatttgttagcgcagttagttaggactctgttcatacaactgttcgattaagccaaatacctaatttagttttatattggttgttgtcaaagaatttgtgaaatattgaggttgataatatatgtggcgttcgtttttatgtaatcattgttcactaatattttgtcgaatattttatattatatagacattactaagaacgtaaggggtcgctcgtgctctgtaaaggtacaaacaatcatgattgtggaggagcgtgacggcg

SEQ ID NO: 58150 - DNA, 2086 bp, Zea Mays
atgccttcagctgtgctgaagttgtttcacgtaggagccccacaggatggtacaggcaggaggatcaggccaccgtcgaggaacgcgctcttcgctgtgttccagcgagaagatgagggatcgagggcggcgcaggtggcgagctcgtgggcggaacagactggtgagagcaagaggatggatcaggagcttgagccccaggaggggagctgtttgagcggatgcccaccaggaacaatgtttcctagatcacgatgtttgggccacttttggaagaggtcagggatgacatgttttcaagcttggaggacatcaccaacgcaccatatgcagatctgctctctattaattcaatgaggaaaggaaaggggtcatagaaattagtcttggcagatggaggggaacgtctcaatgactgagagacatgccagtgaggagcagtttagtcggttcttgctttatgaagtggatgcaattagaaagacgtacgagcgggccaacatctcgcggtggctcgccttgggcaaccggacctgcccgaccacgatgcaggagctctaggacgacgccctcacccccaacgccactctccgacaactcatcgccgcctggttctcccgcctggtttctgcattttgttttcttatctgtcaatcatgtttttccatattactgcaggtgggtctgattaattatttaaatgtagtttatcttagatattgtttgaacgtatgggatgttggaggacagaagacaatcatgtcttactggagaaattactttgagcagactaatgggttagtttggtttgctgatagttcagacataaggaggcttgatgattgccgtgctgaactccacaatctcttgaaagaagaggataaaggtttacctatctaggcagtgttctattgttgatttttgcaaataagcaagacatgcaaggagctctaaaaccaactggaatcgcgaagattttacttagttcgatgtgggagcaaaaggatatgccaaattgaatgtagtttcatcagttatgctctattatggatgttcagaggcatccaatttcagtgtgtactgcaatacttgggtccacctagtcactctccgacagctcatcgccgcttggttctcctgtcggtacacaaggtttaagaagcgctacgcggacttccacggccgcgctgccgatctcgtccacggcctccggggcacggcgatgcccaggagacaggccctcgaggaagagcaatgtacagaagagaaaggtatctcgactattccaaagcacaagtatgcatccaaagcctgttccccaaaaggaacctttatctgcagctctctctgcgcttactcttgttgtgcaatttaatgggtggctatcatttttcctcttgctttattataaacttcctctgcggccagaaactcacaagacatactatgaatacactggcttgtggcacatctatgggctccttgccatgaattcatggttctggagtgccatatatcacagttgtgacacaatttggacagaaaaagctatatttttcatcagatgctgcctttctagggtattccctcattttgacgatagttggtgtatcagagagaagcacttcaaggttaatttgttgagcaaattggagatgctggattttgtattttggttgctcatgggtggtgaatgatctgacgacttcagaagaggatagatctgagattacctttcatgcatgtcaaggaagttaagtagctgatgccatcaaagcaatggagaaacgtcaggtgaaccgcgagcagaattctgtggcgcatttgttagcgcagttagttaggactctgttcatacaactgttcgattaagccaaatacctaatttagttttatattggttgttgtcaaagaatttgtgaaatattgaggttgataatatatgtggcgttcgtttttatgtaatcattgttcactaatattttgtcgaatattttatattatatagacattactaagaacgtaaggggtcgctcgtgctctgtaaaggtacaaacaatcatgattgtggaggagcgtgacggcg

SEQ ID NO: 58151 - DNA, 2049 bp, Zea Mays
atgccttcagctgtgctgaagttgtttcacgtaggagccccacaggatggtacaggcaggaggatcaggccaccgtcgaggaacgcgctcttcgctgtgttccagcgagaagatgagggatcgagggcggcgcaggtggcgagctcgtgggcggaacagactggtgagagcaagaggatggatcaggagcttgagccccaggaggggagctgtttgagcggatgcccaccaggaacaatgtttcctagatcacgatgtttgggccacttttggaagaggtcagggatgacatgttttcaagcttggaggacatcaccaacgcaccatatgcagatctgctctctattaattcaatgaggaaaggaaaggggtcatagaaattagtcttggcagatggaggggaacgtctcaatgactgagagacatgccagtgaggagcagtttagtcggttcttgctttatgaagtggatgcaattagaaagacgtacgagcgggccaacatctcgcggtggctcgccttgggcaaccggacctgcccgaccacgatgcaggagctctaggacgacgccctcacccccaacgccactctccgacaactcatcgccgcctggttctcccgcctgtttatcttagatattgtttgaacgtatgggatgttggaggacagaagacaatcatgtcttactggagaaattactttgagcagactaatgggttagtttggtttgctgatagttcagacataaggaggcttgatgattgccgtgctgaactccacaatctcttgaaagaagaggataaaggtttacctatctaggcagtgttctattgttgatttttgcaaataagcaagacatgcaaggagctctaaaaccaactggaatcgcgaagattttacttagttcgatgtgggagcaaaaggatatgccaaattgaatgtagtttcatcagttatgctctattatggatgttcagaggcatccaatttcagtgtgtactgcaatacttgggtccacctgtttaagaagcgctacgcggacttccacggccgcgctgccgatctcgtccacggcctccggggcacggcgatgcccaggagacaggccctcgaggaagagcaatgtacagaagagaaaggtatctcgactattccaaagcacaagtatgcatccaaagcctgttccccaaaaggaacctttatctgcagctctctctgcgcttactcttgttgtgcaatttaatgggtggctatcatttttcctcttgctttattataaacttcctctgcggccagaaactcacaagacatactatgaatacactggcttgtggcacatctatgggctccttgccatgaattcatggttctggagtgccatatatcacagttgtgacacaatttggacagaaaaagctatatttttcatcagatgctgcctttctagggtattccctcattttgacgatagttgattaatcattctggaacttgtactaacaattgaagcaagtggaggcatagcaccaattgtgtctgtgctgcagctctggatgtcagtagacaagaggtgtatcagagagaagcacttcaaggttaatttgttgagcaaattggagatgctggattttgtattttggttgctcatgggtggtgaatgatctgacgacttcagaagaggatagatctgagattacctttcatgcatgtcaaggaagttaagtagctgatgccatcaaagcaatggagaaacgtcaggtgaaccgcgagcagaattctgtggcgcatttgttagcgcagttagttaggactctgttcatacaactgttcgattaagccaaatacctaatttagttttatattggttgttgtcaaagaatttgtgaaatattgaggttgataatatatgtggcgttcgtttttatgtaatcattgttcactaatattttgtcgaatattttatattatatagacattactaagaacgtaaggggtcgctcgtgctctgtaaaggtacaaacaatcatgattgtggaggagcgtgacggcg

SEQ ID NO: 58152 - DNA, 2450 bp, Zea Mays
atgccttcagctgtgctgaagttgtttcacgtaggagccccacaggatggtacaggcaggaggatcaggccaccgtcgaggaacgcgctcttcgctgtgttccagcgagaagatgagggatcgagggcggcgcaggtggcgagctcgtgggcggaacagactggtgagagcaagaggatggatcaggagcttgagccccaggaggggagctgtttgagcggatgcccaccaggaacaatgtttcctagatcacgatgtttgggccacttttggaagaggtcagggatgacatgttttcaagcttggaggacatcaccaacgcaccatatgcagatctgctctctattaattcaatgaggaaaggaaaggggtcatagaaattagtcttggcagatggaggggaacgtctcaatgactgagagacatgccagtgaggagcagtttagtcggttcttgctttatgaagtggatgcaattagaaagacgtacgagcgggccaacatctcgcggtggctcgccttgggcaaccggacctgcccgaccacgatgcaggagctctaggacgacgccctcacccccaacgccactctccgacaactcatcgccgcctggttctcccgcctgtttatcttagatattgtttgaacgtatgggatgttggaggacagaagacaatcatgtcttactggagaaattactttgagcagactaatgggttagtttggtttgctgatagttcagacataaggaggcttgatgattgccgtgctgaactccacaatctcttgaaagaagaggataaaggtttacctatctaggcagtgttctattgttgatttttgcaaataagcaagacatgcaaggagctctaaaaccaactggaatcgcgaagattttacttagttcgatgtgggagcaaaaggatatgccaaattgaatgtagtttcatcagttatgctctattatggatgttcagaggcatccaatttcagtgtgtactgcaatacttgggtccacctagtcactctccgacagctcatcgccgcttggttctcctgtcggtacacaaggtttaagaagcgctacgcggacttccacggccgcgctgccgatctcgtccacggcctccggggcacggcgatgcccaggagacaggccctcgaggaagagcaatgtacagaagagaaaggtatctcgactattccaaagcacaagtatgcatccaaagcctgttccccaaaaggtgcgtgaactttgttcttgattttgtcagactaaatgtgggtgaactttgtactgcagtttttgtttaaataaactttggactgtttaaattactgatgcatccaaccactgtttttctttattgtttgttgatacacgaccagatgcccagttgagttcacccaaaaggtttattacaacacgaaaaaatctgagataaaatgttttttatttaaatgaactttgtattgcagtatttatagacatattttggcacccggtcgtttactatttttgttttattaatacctcttgtgtttccctttcacttcctttgtataaactgtatgcctctgttttcattctcaggaacctttatctgcagctctctctgcgcttactcttgttgtgcaatttaatgggtggctatcatttttcctcttgctttattataaacttcctctgcggccagaaactcacaagacatactatgaatacactggcttgtggcacatctatgggctccttgccatgaattcatggttctggagtgccatatatcacagttgtgacacaatttggacagaaaaagctatatttttcatcagatgctgcctttctagggtattccctcattttgacgatagttgattaatcattctggaacttgtactaacaattgaagcaagtggaggcatagcaccaattgtgtctgtgctgcagctctggatgtcagtagacaagaggtgtatcagagagaagcacttcaaggttaatttgttgagcaaattggagatgctggattttgtattttggttgctcatgggtggtgaatgatctgacgacttcagaagaggatagatctgagattacctttcatgcatgtcaaggaagttaagtagctgatgccatcaaagcaatggagaaacgtcaggtgaaccgcgagcagaattctgtggcgcatttgttagcgcagttagttaggactctgttcatacaactgttcgattaagccaaatacctaatttagttttatattggttgttgtcaaagaatttgtgaaatattgaggttgataatatatgtggcgttcgtttttatgtaatcattgttcactaatattttgtcgaatattttatattatatagacattactaagaacgtaaggggtcgctcgtgctctgtaaaggtacaaacaatcatgattgtggaggagcgtgacggcg

SEQ ID NO: 58153 - DNA, 2157 bp, Zea Mays
atgccttcagctgtgctgaagttgtttcacgtaggagccccacaggatggtacaggcaggaggatcaggccaccgtcgaggaacgcgctcttcgctgtgttccagcgagaagatgagggatcgagggcggcgcaggtggcgagctcgtgggcggaacagactggtgagagcaagaggatggatcaggagcttgagccccaggaggggagctgtttgagcggatgcccaccaggaacaatgtttcctagatcacgatgtttgggccacttttggaagaggtcagggatgacatgttttcaagcttggaggacatcaccaacgcaccatatgcagatctgctctctattaattcaatgaggaaaggaaaggggtcatagaaattagtcttggcagatggaggggaacgtctcaatgactgagagacatgccagtgaggagcagtttagtcggttcttgctttatgaagtggatgcaattagaaagacgtacgagcgggccaacatctcgcggtggctcgccttgggcaaccggacctgcccgaccacgatgcaggagctctaggacgacgccctcacccccaacgccactctccgacaactcatcgccgcctggttctcccgcctggtttctgcattttgttttcttatctgtcaatcatgtttttccatattactgcaggtgggtctgattaattatttaaatgtagtttatcttagatattgtttgaacgtatgggatgttggaggacagaagacaatcatgtcttactggagaaattactttgagcagactaatgggttagtttggtttgctgatagttcagacataaggaggcttgatgattgccgtgctgaactccacaatctcttgaaagaagaggataaaggtttacctatctaggcagtgttctattgttgatttttgcaaataagcaagacatgcaaggagctctaaaaccaactggaatcgcgaaggtaagcgaacttcagtcatttattatatgcattagagacatgttttcctgtctatgacatcatttttaacttgtactgtgtttttccggtcctcatggttgccaagattttacttagttcgatgtgggagcaaaaggatatgccaaattgaatgtagtttcatcagttatgctctattatggatgttcagaggcatccaatttcagtgtgtactgcaatacttgggtccacctgtttaagaagcgctacgcggacttccacggccgcgctgccgatctcgtccacggcctccggggcacggcgatgcccaggagacaggccctcgaggaagagcaatgtacagaagagaaaggaacctttatctgcagctctctctgcgcttactcttgttgtgcaatttaatgggtggctatcatttttcctcttgctttattataaacttcctctgcggccagaaactcacaagacatactatgaatacactggcttgtggcacatctatgggctccttgccatgaattcatggttctggagtgccatatatcacagttgtgacacaatttggacagaaaaagctatatttttcatcagatgctgcctttctaggattaatcattctggaacttgtactaacaattgaagcaagtggaggcatagcaccaattgtgtctgtgctgcagctctggatgtcagtagacaagaggtgtatcagagagaagcacttcaaggttaatttgttgagcaaattggagatgctggattttgtattttggttgctcatgggtggtgaatgatctgacgacttcagaagaggatagatctgagattacctttcatgcatgtcaaggaagttaagtagctgatgccatcaaagcaatggagaaacgtcaggtgaaccgcgagcagaattctgtggcgcatttgttagcgcagttagttaggactctgttcatacaactgttcgattaagccaaatacctaatttagttttatattggttgttgtcaaagaatttgtgaaatattgaggttgataatatatgtggcgttcgtttttatgtaatcattgttcactaatattttgtcgaatattttatattatatagacattactaagaacgtaaggggtcgctcgtgctctgtaaaggtacaaacaatcatgattgtggaggagcgtgacggcg

SEQ ID NO: 58154 - DNA, 2172 bp, Zea Mays
atgccttcagctgtgctgaagttgtttcacgtaggagccccacaggatggtacaggcaggaggatcaggccaccgtcgaggaacgcgctcttcgctgtgttccagcgagaagatgagggatcgagggcggcgcaggtggcgagctcgtgggcggaacagactggtgagagcaagaggatggatcaggagcttgagccccaggaggggagctgtttgagcggatgcccaccaggaacaatgtttcctagatcacgatgtttgggccacttttggaagaggtcagggatgacatgttttcaagcttggaggacatcaccaacgcaccatatgcagatctgctctctattaattcaatgaggaaaggaaaggggtcatagaaattagtcttggcagatggaggggaacgtctcaatgactgaggcacatttttactaaattatccctaaattatttgtatttttaaaataacatgtaatcttgttgatctggtttactcaagatgcatcaagtttgtacttggagaagaatcctggagttattttacttgtttccttgatttgtagagacatgccagtgaggagcagtttagtcggttcttgctttatgaagtggatgcaattagaaagacgtacgagcgggccaacatctcgcggtggctcgccttgggcaaccggacctgcccgaccacgatgcaggagctctaggacgacgccctcacccccaacgccactctccgacaactcatcgccgcctggttctcccgcctggtttctgcattttgttttcttatctgtcaatcatgtttttccatattactgcaggtgggtctgattaattatttaaatgtagtttatcttagatattgtttgaacgtatgggatgttggaggacagaagacaatcatgtcttactggagaaattactttgagcagactaatgggttagtttggtttgctgatagttcagacataaggaggcttgatgattgccgtgctgaactccacaatctcttgaaagaagaggataaaggtttacctatctaggcagtgttctattgttgatttttgcaaataagcaagacatgcaaggagctctaaaaccaactggaatcgcgaagagtcactctccgacagctcatcgccgcttggttctcctgtcggtacacaaggtttaagaagcgctacgcggacttccacggccgcgctgccgatctcgtccacggcctccggggcacggcgatgcccaggagacaggccctcgaggaagagcaatgtacagaagagaaaggtatctcgactattccaaagcacaagtatgcatccaaagcctgttccccaaaaggaacctttatctgcagctctctctgcgcttactcttgttgtgcaatttaatgggtggctatcatttttcctcttgctttattataaacttcctctgcggccagaaactcacaagacatactatgaatacactggcttgtggcacatctatgggctccttgccatgaattcatggttctggagtgccatatatcacagttgtgacacaatttggacagaaaaagctatatttttcatcagatgctgcctttctaggattaatcattctggaacttgtactaacaattgaagcaagtggaggcatagcaccaattgtgtctgtgctgcagctctggatgtcagtagacaagaggtgtatcagagagaagcacttcaaggttaatttgttgagcaaattggagatgctggattttgtattttggttgctcatgggtggtgaatgatctgacgacttcagaagaggatagatctgagattacctttcatgcatgtcaaggaagttaagtagctgatgccatcaaagcaatggagaaacgtcaggtgaaccgcgagcagaattctgtggcgcatttgttagcgcagttagttaggactctgttcatacaactgttcgattaagccaaatacctaatttagttttatattggttgttgtcaaagaatttgtgaaatattgaggttgataatatatgtggcgttcgtttttatgtaatcattgttcactaatattttgtcgaatattttatattatatagacattactaagaacgtaaggggtcgctcgtgctctgtaaaggtacaaacaatcatgattgtggaggagcgtgacggcg

SEQ ID NO: 58155 - DNA, 1937 bp, Zea Mays
atgccttcagctgtgctgaagttgtttcacgtaggagccccacaggatggtacaggcaggaggatcaggccaccgtcgaggaacgcgctcttcgctgtgttccagcgagaagatgagggatcgagggcggcgcaggtggcgagctcgtgggcggaacagactggtgagagcaagaggatggatcaggagcttgagccccagagacatgccagtgaggagcagtttagtcggttcttgctttatgaagtggatgcaattagaaagacgtacgagcgggccaacatctcgcggtggctcgccttgggcaaccggacctgcccgaccacgatgcaggagctctaggacgacgccctcacccccaacgccactctccgacaactcatcgccgcctggttctcccgcctggtttctgcattttgttttcttatctgtcaatcatgtttttccatattactgcaggtgggtctgattaattatttaaatgtagtttatcttagatattgtttgaacgtatgggatgttggaggacagaagacaatcatgtcttactggagaaattactttgagcagactaatgggttagtttggtttgctgatagttcagacataaggaggcttgatgattgccgtgctgaactccacaatctcttgaaagaagaggataaaggtttacctatctaggcagtgttctattgttgatttttgcaaataagcaagacatgcaaggagctctaaaaccaactggaatcgcgaagattttacttagttcgatgtgggagcaaaaggatatgccaaattgaatgtagtttcatcagttatgctctattatggatgttcagaggcatccaatttcagtgtgtactgcaatacttgggtccacctagtcactctccgacagctcatcgccgcttggttctcctgtcggtacacaaggtttaagaagcgctacgcggacttccacggccgcgctgccgatctcgtccacggcctccggggcacggcgatgcccaggagacaggccctcgaggaagagcaatgtacagaagagaaaggtatctcgactattccaaagcacaagtatgcatccaaagcctgttccccaaaaggaacctttatctgcagctctctctgcgcttactcttgttgtgcaatttaatgggtggctatcatttttcctcttgctttattataaacttcctctgcggccagaaactcacaagacatactatgaatacactggcttgtggcacatctatgggctccttgccatgaattcatggttctggagtgccatatatcacagttgtgacacaatttggacagaaaaagctatatttttcatcagatgctgcctttctaggattaatcattctggaacttgtactaacaattgaagcaagtggaggcatagcaccaattgtgtctgtgctgcagctctggatgtcagtagacaagaggtgtatcagagagaagcacttcaaggttaatttgttgagcaaattggagatgctggattttgtattttggttgctcatgggtggtgaatgatctgacgacttcagaagaggatagatctgagattacctttcatgcatgtcaaggaagttaagtagctgatgccatcaaagcaatggagaaacgtcaggtgaaccgcgagcagaattctgtggcgcatttgttagcgcagttagttaggactctgttcatacaactgttcgattaagccaaatacctaatttagttttatattggttgttgtcaaagaatttgtgaaatattgaggttgataatatatgtggcgttcgtttttatgtaatcattgttcactaatattttgtcgaatattttatattatatagacattactaagaacgtaaggggtcgctcgtgctctgtaaaggtacaaacaatcatgattgtggaggagcgtgacggcg

SEQ ID NO: 58156 - DNA, 1881 bp, Zea Mays
atgccttcagctgtgctgaagttgtttcacgtaggagccccacaggatggtacaggcaggaggatcaggccaccgtcgaggaacgcgctcttcgctgtgttccagcgagaagatgagggatcgagggcggcgcaggtggcgagctcgtgggcggaacagactggtgagagcaagaggatggatcaggagcttgagccccagagacatgccagtgaggagcagtttagtcggttcttgctttatgaagtggatgcaattagaaagacgtacgagcgggccaacatctcgcggtggctcgccttgggcaaccggacctgcccgaccacgatgcaggagctctaggacgacgccctcacccccaacgccactctccgacaactcatcgccgcctggttctcccgcctgtttatcttagatattgtttgaacgtatgggatgttggaggacagaagacaatcatgtcttactggagaaattactttgagcagactaatgggttagtttggtttgctgatagttcagacataaggaggcttgatgattgccgtgctgaactccacaatctcttgaaagaagaggataaaggtttacctatctaggcagtgttctattgttgatttttgcaaataagcaagacatgcaaggagctctaaaaccaactggaatcgcgaagattttacttagttcgatgtgggagcaaaaggatatgccaaattgaatgtagtttcatcagttatgctctattatggatgttcagaggcatccaatttcagtgtgtactgcaatacttgggtccacctagtcactctccgacagctcatcgccgcttggttctcctgtcggtacacaaggtttaagaagcgctacgcggacttccacggccgcgctgccgatctcgtccacggcctccggggcacggcgatgcccaggagacaggccctcgaggaagagcaatgtacagaagagaaaggtatctcgactattccaaagcacaagtatgcatccaaagcctgttccccaaaaggaacctttatctgcagctctctctgcgcttactcttgttgtgcaatttaatgggtggctatcatttttcctcttgctttattataaacttcctctgcggccagaaactcacaagacatactatgaatacactggcttgtggcacatctatgggctccttgccatgaattcatggttctggagtgccatatatcacagttgtgacacaatttggacagaaaaagctatatttttcatcagatgctgcctttctagggtattccctcattttgacgatagttgattaatcattctggaacttgtactaacaattgaagcaagtggaggcatagcaccaattgtgtctgtgctgcagctctggatgtcagtagacaagaggtgtatcagagagaagcacttcaaggttaatttgttgagcaaattggagatgctggattttgtattttggttgctcatgggtggtgaatgatctgacgacttcagaagaggatagatctgagattacctttcatgcatgtcaaggaagttaagtagctgatgccatcaaagcaatggagaaacgtcaggtgaaccgcgagcagaattctgtggcgcatttgttagcgcagttagttaggactctgttcatacaactgttcgattaagccaaatacctaatttagttttatattggttgttgtcaaagaatttgtgaaatattgaggttgataatatatgtggcgttcgtttttatgtaatcattgttcactaatattttgtcgaatattttatattatatagacattactaagaacgtaaggggtcgctcgtgctctgtaaaggtacaaacaatcatgattgtggaggagcgtgacggcg

SEQ ID NO: 58157 - DNA, 2180 bp, Zea Mays
atgccttcagctgtgctgaagttgtttcacgtaggagccccacaggatggtacaggcaggaggatcaggccaccgtcgaggaacgcgctcttcgctgtgttccagcgagaagatgagggatcgagggcggcgcaggtggcgagctcgtgggcggaacagactggtgagagcaagaggatggatcaggagcttgagccccagagacatgccagtgaggagcagtttagtcggttcttgctttatgaagtggatgcaattagaaagacgtacgagcgggccaacatctcgcggtggctcgccttgggcaaccggacctgcccgaccacgatgcaggagctctaggacgacgccctcacccccaacgccactctccgacaactcatcgccgcctggttctcccgcctggtttctgcattttgttttcttatctgtcaatcatgtttttccatattactgcaggtgggtctgattaattatttaaatgtagtttatcttagatattgtttgaacgtatgggatgttggaggacagaagacaatcatgtcttactggagaaattactttgagcagactaatgggttagtttggtttgctgatagttcagacataaggaggcttgatgattgccgtgctgaactccacaatctcttgaaagaagaggataaaggtttacctatctaggcagtgttctattgttgatttttgcaaataagcaagacatgcaaggagctctaaaaccaactggaatcgcgaaggtaagcgaacttcagtcatttattatatgcattagagacatgttttcctgtctatgacatcatttttaacttgtactgtgtttttccggtcctcatggttgccaagattttacttagttcgatgtgggagcaaaaggatatgccaaattgaatgtagtttcatcagttatgctctattatggatgttcagaggcatccaatttcagtgtgtactgcaatacttgggtccacctgtttaagaagcgctacgcggacttccacggccgcgctgccgatctcgtccacggcctccggggcacggcgatgcccaggagacaggccctcgaggaagagcaatgtacagaagagaaaggtatctcgactattccaaagcacaagtatgcatccaaagcctgttccccaaaaggaacctttatctgcagctctctctgcgcttactcttgttgtgcaatttaatgggtggctatcatttttcctcttgctttattataaacttcctctgcggccagaaactcacaagacatactatgaatacactggcttgtggcacatctatgggctccttgccatgaattcatggttctggagtgccatatatcacagttgtgacacaatttggacagaaaaagctatatttttcatcagatgctgcctttctagggtattccctcattttgacgatagttggtgagcatgtagtagcaagtttcatgggctctggtagattaactgacctttgtgtgttccattagcctgtgaagttcgaaactggtcatattgctaagaattctaggaggttactattagggcctagagtaaatgactacgtgctgatgaaaatctgttcagattaatcattctggaacttgtactaacaattgaagcaagtggaggcatagcaccaattgtgtctgtgctgcagctctggatgtcagtagacaagaggtgtatcagagagaagcacttcaaggttaatttgttgagcaaattggagatgctggattttgtattttggttgctcatgggtggtgaatgatctgacgacttcagaagaggatagatctgagattacctttcatgcatgtcaaggaagttaagtagctgatgccatcaaagcaatggagaaacgtcaggtgaaccgcgagcagaattctgtggcgcatttgttagcgcagttagttaggactctgttcatacaactgttcgattaagccaaatacctaatttagttttatattggttgttgtcaaagaatttgtgaaatattgaggttgataatatatgtggcgttcgtttttatgtaatcattgttcactaatattttgtcgaatattttatattatatagacattactaagaacgtaaggggtcgctcgtgctctgtaaaggtacaaacaatcatgattgtggaggagcgtgacggcg

SEQ ID NO: 58158 - DNA, 1998 bp, Zea Mays
atgccttcagctgtgctgaagttgtttcacgtaggagccccacaggatggtacaggcaggaggatcaggccaccgtcgaggaacgcgctcttcgctgtgttccagcgagaagatgagggatcgagggcggcgcaggtggcgagctcgtgggcggaacagactggtgagagcaagaggatggatcaggagcttgagccccagagacatgccagtgaggagcagtttagtcggttcttgctttatgaagtggatgcaattagaaagacgtacgagcgggccaacatctcgcggtggctcgccttgggcaaccggacctgcccgaccacgatgcaggagctctaggacgacgccctcacccccaacgccactctccgacaactcatcgccgcctggttctcccgcctggtttctgcattttgttttcttatctgtcaatcatgtttttccatattactgcaggtgggtctgattaattatttaaatgtagtttatcttagatattgtttgaacgtatgggatgttggaggacagaagacaatcatgtcttactggagaaattactttgagcagactaatgggttagtttggtttgctgatagttcagacataaggaggcttgatgattgccgtgctgaactccacaatctcttgaaagaagaggataaaggtttacctatctaggcagtgttctattgttgatttttgcaaataagcaagacatgcaaggagctctaaaaccaactggaatcgcgaagagtcactctccgacagctcatcgccgcttggttctcctgtcggtacacaaggtttaagaagcgctacgcggacttccacggccgcgctgccgatctcgtccacggcctccggggcacggcgatgcccaggagacaggccctcgaggaagagcaatgtacagaagagaaaggtatctcgactattccaaagcacaagtatgcatccaaagcctgttccccaaaaggaacctttatctgcagctctctctgcgcttactcttgttgtgcaatttaatgggtggctatcatttttcctcttgctttattataaacttcctctgcggccagaaactcacaagacatactatgaatacactggcttgtggcacatctatgggctccttgccatgaattcatggttctggagtgccatatatcacagttgtgacacaatttggacagaaaaagctatatttttcatcagatgctgcctttctagggtattccctcattttgacgatagttggtgagcatgtagtagcaagtttcatgggctctggtagattaactgacctttgtgtgttccattagcctgtgaagttcgaaactggtcatattgctaagaattctaggaggttactattagggcctagagtaaatgactacgtgctgatgaaaatctgttcagattaatcattctggaacttgtactaacaattgaagcaagtggaggcatagcaccaattgtgtctgtgctgcagctctggatgtcagtagacaagaggtgtatcagagagaagcacttcaaggttaatttgttgagcaaattggagatgctggattttgtattttggttgctcatgggtggtgaatgatctgacgacttcagaagaggatagatctgagattacctttcatgcatgtcaaggaagttaagtagctgatgccatcaaagcaatggagaaacgtcaggtgaaccgcgagcagaattctgtggcgcatttgttagcgcagttagttaggactctgttcatacaactgttcgattaagccaaatacctaatttagttttatattggttgttgtcaaagaatttgtgaaatattgaggttgataatatatgtggcgttcgtttttatgtaatcattgttcactaatattttgtcgaatattttatattatatagacattactaagaacgtaaggggtcgctcgtgctctgtaaaggtacaaacaatcatgattgtggaggagcgtgacggcg

SEQ ID NO: 58159 - DNA, 1658 bp, Zea Mays
atgccttcagctgtgctgaagttgtttcacgtaggagccccacaggatggtacaggcaggaggatcaggccaccgtcgaggaacgcgctcttcgctgtgttccagcgagaagatgagggatcgagggcggcgcaggtggcgagctcgtgggcggaacagactggtgagagcaagaggatggatcaggagcttgagccccagagacatgccagtgaggagcagtttagtcggttcttgctttatgaagtggatgcaattagaaagacgtacgagcgggccaacatctcgcggtggctcgccttgggcaaccggacctgcccgaccacgatgcaggagctctaggacgacgccctcacccccaacgccactctccgacaactcatcgccgcctggttctcccgcctgtttatcttagatattgtttgaacgtatgggatgttggaggacagaagacaatcatgtcttactggagaaattactttgagcagactaatgggttagtttggtttgctgatagttcagacataaggaggcttgatgattgccgtgctgaactccacaatctcttgaaagaagaggataaaggtttacctatctaggcagtgttctattgttgatttttgcaaataagcaagacatgcaaggagctctaaaaccaactggaatcgcgaagagtcactctccgacagctcatcgccgcttggttctcctgtcggtacacaaggtttaagaagcgctacgcggacttccacggccgcgctgccgatctcgtccacggcctccggggcacggcgatgcccaggagacaggccctcgaggaagagcaatgtacagaagagaaaggtatctcgactattccaaagcacaagtatgcatccaaagcctgttccccaaaaggaacctttatctgcagctctctctgcgcttactcttgttgtgcaatttaatgggtggctatcatttttcctcttgctttattataaacttcctctgcggccagaaactcacaagacatactatgaatacactggcttgtggcacatctatgggctccttgccatgaattcatggttctggagtgccatatatcacagttgtgacacaatttggacagaaaaagctatatttttcatcagatgctgcctttctagggtattccctcattttgacgatagttggtgtatcagagagaagcacttcaaggttaatttgttgagcaaattggagatgctggattttgtattttggttgctcatgggtggtgaatgatctgacgacttcagaagaggatagatctgagattacctttcatgcatgtcaaggaagttaagtagctgatgccatcaaagcaatggagaaacgtcaggtgaaccgcgagcagaattctgtggcgcatttgttagcgcagttagttaggactctgttcatacaactgttcgattaagccaaatacctaatttagttttatattggttgttgtcaaagaatttgtgaaatattgaggttgataatatatgtggcgttcgtttttatgtaatcattgttcactaatattttgtcgaatattttatattatatagacattactaagaacgtaaggggtcgctcgtgctctgtaaaggtacaaacaatcatgattgtggaggagcgtgacggcg

SEQ ID NO: 58160 - DNA, 2336 bp, Zea Mays
cccgcctattgccttgcctgccccttccatcctccttccccacccctccttccatcctcgcccgcgcgctccacacgtccccgccgtcgcgctcgccttccatcctcctccccaccccctccttccatcctcgctcgcgcgctccgcatgtccccgccgtcgcgctcgcctccctcctctttgttgcctccgcgtcggcctccaccccgctctccgacacgcttgccgtcgtcttggatttctggtgcactctcttctctacgacgcgagcaagggcggcgcttgccatggcatcgacgggaaccaggatggtacaggcaggaggatcaggccaccgtcgaggaacgcgctcttcgctgtgttccagcgagaagatgagggatcgagggcggcgcaggtggcgagctcgtgggcggaacagactggtgagagcaagaggatggatcaggagcttgagccccaggaggggagctgtttgagcggatgcccaccaggaacaatgtttcctagatcacgatgtttgggccacttttggaagaggtcagggatgacatgttttcaagcttggaggacatcaccaacgcaccatatgcagatctgctctctattaattcaatgaggaaaggaaaggggtcatagaaattagtcttggcagatggaggggaacgtctcaatgactgagagacatgccagtgaggagcagtttagtcggttcttgctttatgaagtggatgcaattagaaagacgtacgagcgggccaacatctcgcggtggctcgccttgggcaaccggacctgcccgaccacgatgcaggagctctaggacgacgccctcacccccaacgccactctccgacaactcatcgccgcctggttctcccgcctgtttatcttagatattgtttgaacgtatgggatgttggaggacagaagacaatcatgtcttactggagaaattactttgagcagactaatgggttagtttggtttgctgatagttcagacataaggaggcttgatgattgccgtgctgaactccacaatctcttgaaagaagaggataaaggtttacctatctaggcagtgttctattgttgatttttgcaaataagcaagacatgcaaggagctctaaaaccaactggaatcgcgaagattttacttagttcgatgtgggagcaaaaggatatgccaaattgaatgtagtttcatcagttatgctctattatggatgttcagaggcatccaatttcagtgtgtactgcaatacttgggtccacctagtcactctccgacagctcatcgccgcttggttctcctgtcggtacacaaggtttaagaagcgctacgcggacttccacggccgcgctgccgatctcgtccacggcctccggggcacggcgatgcccaggagacaggccctcgaggaagagcaatgtacagaagagaaaggtatctcgactattccaaagcacaagtatgcatccaaagcctgttccccaaaaggaacctttatctgcagctctctctgcgcttactcttgttgtgcaatttaatgggtggctatcatttttcctcttgctttattataaacttcctctgcggccagaaactcacaagacatactatgaatacactggcttgtggcacatctatgggctccttgccatgaattcatggttctggagtgccatatatcacagttgtgacacaatttggacagaaaaagctatatttttcatcagatgctgcctttctaggattaatcattctggaacttgtactaacaattgaagcaagtggaggcatagcaccaattgtgtctgtgctgcagctctggatgtcagtagacaagaggtgtatcagagagaagcacttcaaggttaatttgttgagcaaattggagatgctggattttgtattttggttgctcatgggtggtgaatgatctgacgacttcagaagaggatagatctgagattacctttcatgcatgtcaaggaagttaagtagctgatgccatcaaagcaatggagaaacgtcaggtgaaccgcgagcagaattctgtggcgcatttgttagcgcagttagttaggactctgttcatacaactgttcgattaagccaaatacctaatttagttttatattggttgttgtcaaagaatttgtgaaatattgaggttgataatatatgtggcgttcgtttttatgtaatcattgttcactaatattttgtcgaatattttatattatatagacattactaagaacgtaaggggtcgctcgtgctctgtaaaggtacaaacaatcatgattgtggaggagcgtgacggcg

SEQ ID NO: 58161 - DNA, 2826 bp, Zea Mays
gcctattgccttgcctgccccttccatcctccttccccacccctccttccatcctcgcccgcgcgctccacacgtccccgccgtcgcgctcgccttccatcctcctccccaccccctccttccatcctcgctcgcgcgctccgcatgtccccgccgtcgcgctcgcctccctcctctttgttgcctccgcgtcggcctccaccccgctctccgacacgcttgccgtcgtcttggatttctggtgcactctcttctctacgacgcgagcaagggcggcgcttgccatggcatcgacgggaaccaggatggtacaggcaggaggatcaggccaccgtcgaggaacgcgctcttcgctgtgttccagcgagaagatgagggatcgagggcggcgcaggtggcgagctcgtgggcggaacagactggtgagagcaagaggatggatcaggagcttgagccccaggaggggagctgtttgagcggatgcccaccaggaacaatgtttcctagatcacgatgtttgggccacttttggaagaggtcagggatgacatgttttcaagcttggaggacatcaccaacgcaccatatgcagatctgctctctattaattcaatgaggaaaggaaaggggtcatagaaattagtcttggcagatggaggggaacgtctcaatgactgaggcacatttttactaaattatccctaaattatttgtatttttaaaataacatgtaatcttgttgatctggtttactcaagatgcatcaagtttgtacttggagaagaatcctggagttattttacttgtttccttgatttgtagagacatgccagtgaggagcagtttagtcggttcttgctttatgaagtggatgcaattagaaagacgtacgagcgggccaacatctcgcggtggctcgccttgggcaaccggacctgcccgaccacgatgcaggagctctaggacgacgccctcacccccaacgccactctccgacaactcatcgccgcctggttctcccgcctgtttatcttagatattgtttgaacgtatgggatgttggaggacagaagacaatcatgtcttactggagaaattactttgagcagactaatgggttagtttggtttgctgatagttcagacataaggaggcttgatgattgccgtgctgaactccacaatctcttgaaagaagaggataaaggtttacctatctaggcagtgttctattgttgatttttgcaaataagcaagacatgcaaggagctctaaaaccaactggaatcgcgaagattttacttagttcgatgtgggagcaaaaggatatgccaaattgaatgtagtttcatcagttatgctctattatggatgttcagaggcatccaatttcagtgtgtactgcaatacttgggtccacctagtcactctccgacagctcatcgccgcttggttctcctgtcggtacacaaggtttaagaagcgctacgcggacttccacggccgcgctgccgatctcgtccacggcctccggggcacggcgatgcccaggagacaggccctcgaggaagagcaatgtacagaagagaaaggtatctcgactattccaaagcacaagtatgcatccaaagcctgttccccaaaaggtgcgtgaactttgttcttgattttgtcagactaaatgtgggtgaactttgtactgcagtttttgtttaaataaactttggactgtttaaattactgatgcatccaaccactgtttttctttattgtttgttgatacacgaccagatgcccagttgagttcacccaaaaggtttattacaacacgaaaaaatctgagataaaatgttttttatttaaatgaactttgtattgcagtatttatagacatattttggcacccggtcgtttactatttttgttttattaatacctcttgtgtttccctttcacttcctttgtataaactgtatgcctctgttttcattctcaggaacctttatctgcagctctctctgcgcttactcttgttgtgcaatttaatgggtggctatcatttttcctcttgctttattataaacttcctctgcggccagaaactcacaagacatactatgaatacactggcttgtggcacatctatgggctccttgccatgaattcatggttctggagtgccatatatcacagttgtgacacaatttggacagaaaaagctatatttttcatcagatgctgcctttctaggattaatcattctggaacttgtactaacaattgaagcaagtggaggcatagcaccaattgtgtctgtgctgcagctctggatgtcagtagacaagaggtgtatcagagagaagcacttcaaggttaatttgttgagcaaattggagatgctggattttgtattttggttgctcatgggtggtgaatgatctgacgacttcagaagaggatagatctgagattacctttcatgcatgtcaaggaagttaagtagctgatgccatcaaagcaatggagaaacgtcaggtgaaccgcgagcagaattctgtggcgcatttgttagcgcagttagttaggactctgttcatacaactgttcgattaagccaaatacctaatttagttttatattggttgttgtcaaagaatttgtgaaatattgaggttgataatatatgtggcgttcgtttttatgtaatcattgttcactaatattttgtcgaatattttatattatatagacattactaagaacgtaaggggtcgctcgtgctctgtaaaggtacaaacaatcatgattgtggaggagcgtgacggcg

SEQ ID NO: 58162 - DNA, 2457 bp, Zea Mays
gcctattgccttgcctgccccttccatcctccttccccacccctccttccatcctcgcccgcgcgctccacacgtccccgccgtcgcgctcgccttccatcctcctccccaccccctccttccatcctcgctcgcgcgctccgcatgtccccgccgtcgcgctcgcctccctcctctttgttgcctccgcgtcggcctccaccccgctctccgacacgcttgccgtcgtcttggatttctggtgcactctcttctctacgacgcgagcaagggcggcgcttgccatggcatcgacgggaaccaggatggtacaggcaggaggatcaggccaccgtcgaggaacgcgctcttcgctgtgttccagcgagaagatgagggatcgagggcggcgcaggtggcgagctcgtgggcggaacagactggtgagagcaagaggatggatcaggagcttgagccccaggaggggagctgtttgagcggatgcccaccaggaacaatgtttcctagatcacgatgtttgggccacttttggaagaggtcagggatgacatgttttcaagcttggaggacatcaccaacgcaccatatgcagatctgctctctattaattcaatgaggaaaggaaaggggtcatagaaattagtcttggcagatggaggggaacgtctcaatgactgaggcacatttttactaaattatccctaaattatttgtatttttaaaataacatgtaatcttgttgatctggtttactcaagatgcatcaagtttgtacttggagaagaatcctggagttattttacttgtttccttgatttgtagagacatgccagtgaggagcagtttagtcggttcttgctttatgaagtggatgcaattagaaagacgtacgagcgggccaacatctcgcggtggctcgccttgggcaaccggacctgcccgaccacgatgcaggagctctaggacgacgccctcacccccaacgccactctccgacaactcatcgccgcctggttctcccgcctggtttctgcattttgttttcttatctgtcaatcatgtttttccatattactgcaggtgggtctgattaattatttaaatgtagtttatcttagatattgtttgaacgtatgggatgttggaggacagaagacaatcatgtcttactggagaaattactttgagcagactaatgggttagtttggtttgctgatagttcagacataaggaggcttgatgattgccgtgctgaactccacaatctcttgaaagaagaggataaaggtttacctatctaggcagtgttctattgttgatttttgcaaataagcaagacatgcaaggagctctaaaaccaactggaatcgcgaagagtcactctccgacagctcatcgccgcttggttctcctgtcggtacacaaggtttaagaagcgctacgcggacttccacggccgcgctgccgatctcgtccacggcctccggggcacggcgatgcccaggagacaggccctcgaggaagagcaatgtacagaagagaaaggtatctcgactattccaaagcacaagtatgcatccaaagcctgttccccaaaaggaacctttatctgcagctctctctgcgcttactcttgttgtgcaatttaatgggtggctatcatttttcctcttgctttattataaacttcctctgcggccagaaactcacaagacatactatgaatacactggcttgtggcacatctatgggctccttgccatgaattcatggttctggagtgccatatatcacagttgtgacacaatttggacagaaaaagctatatttttcatcagatgctgcctttctagggtattccctcattttgacgatagttgattaatcattctggaacttgtactaacaattgaagcaagtggaggcatagcaccaattgtgtctgtgctgcagctctggatgtcagtagacaagaggtgtatcagagagaagcacttcaaggttaatttgttgagcaaattggagatgctggattttgtattttggttgctcatgggtggtgaatgatctgacgacttcagaagaggatagatctgagattacctttcatgcatgtcaaggaagttaagtagctgatgccatcaaagcaatggagaaacgtcaggtgaaccgcgagcagaattctgtggcgcatttgttagcgcagttagttaggactctgttcatacaactgttcgattaagccaaatacctaatttagttttatattggttgttgtcaaagaatttgtgaaatattgaggttgataatatatgtggcgttcgtttttatgtaatcattgttcactaatattttgtcgaatattttatattatatagacattactaagaacgtaaggggtcgctcgtgctctgtaaaggtacaaacaatcatgattgtggaggagcgtgacggcg

SEQ ID NO: 58163 - DNA, 2875 bp, Zea Mays
gcctattgccttgcctgccccttccatcctccttccccacccctccttccatcctcgcccgcgcgctccacacgtccccgccgtcgcgctcgccttccatcctcctccccaccccctccttccatcctcgctcgcgcgctccgcatgtccccgccgtcgcgctcgcctccctcctctttgttgcctccgcgtcggcctccaccccgctctccgacacgcttgccgtcgtcttggatttctggtgcactctcttctctacgacgcgagcaagggcggcgcttgccatggcatcgacgggaaccaggcatcactctccctatctcttgggatggtacaggcaggaggatcaggccaccgtcgaggaacgcgctcttcgctgtgttccagcgagaagatgagggatcgagggcggcgcaggtggcgagctcgtgggcggaacagactggtgagagcaagaggatggatcaggagcttgagccccaggaggggagctgtttgagcggatgcccaccaggaacaatgtttcctagatcacgatgtttgggccacttttggaagaggtcagggatgacatgttttcaagcttggaggacatcaccaacgcaccatatgcagatctgctctctattaattcaatgaggaaaggaaaggggtcatagaaattagtcttggcagatggaggggaacgtctcaatgactgaggcacatttttactaaattatccctaaattatttgtatttttaaaataacatgtaatcttgttgatctggtttactcaagatgcatcaagtttgtacttggagaagaatcctggagttattttacttgtttccttgatttgtagagacatgccagtgaggagcagtttagtcggttcttgctttatgaagtggatgcaattagaaagacgtacgagcgggccaacatctcgcggtggctcgccttgggcaaccggacctgcccgaccacgatgcaggagctctaggacgacgccctcacccccaacgccactctccgacaactcatcgccgcctggttctcccgcctgtttatcttagatattgtttgaacgtatgggatgttggaggacagaagacaatcatgtcttactggagaaattactttgagcagactaatgggttagtttggtttgctgatagttcagacataaggaggcttgatgattgccgtgctgaactccacaatctcttgaaagaagaggataaaggtttacctatctaggcagtgttctattgttgatttttgcaaataagcaagacatgcaaggagctctaaaaccaactggaatcgcgaagattttacttagttcgatgtgggagcaaaaggatatgccaaattgaatgtagtttcatcagttatgctctattatggatgttcagaggcatccaatttcagtgtgtactgcaatacttgggtccacctagtcactctccgacagctcatcgccgcttggttctcctgtcggtacacaaggtttaagaagcgctacgcggacttccacggccgcgctgccgatctcgtccacggcctccggggcacggcgatgcccaggagacaggccctcgaggaagagcaatgtacagaagagaaaggtatctcgactattccaaagcacaagtatgcatccaaagcctgttccccaaaaggtgcgtgaactttgttcttgattttgtcagactaaatgtgggtgaactttgtactgcagtttttgtttaaataaactttggactgtttaaattactgatgcatccaaccactgtttttctttattgtttgttgatacacgaccagatgcccagttgagttcacccaaaaggtttattacaacacgaaaaaatctgagataaaatgttttttatttaaatgaactttgtattgcagtatttatagacatattttggcacccggtcgtttactatttttgttttattaatacctcttgtgtttccctttcacttcctttgtataaactgtatgcctctgttttcattctcaggaacctttatctgcagctctctctgcgcttactcttgttgtgcaatttaatgggtggctatcatttttcctcttgctttattataaacttcctctgcggccagaaactcacaagacatactatgaatacactggcttgtggcacatctatgggctccttgccatgaattcatggttctggagtgccatatatcacagttgtgacacaatttggacagaaaaagctatatttttcatcagatgctgcctttctagggtattccctcattttgacgatagttgattaatcattctggaacttgtactaacaattgaagcaagtggaggcatagcaccaattgtgtctgtgctgcagctctggatgtcagtagacaagaggtgtatcagagagaagcacttcaaggttaatttgttgagcaaattggagatgctggattttgtattttggttgctcatgggtggtgaatgatctgacgacttcagaagaggatagatctgagattacctttcatgcatgtcaaggaagttaagtagctgatgccatcaaagcaatggagaaacgtcaggtgaaccgcgagcagaattctgtggcgcatttgttagcgcagttagttaggactctgttcatacaactgttcgattaagccaaatacctaatttagttttatattggttgttgtcaaagaatttgtgaaatattgaggttgataatatatgtggcgttcgtttttatgtaatcattgttcactaatattttgtcgaatattttatattatatagacattactaagaacgtaaggggtcgctcgtgctctgtaaaggtacaaacaatcatgattgtggaggagcgtgacggcg

SEQ ID NO: 58164 - DNA, 3023 bp, Zea Mays
gcctattgccttgcctgccccttccatcctccttccccacccctccttccatcctcgcccgcgcgctccacacgtccccgccgtcgcgctcgccttccatcctcctccccaccccctccttccatcctcgctcgcgcgctccgcatgtccccgccgtcgcgctcgcctccctcctctttgttgcctccgcgtcggcctccaccccgctctccgacacgcttgccgtcgtcttggatttctggtgcactctcttctctacgacgcgagcaagggcggcgcttgccatggcatcgacgggaaccaggatggtacaggcaggaggatcaggccaccgtcgaggaacgcgctcttcgctgtgttccagcgagaagatgagggatcgagggcggcgcaggtggcgagctcgtgggcggaacagactggtgagagcaagaggatggatcaggagcttgagccccaggaggggagctgtttgagcggatgcccaccaggaacaatgtttcctagatcacgatgtttgggccacttttggaagaggtcagggatgacatgttttcaagcttggaggacatcaccaacgcaccatatgcagatctgctctctattaattcaatgaggaaaggaaaggggtcatagaaattagtcttggcagatggaggggaacgtctcaatgactgaggcacatttttactaaattatccctaaattatttgtatttttaaaataacatgtaatcttgttgatctggtttactcaagatgcatcaagtttgtacttggagaagaatcctggagttattttacttgtttccttgatttgtagagacatgccagtgaggagcagtttagtcggttcttgctttatgaagtggatgcaattagaaagacgtacgagcgggccaacatctcgcggtggctcgccttgggcaaccggacctgcccgaccacgatgcaggagctctaggacgacgccctcacccccaacgccactctccgacaactcatcgccgcctgtttatcttagatattgtttgaacgtatgggatgttggaggacagaagacaatcatgtcttactggagaaattactttgagcagactaatgggttagtttggtttgctgatagttcagacataaggaggcttgatgattgccgtgctgaactccacaatctcttgaaagaagaggataaaggtttacctatctaggcagtgttctattgttgatttttgcaaataagcaagacatgcaaggagctctaaaaccaactggaatcgcgaaggtaagcgaacttcagtcatttattatatgcattagagacatgttttcctgtctatgacatcatttttaacttgtactgtgtttttccggtcctcatggttgccaagattttacttagttcgatgtgggagcaaaaggatatgccaaattgaatgtagtttcatcagttatgctctattatggatgttcagaggcatccaatttcagtgtgtactgcaatacttgggtccacctgtacgtggtagatgttctgcattttgttttcttataaattagatttggcttccattatgttgttctcttttggaacagagtcactctccgacagctcatcgccgcttggttctcctgtcggtacacaaggtttaagaagcgctacgcggacttccacggccgcgctgccgatctcgtccacggcctccggggcacggcgatgcccaggagacaggccctcgaggaagagcaatgtacagaagagaaaggtatctcgactattccaaagcacaagtatgcatccaaagcctgttccccaaaaggtgcgtgaactttgttcttgattttgtcagactaaatgtgggtgaactttgtactgcagtttttgtttaaataaactttggactgtttaaattactgatgcatccaaccactgtttttctttattgtttgttgatacacgaccagatgcccagttgagttcacccaaaaggtttattacaacacgaaaaaatctgagataaaatgttttttatttaaatgaactttgtattgcagtatttatagacatattttggcacccggtcgtttactatttttgttttattaatacctcttgtgtttccctttcacttcctttgtataaactgtatgcctctgttttcattctcaggaacctttatctgcagctctctctgcgcttactcttgttgtgcaatttaatgggtggctatcatttttcctcttgctttattataaacttcctctgcggccagaaactcacaagacatactatgaatacactggcttgtggcacatctatgggctccttgccatgaattcatggttctggagtgccatatatcacagttgtgacacaatttggacagaaaaagctatatttttcatcagatgctgcctttctagggtattccctcattttgacgatagttgattaatcattctggaacttgtactaacaattgaagcaagtggaggcatagcaccaattgtgtctgtgctgcagctctggatgtcagtagacaagaggtgtatcagagagaagcacttcaaggttaatttgttgagcaaattggagatgctggattttgtattttggttgctcatgggtggtgaatgatctgacgacttcagaagaggatagatctgagattacctttcatgcatgtcaaggaagttaagtagctgatgccatcaaagcaatggagaaacgtcaggtgaaccgcgagcagaattctgtggcgcatttgttagcgcagttagttaggactctgttcatacaactgttcgattaagccaaatacctaatttagttttatattggttgttgtcaaagaatttgtgaaatattgaggttgataatatatgtggcgttcgtttttatgtaatcattgttcactaatattttgtcgaatattttatattatatagacattactaagaacgtaaggggtcgctcgtgctctgtaaaggtacaaacaatcatgattgtggaggagcgtgacggcg

SEQ ID NO: 58165 - DNA, 3139 bp, Zea Mays
gcctattgccttgcctgccccttccatcctccttccccacccctccttccatcctcgcccgcgcgctccacacgtccccgccgtcgcgctcgccttccatcctcctccccaccccctccttccatcctcgctcgcgcgctccgcatgtccccgccgtcgcgctcgcctccctcctctttgttgcctccgcgtcggcctccaccccgctctccgacacgcttgccgtcgtcttggatttctggtgcactctcttctctacgacgcgagcaagggcggcgcttgccatggcatcgacgggaaccaggcatcactctccctatctcttgggtacgcgtttatttcatctctagggtctagagtttagtagcaccgccgccaacatccccgccgttgcgacaagcaccgaccgctcgcttccccctccctcctctcgtcggcgccaacgagccgcatgccgtgtgtcgtgtgggtcggctacccgggtatcggcgccagcgagccctcgccccccatccccctgccaatctcggcgtcggcgcgccgctcgccatccccgcaggccacgcccatgcccccgcctccatagtccctgtcatcggcgacctcagatccaacaggatggtacaggcaggaggatcaggccaccgtcgaggaacgcgctcttcgctgtgttccagcgagaagatgagggatcgagggcggcgcaggtggcgagctcgtgggcggaacagactggtgagagcaagaggatggatcaggagcttgagccccaggaggggagctgtttgagcggatgcccaccaggaacaatgtttcctagatcacgatgtttgggccacttttggaagaggtcagggatgacatgttttcaagcttggaggacatcaccaacgcaccatatgcagatctgctctctattaattcaatgaggaaaggaaaggggtcatagaaattagtcttggcagatggaggggaacgtctcaatgactgaggcacatttttactaaattatccctaaattatttgtatttttaaaataacatgtaatcttgttgatctggtttactcaagatgcatcaagtttgtacttggagaagaatcctggagttattttacttgtttccttgatttgtagagacatgccagtgaggagcagtttagtcggttcttgctttatgaagtggatgcaattagaaagacgtacgagcgggccaacatctcgcggtggctcgccttgggcaaccggacctgcccgaccacgatgcaggagctctaggacgacgccctcacccccaacgccactctccgacaactcatcgccgcctggttctcccgcctgtttatcttagatattgtttgaacgtatgggatgttggaggacagaagacaatcatgtcttactggagaaattactttgagcagactaatgggttagtttggtttgctgatagttcagacataaggaggcttgatgattgccgtgctgaactccacaatctcttgaaagaagaggataaaggtttacctatctaggcagtgttctattgttgatttttgcaaataagcaagacatgcaaggagctctaaaaccaactggaatcgcgaagattttacttagttcgatgtgggagcaaaaggatatgccaaattgaatgtagtttcatcagttatgctctattatggatgttcagaggcatccaatttcagtgtgtactgcaatacttgggtccacctagtcactctccgacagctcatcgccgcttggttctcctgtcggtacacaaggtttaagaagcgctacgcggacttccacggccgcgctgccgatctcgtccacggcctccggggcacggcgatgcccaggagacaggccctcgaggaagagcaatgtacagaagagaaaggtatctcgactattccaaagcacaagtatgcatccaaagcctgttccccaaaaggtgcgtgaactttgttcttgattttgtcagactaaatgtgggtgaactttgtactgcagtttttgtttaaataaactttggactgtttaaattactgatgcatccaaccactgtttttctttattgtttgttgatacacgaccagatgcccagttgagttcacccaaaaggtttattacaacacgaaaaaatctgagataaaatgttttttatttaaatgaactttgtattgcagtatttatagacatattttggcacccggtcgtttactatttttgttttattaatacctcttgtgtttccctttcacttcctttgtataaactgtatgcctctgttttcattctcaggaacctttatctgcagctctctctgcgcttactcttgttgtgcaatttaatgggtggctatcatttttcctcttgctttattataaacttcctctgcggccagaaactcacaagacatactatgaatacactggcttgtggcacatctatgggctccttgccatgaattcatggttctggagtgccatatatcacagttgtgacacaatttggacagaaaaagctatatttttcatcagatgctgcctttctaggattaatcattctggaacttgtactaacaattgaagcaagtggaggcatagcaccaattgtgtctgtgctgcagctctggatgtcagtagacaagaggtgtatcagagagaagcacttcaaggttaatttgttgagcaaattggagatgctggattttgtattttggttgctcatgggtggtgaatgatctgacgacttcagaagaggatagatctgagattacctttcatgcatgtcaaggaagttaagtagctgatgccatcaaagcaatggagaaacgtcaggtgaaccgcgagcagaattctgtggcgcatttgttagcgcagttagttaggactctgttcatacaactgttcgattaagccaaatacctaatttagttttatattggttgttgtcaaagaatttgtgaaatattgaggttgataatatatgtggcgttcgtttttatgtaatcattgttcactaatattttgtcgaatattttatattatatagacattactaagaacgtaaggggtcgctcgtgctctgtaaaggtacaaacaatcatgattgtggaggagcgtgacggcg

SEQ ID NO: 58166 - DNA, 2227 bp, Zea Mays
gcctattgccttgcctgccccttccatcctccttccccacccctccttccatcctcgcccgcgcgctccacacgtccccgccgtcgcgctcgccttccatcctcctccccaccccctccttccatcctcgctcgcgcgctccgcatgtccccgccgtcgcgctcgcctccctcctctttgttgcctccgcgtcggcctccaccccgctctccgacacgcttgccgtcgtcttggatttctggtgcactctcttctctacgacgcgagcaagggcggcgcttgccatggcatcgacgggaaccaggcatcactctccctatctcttgggatggtacaggcaggaggatcaggccaccgtcgaggaacgcgctcttcgctgtgttccagcgagaagatgagggatcgagggcggcgcaggtggcgagctcgtgggcggaacagactggtgagagcaagaggatggatcaggagcttgagccccagagacatgccagtgaggagcagtttagtcggttcttgctttatgaagtggatgcaattagaaagacgtacgagcgggccaacatctcgcggtggctcgccttgggcaaccggacctgcccgaccacgatgcaggagctctaggacgacgccctcacccccaacgccactctccgacaactcatcgccgcctggttctcccgcctggtttctgcattttgttttcttatctgtcaatcatgtttttccatattactgcaggtgggtctgattaattatttaaatgtagtttatcttagatattgtttgaacgtatgggatgttggaggacagaagacaatcatgtcttactggagaaattactttgagcagactaatgggttagtttggtttgctgatagttcagacataaggaggcttgatgattgccgtgctgaactccacaatctcttgaaagaagaggataaaggtttacctatctaggcagtgttctattgttgatttttgcaaataagcaagacatgcaaggagctctaaaaccaactggaatcgcgaagattttacttagttcgatgtgggagcaaaaggatatgccaaattgaatgtagtttcatcagttatgctctattatggatgttcagaggcatccaatttcagtgtgtactgcaatacttgggtccacctgtacgtggtagatgttctgcattttgttttcttataaattagatttggcttccattatgttgttctcttttggaacagagtcactctccgacagctcatcgccgcttggttctcctgtcggtacacaaggtttaagaagcgctacgcggacttccacggccgcgctgccgatctcgtccacggcctccggggcacggcgatgcccaggagacaggccctcgaggaagagcaatgtacagaagagaaaggtatctcgactattccaaagcacaagtatgcatccaaagcctgttccccaaaaggaacctttatctgcagctctctctgcgcttactcttgttgtgcaatttaatgggtggctatcatttttcctcttgctttattataaacttcctctgcggccagaaactcacaagacatactatgaatacactggcttgtggcacatctatgggctccttgccatgaattcatggttctggagtgccatatatcacagttgtgacacaatttggacagaaaaagctatatttttcatcagatgctgcctttctagggtattccctcattttgacgatagttggtgtatcagagagaagcacttcaaggttaatttgttgagcaaattggagatgctggattttgtattttggttgctcatgggtggtgaatgatctgacgacttcagaagaggatagatctgagattacctttcatgcatgtcaaggaagttaagtagctgatgccatcaaagcaatggagaaacgtcaggtgaaccgcgagcagaattctgtggcgcatttgttagcgcagttagttaggactctgttcatacaactgttcgattaagccaaatacctaatttagttttatattggttgttgtcaaagaatttgtgaaatattgaggttgataatatatgtggcgttcgtttttatgtaatcattgttcactaatattttgtcgaatattttatattatatagacattactaagaacgtaaggggtcgctcgtgctctgtaaaggtacaaacaatcatgattgtggaggagcgtgacggcg

SEQ ID NO: 58167 - DNA, 2515 bp, Zea Mays
gcctattgccttgcctgccccttccatcctccttccccacccctccttccatcctcgcccgcgcgctccacacgtccccgccgtcgcgctcgccttccatcctcctccccaccccctccttccatcctcgctcgcgcgctccgcatgtccccgccgtcgcgctcgcctccctcctctttgttgcctccgcgtcggcctccaccccgctctccgacacgcttgccgtcgtcttggatttctggtgcactctcttctctacgacgcgagcaagggcggcgcttgccatggcatcgacgggaaccaggcatcactctccctatctcttgggatggtacaggcaggaggatcaggccaccgtcgaggaacgcgctcttcgctgtgttccagcgagaagatgagggatcgagggcggcgcaggtggcgagctcgtgggcggaacagactggtgagagcaagaggatggatcaggagcttgagccccaggaggggagctgtttgagcggatgcccaccaggaacaatgtttcctagatcacgatgtttgggccacttttggaagaggtcagggatgacatgttttcaagcttggaggacatcaccaacgcaccatatgcagatctgctctctattaattcaatgaggaaaggaaaggggtcatagaaattagtcttggcagatggaggggaacgtctcaatgactgaggcacatttttactaaattatccctaaattatttgtatttttaaaataacatagacatgccagtgaggagcagtttagtcggttcttgctttatgaagtggatgcaattagaaagacgtacgagcgggccaacatctcgcggtggctcgccttgggcaaccggacctgcccgaccacgatgcaggagctctaggacgacgccctcacccccaacgccactctccgacaactcatcgccgcctggttctcccgcctggtttctgcattttgttttcttatctgtcaatcatgtttttccatattactgcaggtgggtctgattaattatttaaatgtagtttatcttagatattgtttgaacgtatgggatgttggaggacagaagacaatcatgtcttactggagaaattactttgagcagactaatgggttagtttggtttgctgatagttcagacataaggaggcttgatgattgccgtgctgaactccacaatctcttgaaagaagaggataaaggtttacctatctaggcagtgttctattgttgatttttgcaaataagcaagacatgcaaggagctctaaaaccaactggaatcgcgaagattttacttagttcgatgtgggagcaaaaggatatgccaaattgaatgtagtttcatcagttatgctctattatggatgttcagaggcatccaatttcagtgtgtactgcaatacttgggtccacctagtcactctccgacagctcatcgccgcttggttctcctgtcggtacacaaggtttaagaagcgctacgcggacttccacggccgcgctgccgatctcgtccacggcctccggggcacggcgatgcccaggagacaggccctcgaggaagagcaatgtacagaagagaaaggtatctcgactattccaaagcacaagtatgcatccaaagcctgttccccaaaaggaacctttatctgcagctctctctgcgcttactcttgttgtgcaatttaatgggtggctatcatttttcctcttgctttattataaacttcctctgcggccagaaactcacaagacatactatgaatacactggcttgtggcacatctatgggctccttgccatgaattcatggttctggagtgccatatatcacagttgtgacacaatttggacagaaaaagctatatttttcatcagatgctgcctttctagggtattccctcattttgacgatagttgattaatcattctggaacttgtactaacaattgaagcaagtggaggcatagcaccaattgtgtctgtgctgcagctctggatgtcagtagacaagaggtgtatcagagagaagcacttcaaggttaatttgttgagcaaattggagatgctggattttgtattttggttgctcatgggtggtgaatgatctgacgacttcagaagaggatagatctgagattacctttcatgcatgtcaaggaagttaagtagctgatgccatcaaagcaatggagaaacgtcaggtgaaccgcgagcagaattctgtggcgcatttgttagcgcagttagttaggactctgttcatacaactgttcgattaagccaaatacctaatttagttttatattggttgttgtcaaagaatttgtgaaatattgaggttgataatatatgtggcgttcgtttttatgtaatcattgttcactaatattttgtcgaatattttatattatatagacattactaagaacgtaaggggtcgctcgtgctctgtaaaggtacaaacaatcatgattgtggaggagcgtgacggcg

SEQ ID NO: 58168 - DNA, 2427 bp, Zea Mays
gcctattgccttgcctgccccttccatcctccttccccacccctccttccatcctcgcccgcgcgctccacacgtccccgccgtcgcgctcgccttccatcctcctccccaccccctccttccatcctcgctcgcgcgctccgcatgtccccgccgtcgcgctcgcctccctcctctttgttgcctccgcgtcggcctccaccccgctctccgacacgcttgccgtcgtcttggatttctggtgcactctcttctctacgacgcgagcaagggcggcgcttgccatggcatcgacgggaaccaggcatcactctccctatctcttgggtacgcgtttatttcatctctagggtctagagtttagtagcaccgccgccaacatccccgccgttgcgacaagcaccgaccgctcgcttccccctccctcctctcgtcggcgccaacgagccgcatgccgtgtgtcgtgtgggtcggctacccgggtatcggcgccagcgagccctcgccccccatccccctgccaatctcggcgtcggcgcgccgctcgccatccccgcaggccacgcccatgcccccgcctccatagtccctgtcatcggcgacctcagatccaacaggatggtacaggcaggaggatcaggccaccgtcgaggaacgcgctcttcgctgtgttccagcgagaagatgagggatcgagggcggcgcaggtggcgagctcgtgggcggaacagactggtgagagcaagaggatggatcaggagcttgagccccagagacatgccagtgaggagcagtttagtcggttcttgctttatgaagtggatgcaattagaaagacgtacgagcgggccaacatctcgcggtggctcgccttgggcaaccggacctgcccgaccacgatgcaggagctctaggacgacgccctcacccccaacgccactctccgacaactcatcgccgcctggttctcccgcctgtttatcttagatattgtttgaacgtatgggatgttggaggacagaagacaatcatgtcttactggagaaattactttgagcagactaatgggttagtttggtttgctgatagttcagacataaggaggcttgatgattgccgtgctgaactccacaatctcttgaaagaagaggataaaggtttacctatctaggcagtgttctattgttgatttttgcaaataagcaagacatgcaaggagctctaaaaccaactggaatcgcgaagattttacttagttcgatgtgggagcaaaaggatatgccaaattgaatgtagtttcatcagttatgctctattatggatgttcagaggcatccaatttcagtgtgtactgcaatacttgggtccacctagtcactctccgacagctcatcgccgcttggttctcctgtcggtacacaaggtttaagaagcgctacgcggacttccacggccgcgctgccgatctcgtccacggcctccggggcacggcgatgcccaggagacaggccctcgaggaagagcaatgtacagaagagaaaggtatctcgactattccaaagcacaagtatgcatccaaagcctgttccccaaaaggaacctttatctgcagctctctctgcgcttactcttgttgtgcaatttaatgggtggctatcatttttcctcttgctttattataaacttcctctgcggccagaaactcacaagacatactatgaatacactggcttgtggcacatctatgggctccttgccatgaattcatggttctggagtgccatatatcacagttgtgacacaatttggacagaaaaagctatatttttcatcagatgctgcctttctaggattaatcattctggaacttgtactaacaattgaagcaagtggaggcatagcaccaattgtgtctgtgctgcagctctggatgtcagtagacaagaggtgtatcagagagaagcacttcaaggttaatttgttgagcaaattggagatgctggattttgtattttggttgctcatgggtggtgaatgatctgacgacttcagaagaggatagatctgagattacctttcatgcatgtcaaggaagttaagtagctgatgccatcaaagcaatggagaaacgtcaggtgaaccgcgagcagaattctgtggcgcatttgttagcgcagttagttaggactctgttcatacaactgttcgattaagccaaatacctaatttagttttatattggttgttgtcaaagaatttgtgaaatattgaggttgataatatatgtggcgttcgtttttatgtaatcattgttcactaatattttgtcgaatattttatattatatagacattactaagaacgtaaggggtcgctcgtgctctgtaaaggtacaaacaatcatgattgtggaggagcgtgacggcg

SEQ ID NO: 58169 - DNA, 2526 bp, Zea Mays
gcctattgccttgcctgccccttccatcctccttccccacccctccttccatcctcgcccgcgcgctccacacgtccccgccgtcgcgctcgccttccatcctcctccccaccccctccttccatcctcgctcgcgcgctccgcatgtccccgccgtcgcgctcgcctccctcctctttgttgcctccgcgtcggcctccaccccgctctccgacacgcttgccgtcgtcttggatttctggtgcactctcttctctacgacgcgagcaagggcggcgcttgccatggcatcgacgggaaccaggatggtacaggcaggaggatcaggccaccgtcgaggaacgcgctcttcgctgtgttccagcgagaagatgagggatcgagggcggcgcaggtggcgagctcgtgggcggaacagactggtgagagcaagaggatggatcaggagcttgagccccaggaggggagctgtttgagcggatgcccaccaggaacaatgtttcctagatcacgatgtttgggccacttttggaagaggtcagggatgacatgttttcaagcttggaggacatcaccaacgcaccatatgcagatctgctctctattaattcaatgaggaaaggaaaggggtcatagaaattagtcttggcagatggaggggaacgtctcaatgactgaggcacatttttactaaattatccctaaattatttgtatttttaaaataacatgtaatcttgttgatctggtttactcaagatgcatcaagtttgtacttggagaagaatcctggagttattttacttgtttccttgatttgtagagacatgccagtgaggagcagtttagtcggttcttgctttatgaagtggatgcaattagaaagacgtacgagcgggccaacatctcgcggtggctcgccttgggcaaccggacctgcccgaccacgatgcaggagctctaggacgacgccctcacccccaacgccactctccgacaactcatcgccgcctggttctcccgcctgtttatcttagatattgtttgaacgtatgggatgttggaggacagaagacaatcatgtcttactggagaaattactttgagcagactaatgggttagtttggtttgctgatagttcagacataaggaggcttgatgattgccgtgctgaactccacaatctcttgaaagaagaggataaaggtttacctatctaggcagtgttctattgttgatttttgcaaataagcaagacatgcaaggagctctaaaaccaactggaatcgcgaagattttacttagttcgatgtgggagcaaaaggatatgccaaattgaatgtagtttcatcagttatgctctattatggatgttcagaggcatccaatttcagtgtgtactgcaatacttgggtccacctagtcactctccgacagctcatcgccgcttggttctcctgtcggtacacaaggtttaagaagcgctacgcggacttccacggccgcgctgccgatctcgtccacggcctccggggcacggcgatgcccaggagacaggccctcgaggaagagcaatgtacagaagagaaaggtatctcgactattccaaagcacaagtatgcatccaaagcctgttccccaaaaggaacctttatctgcagctctctctgcgcttactcttgttgtgcaatttaatgggtggctatcatttttcctcttgctttattataaacttcctctgcggccagaaactcacaagacatactatgaatacactggcttgtggcacatctatgggctccttgccatgaattcatggttctggagtgccatatatcacagttgtgacacaatttggacagaaaaagctatatttttcatcagatgctgcctttctaggattaatcattctggaacttgtactaacaattgaagcaagtggaggcatagcaccaattgtgtctgtgctgcagctctggatgtcagtagacaagaggtgtatcagagagaagcacttcaaggttaatttgttgagcaaattggagatgctggattttgtattttgactttgccttgtgtcacaatgggtgcatttgctggtggtccttggatcaggttgctcatgggtggtgaatgatctgacgacttcagaagaggatagatctgagattacctttcatgcatgtcaaggaagttaagtagctgatgccatcaaagcaatggagaaacgtcaggtgaaccgcgagcagaattctgtggcgcatttgttagcgcagttagttaggactctgttcatacaactgttcgattaagccaaatacctaatttagttttatattggttgttgtcaaagaatttgtgaaatattgaggttgataatatatgtggcgttcgtttttatgtaatcattgttcactaatattttgtcgaatattttatattatatagacattactaagaacgtaaggggtcgctcgtgctctgtaaaggtacaaacaatcatgattgtggaggagcgtgacggcg

SEQ ID NO: 58170 - DNA, 2676 bp, Zea Mays
gcctattgccttgcctgccccttccatcctccttccccacccctccttccatcctcgcccgcgcgctccacacgtccccgccgtcgcgctcgccttccatcctcctccccaccccctccttccatcctcgctcgcgcgctccgcatgtccccgccgtcgcgctcgcctccctcctctttgttgcctccgcgtcggcctccaccccgctctccgacacgcttgccgtcgtcttggatttctggtgcactctcttctctacgacgcgagcaagggcggcgcttgccatggcatcgacgggaaccaggcatcactctccctatctcttgggtacgcgtttatttcatctctagggtctagagtttagtagcaccgccgccaacatccccgccgttgcgacaagcaccgaccgctcgcttccccctccctcctctcgtcggcgccaacgagccgcatgccgtgtgtcgtgtgggtcggctacccgggtatcggcgccagcgagccctcgccccccatccccctgccaatctcggcgtcggcgcgccgctcgccatccccgcaggccacgcccatgcccccgcctccatagtccctgtcatcggcgacctcagatccaacaggatggtacaggcaggaggatcaggccaccgtcgaggaacgcgctcttcgctgtgttccagcgagaagatgagggatcgagggcggcgcaggtggcgagctcgtgggcggaacagactggtgagagcaagaggatggatcaggagcttgagccccagagacatgccagtgaggagcagtttagtcggttcttgctttatgaagtggatgcaattagaaagacgtacgagcgggccaacatctcgcggtggctcgccttgggcaaccggacctgcccgaccacgatgcaggagctctaggacgacgccctcacccccaacgccactctccgacaactcatcgccgcctggttctcccgcctgtttatcttagatattgtttgaacgtatgggatgttggaggacagaagacaatcatgtcttactggagaaattactttgagcagactaatgggttagtttggtttgctgatagttcagacataaggaggcttgatgattgccgtgctgaactccacaatctcttgaaagaagaggataaaggtttacctatctaggcagtgttctattgttgatttttgcaaataagcaagacatgcaaggagctctaaaaccaactggaatcgcgaagagtcactctccgacagctcatcgccgcttggttctcctgtcggtacacaaggtttaagaagcgctacgcggacttccacggccgcgctgccgatctcgtccacggcctccggggcacggcgatgcccaggagacaggccctcgaggaagagcaatgtacagaagagaaaggtatctcgactattccaaagcacaagtatgcatccaaagcctgttccccaaaaggtgcgtgaactttgttcttgattttgtcagactaaatgtgggtgaactttgtactgcagtttttgtttaaataaactttggactgtttaaattactgatgcatccaaccactgtttttctttattgtttgttgatacacgaccagatgcccagttgagttcacccaaaaggtttattacaacacgaaaaaatctgagataaaatgttttttatttaaatgaactttgtattgcagtatttatagacatattttggcacccggtcgtttactatttttgttttattaatacctcttgtgtttccctttcacttcctttgtataaactgtatgcctctgttttcattctcaggaacctttatctgcagctctctctgcgcttactcttgttgtgcaatttaatgggtggctatcatttttcctcttgctttattataaacttcctctgcggccagaaactcacaagacatactatgaatacactggcttgtggcacatctatgggctccttgccatgaattcatggttctggagtgccatatatcacagttgtgacacaatttggacagaaaaagctatatttttcatcagatgctgcctttctagggtattccctcattttgacgatagttgattaatcattctggaacttgtactaacaattgaagcaagtggaggcatagcaccaattgtgtctgtgctgcagctctggatgtcagtagacaagaggtgtatcagagagaagcacttcaaggttaatttgttgagcaaattggagatgctggattttgtattttggttgctcatgggtggtgaatgatctgacgacttcagaagaggatagatctgagattacctttcatgcatgtcaaggaagttaagtagctgatgccatcaaagcaatggagaaacgtcaggtgaaccgcgagcagaattctgtggcgcatttgttagcgcagttagttaggactctgttcatacaactgttcgattaagccaaatacctaatttagttttatattggttgttgtcaaagaatttgtgaaatattgaggttgataatatatgtggcgttcgtttttatgtaatcattgttcactaatattttgtcgaatattttatattatatagacattactaagaacgtaaggggtcgctcgtgctctgtaaaggtacaaacaatcatgattgtggaggagcgtgacggcg

SEQ ID NO: 58171 - DNA, 2849 bp, Zea Mays
gcctattgccttgcctgccccttccatcctccttccccacccctccttccatcctcgcccgcgcgctccacacgtccccgccgtcgcgctcgccttccatcctcctccccaccccctccttccatcctcgctcgcgcgctccgcatgtccccgccgtcgcgctcgcctccctcctctttgttgcctccgcgtcggcctccaccccgctctccgacacgcttgccgtcgtcttggatttctggtgcactctcttctctacgacgcgagcaagggcggcgcttgccatggcatcgacgggaaccaggcatcactctccctatctcttgggatggtacaggcaggaggatcaggccaccgtcgaggaacgcgctcttcgctgtgttccagcgagaagatgagggatcgagggcggcgcaggtggcgagctcgtgggcggaacagactggtgagagcaagaggatggatcaggagcttgagccccaggaggggagctgtttgagcggatgcccaccaggaacaatgtttcctagatcacgatgtttgggccacttttggaagaggtcagggatgacatgttttcaagcttggaggacatcaccaacgcaccatatgcagatctgctctctattaattcaatgaggaaaggaaaggggtcatagaaattagtcttggcagatggaggggaacgtctcaatgactgaggcacatttttactaaattatccctaaattatttgtatttttaaaataacatgtaatcttgttgatctggtttactcaagatgcatcaagtttgtacttggagaagaatcctggagttattttacttgtttccttgatttgtagagacatgccagtgaggagcagtttagtcggttcttgctttatgaagtggatgcaattagaaagacgtacgagcgggccaacatctcgcggtggctcgccttgggcaaccggacctgcccgaccacgatgcaggagctctaggacgacgccctcacccccaacgccactctccgacaactcatcgccgcctggttctcccgcctgtttatcttagatattgtttgaacgtatgggatgttggaggacagaagacaatcatgtcttactggagaaattactttgagcagactaatgggttagtttggtttgctgatagttcagacataaggaggcttgatgattgccgtgctgaactccacaatctcttgaaagaagaggataaaggtttacctatctaggcagtgttctattgttgatttttgcaaataagcaagacatgcaaggagctctaaaaccaactggaatcgcgaagattttacttagttcgatgtgggagcaaaaggatatgccaaattgaatgtagtttcatcagttatgctctattatggatgttcagaggcatccaatttcagtgtgtactgcaatacttgggtccacctagtcactctccgacagctcatcgccgcttggttctcctgtcggtacacaaggtttaagaagcgctacgcggacttccacggccgcgctgccgatctcgtccacggcctccggggcacggcgatgcccaggagacaggccctcgaggaagagcaatgtacagaagagaaaggtatctcgactattccaaagcacaagtatgcatccaaagcctgttccccaaaaggtgcgtgaactttgttcttgattttgtcagactaaatgtgggtgaactttgtactgcagtttttgtttaaataaactttggactgtttaaattactgatgcatccaaccactgtttttctttattgtttgttgatacacgaccagatgcccagttgagttcacccaaaaggtttattacaacacgaaaaaatctgagataaaatgttttttatttaaatgaactttgtattgcagtatttatagacatattttggcacccggtcgtttactatttttgttttattaatacctcttgtgtttccctttcacttcctttgtataaactgtatgcctctgttttcattctcaggaacctttatctgcagctctctctgcgcttactcttgttgtgcaatttaatgggtggctatcatttttcctcttgctttattataaacttcctctgcggccagaaactcacaagacatactatgaatacactggcttgtggcacatctatgggctccttgccatgaattcatggttctggagtgccatatatcacagttgtgacacaatttggacagaaaaagctatatttttcatcagatgctgcctttctaggattaatcattctggaacttgtactaacaattgaagcaagtggaggcatagcaccaattgtgtctgtgctgcagctctggatgtcagtagacaagaggtgtatcagagagaagcacttcaaggttaatttgttgagcaaattggagatgctggattttgtattttggttgctcatgggtggtgaatgatctgacgacttcagaagaggatagatctgagattacctttcatgcatgtcaaggaagttaagtagctgatgccatcaaagcaatggagaaacgtcaggtgaaccgcgagcagaattctgtggcgcatttgttagcgcagttagttaggactctgttcatacaactgttcgattaagccaaatacctaatttagttttatattggttgttgtcaaagaatttgtgaaatattgaggttgataatatatgtggcgttcgtttttatgtaatcattgttcactaatattttgtcgaatattttatattatatagacattactaagaacgtaaggggtcgctcgtgctctgtaaaggtacaaacaatcatgattgtggaggagcgtgacggcg

SEQ ID NO: 58172 - DNA, 3347 bp, Zea Mays
gcctattgccttgcctgccccttccatcctccttccccacccctccttccatcctcgcccgcgcgctccacacgtccccgccgtcgcgctcgccttccatcctcctccccaccccctccttccatcctcgctcgcgcgctccgcatgtccccgccgtcgcgctcgcctccctcctctttgttgcctccgcgtcggcctccaccccgctctccgacacgcttgccgtcgtcttggatttctggtgcactctcttctctacgacgcgagcaagggcggcgcttgccatggcatcgacgggaaccaggcatcactctccctatctcttgggtacgcgtttatttcatctctagggtctagagtttagtagcaccgccgccaacatccccgccgttgcgacaagcaccgaccgctcgcttccccctccctcctctcgtcggcgccaacgagccgcatgccgtgtgtcgtgtgggtcggctacccgggtatcggcgccagcgagccctcgccccccatccccctgccaatctcggcgtcggcgcgccgctcgccatccccgcaggccacgcccatgcccccgcctccatagtccctgtcatcggcgacctcagatccaacaggatggtacaggcaggaggatcaggccaccgtcgaggaacgcgctcttcgctgtgttccagcgagaagatgagggatcgagggcggcgcaggtggcgagctcgtgggcggaacagactggtgagagcaagaggatggatcaggagcttgagccccaggaggggagctgtttgagcggatgcccaccaggaacaatgtttcctagatcacgatgtttgggccacttttggaagaggtcagggatgacatgttttcaagcttggaggacatcaccaacgcaccatatgcagatctgctctctattaattcaatgaggaaaggaaaggggtcatagaaattagtcttggcagatggaggggaacgtctcaatgactgagagacatgccagtgaggagcagtttagtcggttcttgctttatgaagtggatgcaattagaaagacgtacgagcgggccaacatctcgcggtggctcgccttgggcaaccggacctgcccgaccacgatgcaggagctctaggacgacgccctcacccccaacgccactctccgacaactcatcgccgcctggttctcccgcctggtttctgcattttgttttcttatctgtcaatcatgtttttccatattactgcaggtgggtctgattaattatttaaatgtagtttatcttagatattgtttgaacgtatgggatgttggaggacagaagacaatcatgtcttactggagaaattactttgagcagactaatgggttagtttggtttgctgatagttcagacataaggaggcttgatgattgccgtgctgaactccacaatctcttgaaagaagaggataaaggtttacctatctaggcagtgttctattgttgatttttgcaaataagcaagacatgcaaggagctctaaaaccaactggaatcgcgaagattttacttagttcgatgtgggagcaaaaggatatgccaaattgaatgtagtttcatcagttatgctctattatggatgttcagaggcatccaatttcagtgtgtactgcaatacttgggtccacctgtttaagaagcgctacgcggacttccacggccgcgctgccgatctcgtccacggcctccggggcacggcgatgcccaggagacaggccctcgaggaagagcaatgtacagaagagaaaggtatctcgactattccaaagcacaagtatgcatccaaagcctgttccccaaaaggtgcgtgaactttgttcttgattttgtcagactaaatgtgggtgaactttgtactgcagtttttgtttaaataaactttggactgtttaaattactgatgcatccaaccactgtttttctttattgtttgttgatacacgaccagatgcccagttgagttcacccaaaaggtttattacaacacgaaaaaatctgagataaaatgttttttatttaaatgaactttgtattgcagtatttatagacatattttggcacccggtcgtttactatttttgttttattaatacctcttgtgtttccctttcacttcctttgtataaactgtatgcctctgttttcattctcaggaacctttatctgcagctctctctgcgcttactcttgttgtgcaatttaatgggtggctatcatttttcctcttgctttattataaacttcctctgcggccagaaactcacaagacatactatgaatacactggcttgtggcacatctatgggctccttgccatgaattcatggttctggagtgccatatatcacagttgtgacacaatttggacagaaaaagctatatttttcatcagatgctgcctttctagggtattccctcattttgacgatagttggtgagcatgtagtagcaagtttcatgggctctggtagattaactgacctttgtgtgttccattagcctgtgaagttcgaaactggtcatattgctaagaattctaggaggttactattagggcctagagtaaatgactacgtgctgatgaaaatctgttcagattaatcattctggaacttgtactaacaattgaagcaagtggaggcatagcaccaattgtgtctgtgctgcagctctggatgtcagtagacaagaggtgtatcagagagaagcacttcaaggttaatttgttgagcaaattggagatgctggattttgtattttggtaggtgatgtatgcttttcagcatggcgtattttattgaactggtcaagtcctgcagaagctgaaactgatcatggataagactttgccttgtgtcacaatgggtgcatttgctggtggtccttggatcaggttgctcatgggtggtgaatgatctgacgacttcagaagaggatagatctgagattacctttcatgcatgtcaaggaagttaagtagctgatgccatcaaagcaatggagaaacgtcaggtgaaccgcgagcagaattctgtggcgcatttgttagcgcagttagttaggactctgttcatacaactgttcgattaagccaaatacctaatttagttttatattggttgttgtcaaagaatttgtgaaatattgaggttgataatatatgtggcgttcgtttttatgtaatcattgttcactaatattttgtcgaatattttatattatatagacattactaagaacgtaaggggtcgctcgtgctctgtaaaggtacaaacaatcatgattgtggaggagcgtgacggcg

SEQ ID NO: 58173 - DNA, 2593 bp, Zea Mays
gcctattgccttgcctgccccttccatcctccttccccacccctccttccatcctcgcccgcgcgctccacacgtccccgccgtcgcgctcgccttccatcctcctccccaccccctccttccatcctcgctcgcgcgctccgcatgtccccgccgtcgcgctcgcctccctcctctttgttgcctccgcgtcggcctccaccccgctctccgacacgcttgccgtcgtcttggatttctggtgcactctcttctctacgacgcgagcaagggcggcgcttgccatggcatcgacgggaaccaggatggtacaggcaggaggatcaggccaccgtcgaggaacgcgctcttcgctgtgttccagcgagaagatgagggatcgagggcggcgcaggtggcgagctcgtgggcggaacagactggtgagagcaagaggatggatcaggagcttgagccccaggaggggagctgtttgagcggatgcccaccaggaacaatgtttcctagatcacgatgtttgggccacttttggaagaggtcagggatgacatgttttcaagcttggaggacatcaccaacgcaccatatgcagatctgctctctattaattcaatgaggaaaggaaaggggtcatagaaattagtcttggcagatggaggggaacgtctcaatgactgaggcacatttttactaaattatccctaaattatttgtatttttaaaataacatgtaatcttgttgatctggtttactcaagatgcatcaagtttgtacttggagaagaatcctggagttattttacttgtttccttgatttgtagagacatgccagtgaggagcagtttagtcggttcttgctttatgaagtggatgcaattagaaagacgtacgagcgggccaacatctcgcggtggctcgccttgggcaaccggacctgcccgaccacgatgcaggagctctaggacgacgccctcacccccaacgccactctccgacaactcatcgccgcctgtttatcttagatattgtttgaacgtatgggatgttggaggacagaagacaatcatgtcttactggagaaattactttgagcagactaatgggttagtttggtttgctgatagttcagacataaggaggcttgatgattgccgtgctgaactccacaatctcttgaaagaagaggtttacctatctaggcagtgttctattgttgatttttgcaaataagcaagacatgcaaggagctctaaaaccaactggaatcgcgaagattttacttagttcgatgtgggagcaaaaggatatgccaaattgaatgtagtttcatcagttatgctctattatggatgttcagaggcatccaatttcagtgtgtactgcaatacttgggtccacctgtttaagaagcgctacgcggacttccacggccgcgctgccgatctcgtccacggcctccggggcacggcgatgcccaggagacaggccctcgaggaagagcaatgtacagaagagaaaggtatctcgactattccaaagcacaagtatgcatccaaagcctgttccccaaaaggaacctttatctgcagctctctctgcgcttactcttgttgtgcaatttaatgggtggctatcatttttcctcttgctttattataaacttcctctgcggccagaaactcacaagacatactatgaatacactggcttgtggcacatctatgggctccttgccatgaattcatggttctggagtgccatatatcacagttgtgacacaatttggacagaaaaagctatatttttcatcagatgctgcctttctagggtattccctcattttgacgatagttggtgagcatgtagtagcaagtttcatgggctctggtagattaactgacctttgtgtgttccattagcctgtgaagttcgaaactggtcatattgctaagaattctaggaggttactattagggcctagagtaaatgactacgtgctgatgaaaatctgttcagattaatcattctggaacttgtactaacaattgaagcaagtggaggcatagcaccaattgtgtctgtgctgcagctctggatgtcagtagacaagaggtgtatcagagagaagcacttcaaggttaatttgttgagcaaattggagatgctggattttgtattttggttgctcatgggtggtgaatgatctgacgacttcagaagaggatagatctgagattacctttcatgcatgtcaaggaagttaagtagctgatgccatcaaagcaatggagaaacgtcaggtgaaccgcgagcagaattctgtggcgcatttgttagcgcagttagttaggactctgttcatacaactgttcgattaagccaaatacctaatttagttttatattggttgttgtcaaagaatttgtgaaatattgaggttgataatatatgtggcgttcgtttttatgtaatcattgttcactaatattttgtcgaatattttatattatatagacattactaagaacgtaaggggtcgctcgtgctctgtaaaggtacaaacaatcatgattgtggaggagcgtgacggcg

SEQ ID NO: 58174 - DNA, 2118 bp, Zea Mays
gcctattgccttgcctgccccttccatcctccttccccacccctccttccatcctcgcccgcgcgctccacacgtccccgccgtcgcgctcgccttccatcctcctccccaccccctccttccatcctcgctcgcgcgctccgcatgtccccgccgtcgcgctcgcctccctcctctttgttgcctccgcgtcggcctccaccccgctctccgacacgcttgccgtcgtcttggatttctggtgcactctcttctctacgacgcgagcaagggcggcgcttgccatggcatcgacgggaaccaggcatcactctccctatctcttgggatggtacaggcaggaggatcaggccaccgtcgaggaacgcgctcttcgctgtgttccagcgagaagatgagggatcgagggcggcgcaggtggcgagctcgtgggcggaacagactggtgagagcaagaggatggatcaggagcttgagccccagagacatgccagtgaggagcagtttagtcggttcttgctttatgaagtggatgcaattagaaagacgtacgagcgggccaacatctcgcggtggctcgccttgggcaaccggacctgcccgaccacgatgcaggagctctaggacgacgccctcacccccaacgccactctccgacaactcatcgccgcctggttctcccgcctggtttctgcattttgttttcttatctgtcaatcatgtttttccatattactgcaggtgggtctgattaattatttaaatgtagtttatcttagatattgtttgaacgtatgggatgttggaggacagaagacaatcatgtcttactggagaaattactttgagcagactaatgggttagtttggtttgctgatagttcagacataaggaggcttgatgattgccgtgctgaactccacaatctcttgaaagaagaggataaaggtttacctatctaggcagtgttctattgttgatttttgcaaataagcaagacatgcaaggagctctaaaaccaactggaatcgcgaagagtcactctccgacagctcatcgccgcttggttctcctgtcggtacacaaggtttaagaagcgctacgcggacttccacggccgcgctgccgatctcgtccacggcctccggggcacggcgatgcccaggagacaggccctcgaggaagagcaatgtacagaagagaaaggtatctcgactattccaaagcacaagtatgcatccaaagcctgttccccaaaaggaacctttatctgcagctctctctgcgcttactcttgttgtgcaatttaatgggtggctatcatttttcctcttgctttattataaacttcctctgcggccagaaactcacaagacatactatgaatacactggcttgtggcacatctatgggctccttgccatgaattcatggttctggagtgccatatatcacagttgtgacacaatttggacagaaaaagctatatttttcatcagatgctgcctttctagggtattccctcattttgacgatagttgattaatcattctggaacttgtactaacaattgaagcaagtggaggcatagcaccaattgtgtctgtgctgcagctctggatgtcagtagacaagaggtgtatcagagagaagcacttcaaggttaatttgttgagcaaattggagatgctggattttgtattttggttgctcatgggtggtgaatgatctgacgacttcagaagaggatagatctgagattacctttcatgcatgtcaaggaagttaagtagctgatgccatcaaagcaatggagaaacgtcaggtgaaccgcgagcagaattctgtggcgcatttgttagcgcagttagttaggactctgttcatacaactgttcgattaagccaaatacctaatttagttttatattggttgttgtcaaagaatttgtgaaatattgaggttgataatatatgtggcgttcgtttttatgtaatcattgttcactaatattttgtcgaatattttatattatatagacattactaagaacgtaaggggtcgctcgtgctctgtaaaggtacaaacaatcatgattgtggaggagcgtgacggcg

SEQ ID NO: 58175 - DNA, 2633 bp, Zea Mays
gcctattgccttgcctgccccttccatcctccttccccacccctccttccatcctcgcccgcgcgctccacacgtccccgccgtcgcgctcgccttccatcctcctccccaccccctccttccatcctcgctcgcgcgctccgcatgtccccgccgtcgcgctcgcctccctcctctttgttgcctccgcgtcggcctccaccccgctctccgacacgcttgccgtcgtcttggatttctggtgcactctcttctctacgacgcgagcaagggcggcgcttgccatggcatcgacgggaaccaggcatcactctccctatctcttgggtacgcgtttatttcatctctagggtctagagtttagtagcaccgccgccaacatccccgccgttgcgacaagcaccgaccgctcgcttccccctccctcctctcgtcggcgccaacgagccgcatgccgtgtgtcgtgtgggtcggctacccgggtatcggcgccagcgagccctcgccccccatccccctgccaatctcggcgtcggcgcgccgctcgccatccccgcaggccacgcccatgcccccgcctccatagtccctgtcatcggcgacctcagatccaacaggatggtacaggcaggaggatcaggccaccgtcgaggaacgcgctcttcgctgtgttccagcgagaagatgagggatcgagggcggcgcaggtggcgagctcgtgggcggaacagactggtgagagcaagaggatggatcaggagcttgagccccaggaggggagctgtttgagcggatgcccaccaggaacaatgtttcctagatcacgatgtttgggccacttttggaagaggtcagggatgacatgttttcaagcttggaggacatcaccaacgcaccatatgcagatctgctctctattaattcaatgaggaaaggaaaggggtcatagaaattagtcttggcagatggaggggaacgtctcaatgactgagagacatgccagtgaggagcagtttagtcggttcttgctttatgaagtggatgcaattagaaagacgtacgagcgggccaacatctcgcggtggctcgccttgggcaaccggacctgcccgaccacgatgcaggagctctaggacgacgccctcacccccaacgccactctccgacaactcatcgccgcctgtttatcttagatattgtttgaacgtatgggatgttggaggacagaagacaatcatgtcttactggagaaattactttgagcagactaatgggttagtttggtttgctgatagttcagacataaggaggcttgatgattgccgtgctgaactccacaatctcttgaaagaagaggataaaggtttacctatctaggcagtgttctattgttgatttttgcaaataagcaagacatgcaaggagctctaaaaccaactggaatcgcgaagattttacttagttcgatgtgggagcaaaaggatatgccaaattgaatgtagtttcatcagttatgctctattatggatgttcagaggcatccaatttcagtgtgtactgcaatacttgggtccacctagtcactctccgacagctcatcgccgcttggttctcctgtcggtacacaaggtttaagaagcgctacgcggacttccacggccgcgctgccgatctcgtccacggcctccggggcacggcgatgcccaggagacaggccctcgaggaagagcaatgtacagaagagaaaggtatctcgactattccaaagcacaagtatgcatccaaagcctgttccccaaaaggaacctttatctgcagctctctctgcgcttactcttgttgtgcaatttaatgggtggctatcatttttcctcttgctttattataaacttcctctgcggccagaaactcacaagacatactatgaatacactggcttgtggcacatctatgggctccttgccatgaattcatggttctggagtgccatatatcacagttgtgacacaatttggacagaaaaagctatatttttcatcagatgctgcctttctaggattaatcattctggaacttgtactaacaattgaagcaagtggaggcatagcaccaattgtgtctgtgctgcagctctggatgtcagtagacaagaggtgtatcagagagaagcacttcaaggttaatttgttgagcaaattggagatgctggattttgtattttggttgctcatgggtggtgaatgatctgacgacttcagaagaggatagatctgagattacctttcatgcatgtcaaggaagttaagtagctgatgccatcaaagcaatggagaaacgtcaggtgaaccgcgagcagaattctgtggcgcatttgttagcgcagttagttaggactctgttcatacaactgttcgattaagccaaatacctaatttagttttatattggttgttgtcaaagaatttgtgaaatattgaggttgataatatatgtggcgttcgtttttatgtaatcattgttcactaatattttgtcgaatattttatattatatagacattactaagaacgtaaggggtcgctcgtgctctgtaaaggtacaaacaatcatgattgtggaggagcgtgacggcg

SEQ ID NO: 58176 - DNA, 2770 bp, Zea Mays
gcctattgccttgcctgccccttccatcctccttccccacccctccttccatcctcgcccgcgcgctccacacgtccccgccgtcgcgctcgccttccatcctcctccccaccccctccttccatcctcgctcgcgcgctccgcatgtccccgccgtcgcgctcgcctccctcctctttgttgcctccgcgtcggcctccaccccgctctccgacacgcttgccgtcgtcttggatttctggtgcactctcttctctacgacgcgagcaagggcggcgcttgccatggcatcgacgggaaccaggcatcactctccctatctcttgggtacgcgtttatttcatctctagggtctagagtttagtagcaccgccgccaacatccccgccgttgcgacaagcaccgaccgctcgcttccccctccctcctctcgtcggcgccaacgagccgcatgccgtgtgtcgtgtgggtcggctacccgggtatcggcgccagcgagccctcgccccccatccccctgccaatctcggcgtcggcgcgccgctcgccatccccgcaggccacgcccatgcccccgcctccatagtccctgtcatcggcgacctcagatccaacaggatggtacaggcaggaggatcaggccaccgtcgaggaacgcgctcttcgctgtgttccagcgagaagatgagggatcgagggcggcgcaggtggcgagctcgtgggcggaacagactggtgagagcaagaggatggatcaggagcttgagccccaggaggggagctgtttgagcggatgcccaccaggaacaatgtttcctagatcacgatgtttgggccacttttggaagaggtcagggatgacatgttttcaagcttggaggacatcaccaacgcaccatatgcagatctgctctctattaattcaatgaggaaaggaaaggggtcatagaaattagtcttggcagatggaggggaacgtctcaatgactgaggcacatttttactaaattatccctaaattatttgtatttttaaaataacatgtaatcttgttgatctggtttactcaagatgcatcaagtttgtacttggagaagaatcctggagttattttacttgtttccttgatttgtagagacatgccagtgaggagcagtttagtcggttcttgctttatgaagtggatgcaattagaaagacgtacgagcgggccaacatctcgcggtggctcgccttgggcaaccggacctgcccgaccacgatgcaggagctctaggacgacgccctcacccccaacgccactctccgacaactcatcgccgcctggttctcccgcctggtttctgcattttgttttcttatctgtcaatcatgtttttccatattactgcaggtgggtctgattaattatttaaatgtagtttatcttagatattgtttgaacgtatgggatgttggaggacagaagacaatcatgtcttactggagaaattactttgagcagactaatgggttagtttggtttgctgatagttcagacataaggaggcttgatgattgccgtgctgaactccacaatctcttgaaagaagaggataaaggtttacctatctaggcagtgttctattgttgatttttgcaaataagcaagacatgcaaggagctctaaaaccaactggaatcgcgaagagtcactctccgacagctcatcgccgcttggttctcctgtcggtacacaaggtttaagaagcgctacgcggacttccacggccgcgctgccgatctcgtccacggcctccggggcacggcgatgcccaggagacaggccctcgaggaagagcaatgtacagaagagaaaggtatctcgactattccaaagcacaagtatgcatccaaagcctgttccccaaaaggaacctttatctgcagctctctctgcgcttactcttgttgtgcaatttaatgggtggctatcatttttcctcttgctttattataaacttcctctgcggccagaaactcacaagacatactatgaatacactggcttgtggcacatctatgggctccttgccatgaattcatggttctggagtgccatatatcacagttgtgacacaatttggacagaaaaagctatatttttcatcagatgctgcctttctagggtattccctcattttgacgatagttgattaatcattctggaacttgtactaacaattgaagcaagtggaggcatagcaccaattgtgtctgtgctgcagctctggatgtcagtagacaagaggtgtatcagagagaagcacttcaaggttaatttgttgagcaaattggagatgctggattttgtattttggttgctcatgggtggtgaatgatctgacgacttcagaagaggatagatctgagattacctttcatgcatgtcaaggaagttaagtagctgatgccatcaaagcaatggagaaacgtcaggtgaaccgcgagcagaattctgtggcgcatttgttagcgcagttagttaggactctgttcatacaactgttcgattaagccaaatacctaatttagttttatattggttgttgtcaaagaatttgtgaaatattgaggttgataatatatgtggcgttcgtttttatgtaatcattgttcactaatattttgtcgaatattttatattatatagacattactaagaacgtaaggggtcgctcgtgctctgtaaaggtacaaacaatcatgattgtggaggagcgtgacggcg

SEQ ID NO: 58177 - DNA, 2390 bp, Zea Mays
gcctattgccttgcctgccccttccatcctccttccccacccctccttccatcctcgcccgcgcgctccacacgtccccgccgtcgcgctcgccttccatcctcctccccaccccctccttccatcctcgctcgcgcgctccgcatgtccccgccgtcgcgctcgcctccctcctctttgttgcctccgcgtcggcctccaccccgctctccgacacgcttgccgtcgtcttggatttctggtgcactctcttctctacgacgcgagcaagggcggcgcttgccatggcatcgacgggaaccaggatggtacaggcaggaggatcaggccaccgtcgaggaacgcgctcttcgctgtgttccagcgagaagatgagggatcgagggcggcgcaggtggcgagctcgtgggcggaacagactggtgagagcaagaggatggatcaggagcttgagccccaggaggggagctgtttgagcggatgcccaccaggaacaatgtttcctagatcacgatgtttgggccacttttggaagaggtcagggatgacatgttttcaagcttggaggacatcaccaacgcaccatatgcagatctgctctctattaattcaatgaggaaaggaaaggggtcatagaaattagtcttggcagatggaggggaacgtctcaatgactgagagacatgccagtgaggagcagtttagtcggttcttgctttatgaagtggatgcaattagaaagacgtacgagcgggccaacatctcgcggtggctcgccttgggcaaccggacctgcccgaccacgatgcaggagctctaggacgacgccctcacccccaacgccactctccgacaactcatcgccgcctggttctcccgcctggtttctgcattttgttttcttatctgtcaatcatgtttttccatattactgcaggtgggtctgattaattatttaaatgtagtttatcttagatattgtttgaacgtatgggatgttggaggacagaagacaatcatgtcttactggagaaattactttgagcagactaatgggttagtttggtttgctgatagttcagacataaggaggcttgatgattgccgtgctgaactccacaatctcttgaaagaagaggataaaggtttacctatctaggcagtgttctattgttgatttttgcaaataagcaagacatgcaaggagctctaaaaccaactggaatcgcgaagattttacttagttcgatgtgggagcaaaaggatatgccaaattgaatgtagtttcatcagttatgctctattatggatgttcagaggcatccaatttcagtgtgtactgcaatacttgggtccacctgtttaagaagcgctacgcggacttccacggccgcgctgccgatctcgtccacggcctccggggcacggcgatgcccaggagacaggccctcgaggaagagcaatgtacagaagagaaaggtatctcgactattccaaagcacaagtatgcatccaaagcctgttccccaaaaggaacctttatctgcagctctctctgcgcttactcttgttgtgcaatttaatgggtggctatcatttttcctcttgctttattataaacttcctctgcggccagaaactcacaagacatactatgaatacactggcttgtggcacatctatgggctccttgccatgaattcatggttctggagtgccatatatcacagttgtgacacaatttggacagaaaaagctatatttttcatcagatgctgcctttctagggtattccctcattttgacgatagttgattaatcattctggaacttgtactaacaattgaagcaagtggaggcatagcaccaattgtgtctgtgctgcagctctggatgtcagtagacaagaggtgtatcagagagaagcacttcaaggttaatttgttgagcaaattggagatgctggattttgtattttggttgctcatgggtggtgaatgatctgacgacttcagaagaggatagatctgagattacctttcatgcatgtcaaggaagttaagtagctgatgccatcaaagcaatggagaaacgtcaggtgaaccgcgagcagaattctgtggcgcatttgttagcgcagttagttaggactctgttcatacaactgttcgattaagccaaatacctaatttagttttatattggttgttgtcaaagaatttgtgaaatattgaggttgataatatatgtggcgttcgtttttatgtaatcattgttcactaatattttgtcgaatattttatattatatagacattactaagaacgtaaggggtcgctcgtgctctgtaaaggtacaaacaatcatgattgtggaggagcgtgacggcg

SEQ ID NO: 58178 - DNA, 2150 bp, Zea Mays
gcctattgccttgcctgccccttccatcctccttccccacccctccttccatcctcgcccgcgcgctccacacgtccccgccgtcgcgctcgccttccatcctcctccccaccccctccttccatcctcgctcgcgcgctccgcatgtccccgccgtcgcgctcgcctccctcctctttgttgcctccgcgtcggcctccaccccgctctccgacacgcttgccgtcgtcttggatttctggtgcactctcttctctacgacgcgagcaagggcggcgcttgccatggcatcgacgggaaccaggcatcactctccctatctcttgggatggtacaggcaggaggatcaggccaccgtcgaggaacgcgctcttcgctgtgttccagcgagaagatgagggatcgagggcggcgcaggtggcgagctcgtgggcggaacagactggtgagagcaagaggatggatcaggagcttgagccccagagacatgccagtgaggagcagtttagtcggttcttgctttatgaagtggatgcaattagaaagacgtacgagcgggccaacatctcgcggtggctcgccttgggcaaccggacctgcccgaccacgatgcaggagctctaggacgacgccctcacccccaacgccactctccgacaactcatcgccgcctgtttatcttagatattgtttgaacgtatgggatgttggaggacagaagacaatcatgtcttactggagaaattactttgagcagactaatgggttagtttggtttgctgatagttcagacataaggaggcttgatgattgccgtgctgaactccacaatctcttgaaagaagaggataaaggtttacctatctaggcagtgttctattgttgatttttgcaaataagcaagacatgcaaggagctctaaaaccaactggaatcgcgaagattttacttagttcgatgtgggagcaaaaggatatgccaaattgaatgtagtttcatcagttatgctctattatggatgttcagaggcatccaatttcagtgtgtactgcaatacttgggtccacctagtcactctccgacagctcatcgccgcttggttctcctgtcggtacacaaggtttaagaagcgctacgcggacttccacggccgcgctgccgatctcgtccacggcctccggggcacggcgatgcccaggagacaggccctcgaggaagagcaatgtacagaagagaaaggtatctcgactattccaaagcacaagtatgcatccaaagcctgttccccaaaaggaacctttatctgcagctctctctgcgcttactcttgttgtgcaatttaatgggtggctatcatttttcctcttgctttattataaacttcctctgcggccagaaactcacaagacatactatgaatacactggcttgtggcacatctatgggctccttgccatgaattcatggttctggagtgccatatatcacagttgtgacacaatttggacagaaaaagctatatttttcatcagatgctgcctttctagggtattccctcattttgacgatagttgattaatcattctggaacttgtactaacaattgaagcaagtggaggcatagcaccaattgtgtctgtgctgcagctctggatgtcagtagacaagaggtgtatcagagagaagcacttcaaggttaatttgttgagcaaattggagatgctggattttgtattttggttgctcatgggtggtgaatgatctgacgacttcagaagaggatagatctgagattacctttcatgcatgtcaaggaagttaagtagctgatgccatcaaagcaatggagaaacgtcaggtgaaccgcgagcagaattctgtggcgcatttgttagcgcagttagttaggactctgttcatacaactgttcgattaagccaaatacctaatttagttttatattggttgttgtcaaagaatttgtgaaatattgaggttgataatatatgtggcgttcgtttttatgtaatcattgttcactaatattttgtcgaatattttatattatatagacattactaagaacgtaaggggtcgctcgtgctctgtaaaggtacaaacaatcatgattgtggaggagcgtgacggcg

SEQ ID NO: 58179 - DNA, 2903 bp, Zea Mays
gcctattgccttgcctgccccttccatcctccttccccacccctccttccatcctcgcccgcgcgctccacacgtccccgccgtcgcgctcgccttccatcctcctccccaccccctccttccatcctcgctcgcgcgctccgcatgtccccgccgtcgcgctcgcctccctcctctttgttgcctccgcgtcggcctccaccccgctctccgacacgcttgccgtcgtcttggatttctggtgcactctcttctctacgacgcgagcaagggcggcgcttgccatggcatcgacgggaaccaggcatcactctccctatctcttgggtacgcgtttatttcatctctagggtctagagtttagtagcaccgccgccaacatccccgccgttgcgacaagcaccgaccgctcgcttccccctccctcctctcgtcggcgccaacgagccgcatgccgtgtgtcgtgtgggtcggctacccgggtatcggcgccagcgagccctcgccccccatccccctgccaatctcggcgtcggcgcgccgctcgccatccccgcaggccacgcccatgcccccgcctccatagtccctgtcatcggcgacctcagatccaacaggatggtacaggcaggaggatcaggccaccgtcgaggaacgcgctcttcgctgtgttccagcgagaagatgagggatcgagggcggcgcaggtggcgagctcgtgggcggaacagactggtgagagcaagaggatggatcaggagcttgagccccaggaggggagctgtttgagcggatgcccaccaggaacaatgtttcctagatcacgatgtttgggccacttttggaagaggtcagggatgacatgttttcaagcttggaggacatcaccaacgcaccatatgcagatctgctctctattaattcaatgaggaaaggaaaggggtcatagaaattagtcttggcagatggaggggaacgtctcaatgactgaggcacatttttactaaattatccctaaattatttgtatttttaaaataacatgtaatcttgttgatctggtttactcaagatgcatcaagtttgtacttggagaagaatcctggagttattttacttgtttccttgatttgtagagacatgccagtgaggagcagtttagtcggttcttgctttatgaagtggatgcaattagaaagacgtacgagcgggccaacatctcgcggtggctcgccttgggcaaccggacctgcccgaccacgatgcaggagctctaggacgacgccctcacccccaacgccactctccgacaactcatcgccgcctggttctcccgcctgtttatcttagatattgtttgaacgtatgggatgttggaggacagaagacaatcatgtcttactggagaaattactttgagcagactaatgggttagtttggtttgctgatagttcagacataaggaggcttgatgattgccgtgctgaactccacaatctcttgaaagaagaggataaaggtttacctatctaggcagtgttctattgttgatttttgcaaataagcaagacatgcaaggagctctaaaaccaactggaatcgcgaaggtaagcgaacttcagtcatttattatatgcattagagacatgttttcctgtctatgacatcatttttaacttgtactgtgtttttccggtcctcatggttgccaagattttacttagttcgatgtgggagcaaaaggatatgccaaattgaatgtagtttcatcagttatgctctattatggatgttcagaggcatccaatttcagtgtgtactgcaatacttgggtccacctgtacgtggtagatgttctgcattttgttttcttataaattagatttggcttccattatgttgttctcttttggaacagagtcactctccgacagctcatcgccgcttggttctcctgtcggtacacaaggtttaagaagcgctacgcggacttccacggccgcgctgccgatctcgtccacggcctccggggcacggcgatgcccaggagacaggccctcgaggaagagcaatgtacagaagagaaaggtatctcgactattccaaagcacaagtatgcatccaaagcctgttccccaaaaggaacctttatctgcagctctctctgcgcttactcttgttgtgcaatttaatgggtggctatcatttttcctcttgctttattataaacttcctctgcggccagaaactcacaagacatactatgaatacactggcttgtggcacatctatgggctccttgccatgaattcatggttctggagtgccatatatcacagttgtgacacaatttggacagaaaaagctatatttttcatcagatgctgcctttctagggtattccctcattttgacgatagttggtgtatcagagagaagcacttcaaggttaatttgttgagcaaattggagatgctggattttgtattttggttgctcatgggtggtgaatgatctgacgacttcagaagaggatagatctgagattacctttcatgcatgtcaaggaagttaagtagctgatgccatcaaagcaatggagaaacgtcaggtgaaccgcgagcagaattctgtggcgcatttgttagcgcagttagttaggactctgttcatacaactgttcgattaagccaaatacctaatttagttttatattggttgttgtcaaagaatttgtgaaatattgaggttgataatatatgtggcgttcgtttttatgtaatcattgttcactaatattttgtcgaatattttatattatatagacattactaagaacgtaaggggtcgctcgtgctctgtaaaggtacaaacaatcatgattgtggaggagcgtgacggcg

SEQ ID NO: 58180 - DNA, 2647 bp, Zea Mays
gcctattgccttgcctgccccttccatcctccttccccacccctccttccatcctcgcccgcgcgctccacacgtccccgccgtcgcgctcgccttccatcctcctccccaccccctccttccatcctcgctcgcgcgctccgcatgtccccgccgtcgcgctcgcctccctcctctttgttgcctccgcgtcggcctccaccccgctctccgacacgcttgccgtcgtcttggatttctggtgcactctcttctctacgacgcgagcaagggcggcgcttgccatggcatcgacgggaaccaggcatcactctccctatctcttgggtacgcgtttatttcatctctagggtctagagtttagtagcaccgccgccaacatccccgccgttgcgacaagcaccgaccgctcgcttccccctccctcctctcgtcggcgccaacgagccgcatgccgtgtgtcgtgtgggtcggctacccgggtatcggcgccagcgagccctcgccccccatccccctgccaatctcggcgtcggcgcgccgctcgccatccccgcaggccacgcccatgcccccgcctccatagtccctgtcatcggcgacctcagatccaacaggatggtacaggcaggaggatcaggccaccgtcgaggaacgcgctcttcgctgtgttccagcgagaagatgagggatcgagggcggcgcaggtggcgagctcgtgggcggaacagactggtgagagcaagaggatggatcaggagcttgagccccagagacatgccagtgaggagcagtttagtcggttcttgctttatgaagtggatgcaattagaaagacgtacgagcgggccaacatctcgcggtggctcgccttgggcaaccggacctgcccgaccacgatgcaggagctctaggacgacgccctcacccccaacgccactctccgacaactcatcgccgcctggttctcccgcctgtttatcttagatattgtttgaacgtatgggatgttggaggacagaagacaatcatgtcttactggagaaattactttgagcagactaatgggttagtttggtttgctgatagttcagacataaggaggcttgatgattgccgtgctgaactccacaatctcttgaaagaagaggataaaggtttacctatctaggcagtgttctattgttgatttttgcaaataagcaagacatgcaaggagctctaaaaccaactggaatcgcgaaggtaagcgaacttcagtcatttattatatgcattagagacatgttttcctgtctatgacatcatttttaacttgtactgtgtttttccggtcctcatggttgccaagattttacttagttcgatgtgggagcaaaaggatatgccaaattgaatgtagtttcatcagttatgctctattatggatgttcagaggcatccaatttcagtgtgtactgcaatacttgggtccacctgtacgtggtagatgttctgcattttgttttcttataaattagatttggcttccattatgttgttctcttttggaacagagtcactctccgacagctcatcgccgcttggttctcctgtcggtacacaaggtttaagaagcgctacgcggacttccacggccgcgctgccgatctcgtccacggcctccggggcacggcgatgcccaggagacaggccctcgaggaagagcaatgtacagaagagaaaggtatctcgactattccaaagcacaagtatgcatccaaagcctgttccccaaaaggaacctttatctgcagctctctctgcgcttactcttgttgtgcaatttaatgggtggctatcatttttcctcttgctttattataaacttcctctgcggccagaaactcacaagacatactatgaatacactggcttgtggcacatctatgggctccttgccatgaattcatggttctggagtgccatatatcacagttgtgacacaatttggacagaaaaagctatatttttcatcagatgctgcctttctagggtgtatcagagagaagcacttcaaggttaatttgttgagcaaattggagatgctggattttgtattttggtaggtgatgtatgcttttcagcatggcgtattttattgaactggtcaagtcctgcagaagctgaaactgatcatggataagactttgccttgtgtcacaatgggtgcatttgctggtggtccttggatcaggttgctcatgggtggtgaatgatctgacgacttcagaagaggatagatctgagattacctttcatgcatgtcaaggaagttaagtagctgatgccatcaaagcaatggagaaacgtcaggtgaaccgcgagcagaattctgtggcgcatttgttagcgcagttagttaggactctgttcatacaactgttcgattaagccaaatacctaatttagttttatattggttgttgtcaaagaatttgtgaaatattgaggttgataatatatgtggcgttcgtttttatgtaatcattgttcactaatattttgtcgaatattttatattatatagacattactaagaacgtaaggggtcgctcgtgctctgtaaaggtacaaacaatcatgattgtggaggagcgtgacggcg

SEQ ID NO: 58181 - DNA, 2438 bp, Zea Mays
gcctattgccttgcctgccccttccatcctccttccccacccctccttccatcctcgcccgcgcgctccacacgtccccgccgtcgcgctcgccttccatcctcctccccaccccctccttccatcctcgctcgcgcgctccgcatgtccccgccgtcgcgctcgcctccctcctctttgttgcctccgcgtcggcctccaccccgctctccgacacgcttgccgtcgtcttggatttctggtgcactctcttctctacgacgcgagcaagggcggcgcttgccatggcatcgacgggaaccaggcatcactctccctatctcttgggatggtacaggcaggaggatcaggccaccgtcgaggaacgcgctcttcgctgtgttccagcgagaagatgagggatcgagggcggcgcaggtggcgagctcgtgggcggaacagactggtgagagcaagaggatggatcaggagcttgagccccaggaggggagctgtttgagcggatgcccaccaggaacaatgtttcctagatcacgatgtttgggccacttttggaagaggtcagggatgacatgttttcaagcttggaggacatcaccaacgcaccatatgcagatctgctctctattaattcaatgaggaaaggaaaggggtcatagaaattagtcttggcagatggaggggaacgtctcaatgactgagagacatgccagtgaggagcagtttagtcggttcttgctttatgaagtggatgcaattagaaagacgtacgagcgggccaacatctcgcggtggctcgccttgggcaaccggacctgcccgaccacgatgcaggagctctaggacgacgccctcacccccaacgccactctccgacaactcatcgccgcctggttctcccgcctggtttctgcattttgttttcttatctgtcaatcatgtttttccatattactgcaggtgggtctgattaattatttaaatgtagtttatcttagatattgtttgaacgtatgggatgttggaggacagaagacaatcatgtcttactggagaaattactttgagcagactaatgggttagtttggtttgctgatagttcagacataaggaggcttgatgattgccgtgctgaactccacaatctcttgaaagaagaggataaaggtttacctatctaggcagtgttctattgttgatttttgcaaataagcaagacatgcaaggagctctaaaaccaactggaatcgcgaagattttacttagttcgatgtgggagcaaaaggatatgccaaattgaatgtagtttcatcagttatgctctattatggatgttcagaggcatccaatttcagtgtgtactgcaatacttgggtccacctagtcactctccgacagctcatcgccgcttggttctcctgtcggtacacaaggtttaagaagcgctacgcggacttccacggccgcgctgccgatctcgtccacggcctccggggcacggcgatgcccaggagacaggccctcgaggaagagcaatgtacagaagagaaaggtatctcgactattccaaagcacaagtatgcatccaaagcctgttccccaaaaggaacctttatctgcagctctctctgcgcttactcttgttgtgcaatttaatgggtggctatcatttttcctcttgctttattataaacttcctctgcggccagaaactcacaagacatactatgaatacactggcttgtggcacatctatgggctccttgccatgaattcatggttctggagtgccatatatcacagttgtgacacaatttggacagaaaaagctatatttttcatcagatgctgcctttctaggattaatcattctggaacttgtactaacaattgaagcaagtggaggcatagcaccaattgtgtctgtgctgcagctctggatgtcagtagacaagaggtgtatcagagagaagcacttcaaggttaatttgttgagcaaattggagatgctggattttgtattttggttgctcatgggtggtgaatgatctgacgacttcagaagaggatagatctgagattacctttcatgcatgtcaaggaagttaagtagctgatgccatcaaagcaatggagaaacgtcaggtgaaccgcgagcagaattctgtggcgcatttgttagcgcagttagttaggactctgttcatacaactgttcgattaagccaaatacctaatttagttttatattggttgttgtcaaagaatttgtgaaatattgaggttgataatatatgtggcgttcgtttttatgtaatcattgttcactaatattttgtcgaatattttatattatatagacattactaagaacgtaaggggtcgctcgtgctctgtaaaggtacaaacaatcatgattgtggaggagcgtgacggcg

SEQ ID NO: 58182 - DNA, 2464 bp, Zea Mays
gcctattgccttgcctgccccttccatcctccttccccacccctccttccatcctcgcccgcgcgctccacacgtccccgccgtcgcgctcgccttccatcctcctccccaccccctccttccatcctcgctcgcgcgctccgcatgtccccgccgtcgcgctcgcctccctcctctttgttgcctccgcgtcggcctccaccccgctctccgacacgcttgccgtcgtcttggatttctggtgcactctcttctctacgacgcgagcaagggcggcgcttgccatggcatcgacgggaaccaggcatcactctccctatctcttgggatggtacaggcaggaggatcaggccaccgtcgaggaacgcgctcttcgctgtgttccagcgagaagatgagggatcgagggcggcgcaggtggcgagctcgtgggcggaacagactggtgagagcaagaggatggatcaggagcttgagccccaggaggggagctgtttgagcggatgcccaccaggaacaatgtttcctagatcacgatgtttgggccacttttggaagaggtcagggatgacatgttttcaagcttggaggacatcaccaacgcaccatatgcagatctgctctctattaattcaatgaggaaaggaaaggggtcatagaaattagtcttggcagatggaggggaacgtctcaatgactgagagacatgccagtgaggagcagtttagtcggttcttgctttatgaagtggatgcaattagaaagacgtacgagcgggccaacatctcgcggtggctcgccttgggcaaccggacctgcccgaccacgatgcaggagctctaggacgacgccctcacccccaacgccactctccgacaactcatcgccgcctggttctcccgcctggtttctgcattttgttttcttatctgtcaatcatgtttttccatattactgcaggtgggtctgattaattatttaaatgtagtttatcttagatattgtttgaacgtatgggatgttggaggacagaagacaatcatgtcttactggagaaattactttgagcagactaatgggttagtttggtttgctgatagttcagacataaggaggcttgatgattgccgtgctgaactccacaatctcttgaaagaagaggataaaggtttacctatctaggcagtgttctattgttgatttttgcaaataagcaagacatgcaaggagctctaaaaccaactggaatcgcgaagattttacttagttcgatgtgggagcaaaaggatatgccaaattgaatgtagtttcatcagttatgctctattatggatgttcagaggcatccaatttcagtgtgtactgcaatacttgggtccacctagtcactctccgacagctcatcgccgcttggttctcctgtcggtacacaaggtttaagaagcgctacgcggacttccacggccgcgctgccgatctcgtccacggcctccggggcacggcgatgcccaggagacaggccctcgaggaagagcaatgtacagaagagaaaggtatctcgactattccaaagcacaagtatgcatccaaagcctgttccccaaaaggaacctttatctgcagctctctctgcgcttactcttgttgtgcaatttaatgggtggctatcatttttcctcttgctttattataaacttcctctgcggccagaaactcacaagacatactatgaatacactggcttgtggcacatctatgggctccttgccatgaattcatggttctggagtgccatatatcacagttgtgacacaatttggacagaaaaagctatatttttcatcagatgctgcctttctagggtattccctcattttgacgatagttgattaatcattctggaacttgtactaacaattgaagcaagtggaggcatagcaccaattgtgtctgtgctgcagctctggatgtcagtagacaagaggtgtatcagagagaagcacttcaaggttaatttgttgagcaaattggagatgctggattttgtattttggttgctcatgggtggtgaatgatctgacgacttcagaagaggatagatctgagattacctttcatgcatgtcaaggaagttaagtagctgatgccatcaaagcaatggagaaacgtcaggtgaaccgcgagcagaattctgtggcgcatttgttagcgcagttagttaggactctgttcatacaactgttcgattaagccaaatacctaatttagttttatattggttgttgtcaaagaatttgtgaaatattgaggttgataatatatgtggcgttcgtttttatgtaatcattgttcactaatattttgtcgaatattttatattatatagacattactaagaacgtaaggggtcgctcgtgctctgtaaaggtacaaacaatcatgattgtggaggagcgtgacggcg

SEQ ID NO: 58183 - DNA, 1349 bp, Zea Mays
atttttttcattttcccgctcaaacgactgccgcccccacaaccccactcgaaacaaatcccctcgtcatcgtccccaccgaaaccgcagtaccaccgtacccgcgccgacgtgagtacgatggcctcctacttcgccggtccggccatcgtgccgtcgcagcacgccaccgcggcgcccgacaattccgcggtcgccaccccttctccggctaagtcgcgtgacccccgcttctccggatccgcctccaccaccgttcgtcacatcgcccgctccttcgccgccgccgacgccaccggtgatggcgaccttgtcatccctatcgacggcgtcgacgccaccaacgtttggattctggggagggtggtgagcgtggtgaacatggaggccagcgtgtcgttcacgctcgacgacggcaccgggaagatcgcgctcacgcggtggatcgctgaagatattgatgctaaggaagtggctttcgttcagaatggtatatacctcaaggttcaagttactctcgtagggtttcaaactaagcagtatggttttgctcgcgctattcggcctgttaccaatttcaatgaagtggcgctgcacttcattgagtgtatttatttgcatttggaaaatgtacggcaaaagatgcaaggtcaattccctcgctccattcaagcaaatgtgtctacttatgagatgcaagctcaagttgctcacagtattcaaacaaaatcacctgcttatatgcccttttctggtggagctagagagcatcaagttgattttgctcctgaagtaaaccatgggcgattcctttcatcagttcaaacaaacacacctactcatgtacccttttctggtggagctagagaacagcaagttcactttactcctcaaccaaatcaattttcagcttacccaggtacaggtggtcatcagcacgatctgcagagtatggttttggaggttatgcaacgaccagatatacttgcacttgaaaatggagtacatgttgatgaagtggcaaggagacttggaatgccaagcgcacaaattctggccaccgcccagcgtcttgtcaatttggcatgcctctgttccactattgatgattatcatttcaagtctattaaatgattgatcaatgttaccatcttcaagacttggcattttagattattggcagtttttagatcggttagaaacttagaatgtcaaaccattggcatgctgcagttgctggatggatctgcttagtactgtttacttgtttactagaatgtcaaaccattgccaggtggagtaatatttacagcacgtcaatgaggatagcctaacagtcaatacaaaac

SEQ ID NO: 58184 - DNA, 1383 bp, Zea Mays
ctcttgagtacggatgcaaagctccaacaattcttcaaagtccagatttttatgttctcccaagtccagtgctcctgaataatggctaagttacccatgttaactgtagaatcgcaacacttattgaataatggctagacaaaaacaaaaaatgctatgaaaatgttcaagtctctttggtagatcactgaaccaacatattggaagactattgtactctgaaaggaactattaagtgtagagctttatgcaacagtatgtaatctgtatcaaaagatatgttagtaacaatagtagctaatacccttcccatgactcatgctagtttctttttctatatacatacagtataaaattctgtgtggcatacagaaatggtacaaaagatattaaattagtgacatgccactcttattcattattcctgttgcagtatatttaaaagcgtgagcagcagagtattaagagttatgcataccaaaatagttcggtggttcttggtgcaaaaaaacacaaccacgagattttagtatttgagttttgatttattttactattattattttggttgattctacatccctgagaactaggaaacttacagtggcgactgtctacctgctaatggctgttctgcaatactgcagatttgagtagttcgttgaatgtgtattttgatggaggcggaaacacttcttgaaaacctaatggtatataaagatcattattatgccaaaaccatcaataatatcatttatccgaaaaagatgcaaagcgtgttcaacagaagaacagattgcttggttagaggttcacatggatttttttaagtaaaaacatacttgttgctctatgaacaaagatgctagaattttgtggaagcaaatattttttagacaaattaattcagtccaattgaaaccgactaatctgatatgcaagaacagaagtgctttttcagaactctgtgatccagaaatgttttttttccagaacgtatgatctaaaatcagttatcattcattagtcagccaaatgtgatcagtttctaattgctcacctatcgaatttcacttaggatgctaatttcttaaagaattgataatgatagaattttggaattttgtagggcgttataaagtttgctatacttgacacattcgagcccacttgctgactaatccactacattaaataaccgaacctgacatgatggtttgaaccgttcgtgagtagacctggtactccctcggcagtctgctggacaaggacagaaagaaaagtaaacgaagggaacagttaaaatttacaaatgttaggctatggaatcatactactctaaatccatacttaaaaggaatattttgtcttggtcagcaaaat

SEQ ID NO: 58185 - DNA, 1799 bp, Zea Mays
aagacacatctcatccagtcataataagagataatatctcatacatagtcgtgttggaagttctcgcatagcttcaagaagttctcgcacagctttgtcttgtagttgctgctcgtgccccccggaccactgccttggcctcctcctgctggcgccacagcagaagatggatttttcgctggcatgcttgcgctgatggttgcgatgagatcacgcaacaagtcgctggcttgcttgatctggtcaaaattgccttccagctcgatgttctttaggttggggttagactcgtggtcgcggatggatagcttgacgcctgtaactctgcttagtgttgaccccacccttgtcgattatgcaaccggccagagaggcgtccacactgatctttcaatatatgagataaaataaaatacacaaacatctaaatcgtatattcaggcatattagagtaacaatataaacaaagcataataccatataataaaataatatttgaatctactcttacaaatacttcgaacactaaaaaagaatttccatttaattcaaacaccaccttgtaacatgtctatactaaatgcaccaaagcaagagtggaatgaacatcgatatgtatggtactcatctaacatcttaattaagtaaccagaggggaaaaagcaagttgatctagtgagatatattgaaacagagaagcttatatatcacgatttagtgttactattcaagtattccatatatctttggcatataaaatgaaacttccagataattgatttgttgtaagaagagtgaaaaaaagatacaggttaccgttctgatgttatttcgggtaggttaagactataacctgaaaaacttggtgcaaggcttcgatttgcttgatagaccagtttgaaatgactctgtgtctgtagcataaaattaattacattttctcatgtgttagaagtttgcattgtagttatcctgcagaaaatagctattatacagtcgaaaaaaagattgataaggtttctacacagataaataccatgtgtctgcatgtttcttcttgttcattgaactgatgaactgccaaattgaatttttattaatattcaagatccacaaggtggcttcattcccatatatgcttcagattactatttcttccgtaaaaaactgtctctttttaacagaatacatctacaactgtctctttttaacaaaatacatgtaaatgatgtttccagacttttagttctagaactaattttagtgtaccaaaattgtcgtgaggcacatacaggttgggagatttctccttgttggttgaactggtgaattgtccaattacatcgatcaagattcaagaggcaaaaggtgctttgacttccatatatgcttcaaattaccatttcttctctaaataactttcctcttttcaacaacatacatctagatgagccccatactatcacactatctgaactctactatgagttctaaactattttttactacattactattttatgaggcacatagtcctaactatatttgggaacacgcaggctttgtcaccattatgtacttacttagtactaatgtttttacttaagaggggtaagtttctcaaataagaatatgttattgtgctccttacctgttagcactggtgaagttttttatcagtagctagaaaaaaatgtgtatagcttcggcataggtagcagatataactgtgatacattccttcagatttcattgtattcttttgatccatcttcaagccacatacaacgctagccttt

SEQ ID NO: 58186 - DNA, 505 bp, Zea Mays
atgcttgcgctgatggttgcgatgagatcacgcaacaagtcgctggcttgcttgatctggtcaaaattgccttccagctcgatgttctttaggttggggttagactcgtggtcgcggatggatagcttgacgcctgtaactctgcttagtgttgaccccacccttgtcgattatgcaaccggccagagaggcgtccacactttgtagcgcttcccggcggctgcaaccccgttcgtcgtctccggccgggacctctttcaggccgtgacgattccctccatgcccagcctagcctcgcgtccagttgtagaggcgcaccggaaccctagccccccgatctgattcgctacgaggtcggaagcagagaagtgaaggaagactgctaggttgttgtttggtttctttatcaaaaacagagatcgggtcttgggcctcgatgaagcagggcggtggcggccgacatcttcgagttggagaagagagcgacgggtgttggagaagaaag

SEQ ID NO: 58187 - DNA, 3587 bp, Zea Mays
gcctccctctcgcccctgccacgtcagctctcgcctccactctcgcctctgctgctccagtgcacaggctgcagcagactacaacctcaggctatagcacacgtggaccaatcagaagccgccacctcactgtcgcccctcgctctcgcccgcgaagacgccatcgccaacacgtcgccccgctctcgcctgcctatcgtcggacggtggcagtagcacccgccaggtcgctctcgcccgcctcccgccccgctctcgcctgggcgctatcgccgtcactatagctggcaccagccttaccacaccccagcggcccctgccccgcacgccgtcctccctcccgcctgcgtcgccaggtctcggcgacgcaattattgccgcagcgaagcgacaggtgtggcgtcaatggggtgggtctgaccctgactgcccccatccatccgtcgcctacttgtcgcgtactagctagctccgggtggagtggagctagctagtcatggcagccatcatcatagccgtagagccatagccacacttgtcgctcgtcatcaagagctgccgagatagttgcggcagcaggcagcacagtgccgctccgtccgtccacgggctgtggctgtggtgtgcacacatatgcgccgccgccgctgccgctgccgccgccttgtcgtttgccctgtcgcggctctgctcggctgcgtgggctagtttacagccggagttgtacttcgcgttcgcggcggggggaaggagggggggagtaaagaatcggaggcgcgcgcggattggatgctgtgcgtgcgcgcggaggacgcgctggccgccgctgcagccgcggccgcagcgtccgacaagatgcgctccgtgaccctgggcgggacgatccagagggcggtgcggaggatggctggcggcgccggccggaggagaccccacgccttggcggactcggggaccgccgactcgtcggcgtcagcatcggccagctgctccggggatgatatcagcagcactggtagtgccaagagggaagcggtacaaaggtgcaccatgcatcggtacagatcgcagctagagcaggaagtgtgttttccttggcttatgaactctacaattctgaatttcgtagcatgctgttttcagttgaaaggatcccgctttgtttcgagctgtgatgggctctgttcctcttaaatggaagctggctgatgttggccgtggtgggcatgtggttatacgaaagttgaaaattgaagtcctctgatgaaatccattctctaaaatttgttccctgattatacgaaagttcgtcaaaatcatgttcatttttaactcatgccttcccatgtgcctttagtttcatcattaacagcaccattgtagttcaagcagttttccttgggcgccttttctatgacaggagaatatttttttgcaagttcaaaagaacaaaaaagaagatatttcttgatgtggttgtgtactgactgtgtaatgctctactcttgacatacctgtacaggttaacaaattgcaaaggcaactccaagaagagattgatttgcacatggcgttgacagatgccattacatataatgcggcgctgatacttaaggcatctatgaagcttcctgacaaggcacacgagctattgattagcatatcctctctggaaaccgctatcacaaagcttgaagaggatctacatcacctgcactaccagttatgtgatgcgaggaatgaaaggctacttgcagaaaataagccagaatgcttgctacctacagcgtcagattgccaaccttctacagcttgcgattgtacaagggaagagcctgaacaaacattaagatattcgagattcaaagattatcaccaagtggaggacggtttgtcaactgaacctgaagatcaacaagatgacgaaaaagacgccgaagatggagaacatgtatctctaaatatgctggtagaaaagcaccaagacgtttctttaactggactgttggaacacattttacacacaatgcaagaggcatgctctatggaaaatgaaggcaaagaagatcagaagatagatgcattaacatttagtcagcccaatttcaagaaaagcgacatgagtggaaatttgtggaataatccaaaccagctctctgaagagatggtgcgctcgatgaaagatatcttccttcatttatctgcatctcccaagatatcacgagaggagccttttgctaattcatcttcatcagcagaacgtctatctggttcaacattgactactttgtcagattcatctataatcgcctcagtgctgcggagtccttcgattgactggaacaacggcgatggtattattgatgatgttagaaactttgacccgtacaacgttaaaggcaaggaagcacggagagacgttgggagctattgttcagtagctgaagtgtcttggatgtatattggcaatgaacaacttgaatatgcatccggagctcttaaaaagttcaggtttcttgtggagcaactatcaaaggttgacccttcttgtatgaactgtgatgaacagatagcattttgggttaacttgtacaatgcattaataatgcatgcttatttggcatacggtgtccctgaaaatgacattaagctgttcgcgctaatgcaaaaggcctgttacacgatcggcgggcagcctgtcagtgcagccgaaatagagtttgtgattctgaagatgaagacaccggtgcaccggccacagctctccttgatgctggcccttcacaagtttaaaacgtcagagaacctcaggagatattcaatcgatggcactgagcctcgcgtcctcttcgcgctctgctgtgggatgttctcttctcctgcggtaaggatcttctctgctgaaaacgttcgagctgagcttcaggagtccatgagagactacatccgagcgtcagttggcataaacgacaagggagagctcgtagtccccaagctactgcagagctacgccaagggcatcgtggaggactccctgctcgccgactggatctgccgccatctgacactagaccaagtcgccgcgatccaggacacgtcgtcgtcgtcgtcgcataagcagcggcttcttggagtgcgcagcttcagcgtcatcccgttcgactcgaggttccggtacctgttcttgtccaacaacaccaggtgccagaattgaaacaagagtacaagactgcattgctatgcgcagacagccacaggagtgggtgcttgacaagttgacacttttttcgagagctgaaaatattagcttttgctgtacattctgtaaatttttccgttgactaggattcttctttgtacgtaacattcagctaactttttgtacatcaagcgaacccagaatacaagtgtagattcggtgatggttcagtctcaggttagtggcttgattaccgccaaggaacccaaaattacactgcaaattcacagccagtaaaaaaaatctgcatgttgcacatccaacaaactgagctatcgctgctactgaactttacaaggcgatttttccgtgactaggattcttcttt

SEQ ID NO: 58188 - DNA, 3000 bp, Zea Mays
gcctccctctcgcccctgccacgtcagctctcgcctccactctcgcctctgctgctccagtgcacaggctgcagcagactacaacctcaggctatagcacacgtggaccaatcagaagccgccacctcactgtcgcccctcgctctcgcccgcgaagacgccatcgccaacacgtcgccccgctctcgcctgcctatcgtcggacggtggcagtagcacccgccaggtcgctctcgcccgcctcccgccccgctctcgcctgggcgctatcgccgtcactatagctggcaccagccttaccacaccccagcggcccctgccccgcacgccgtcctccctcccgcctgcgtcgccaggtctcggcgacgcaattattgccgcagcgaagcgacaggtgtggcgtcaatggggtgggtctgaccctgactgcccccatccatccgtcgcctacttgtcgcgtactagctagctccgggtggagtggagctagctagtcatggcagccatcatcatagccgtagagccatagccacacttgtcgctcgtcatcaagagctgccgagatagttgcggcagcaggcagcacagtgccgctccgtccgtccacgggctgtggctgtggtgtgcacacatatgcgccgccgccgctgccgctgccgccgccttgtcgtttgccctgtcgcggctctgctcggctgcgtgggctagtttacagccggagttgtacttcgcgttcgcggcggggggaaggagggggggagtaaagaatcggaggcgcgcgcggattggatgctgtgcgtgcgcgcggaggacgcgctggccgccgctgcagccgcggccgcagcgtccgacaagatgcgctccgtgaccctgggcgggacgatccagagggcggtgcggaggatggctggcggcgccggccggaggagaccccacgccttggcggactcggggaccgccgactcgtcggcgtcagcatcggccagctgctccggggatgatatcagcagcactggtagtgccaagagggaagcggtacaaaggtgcaccatgcatcggtacagatcgcagctagagcaggaagttaacaaattgcaaaggcaactccaagaagagattgatttgcacatggcgttgacagatgccattacatataatgcggcgctgatacttaaggcatctatgaagcttcctgacaaggcacacgagctattgattagcatatcctctctggaaaccgctatcacaaagcttgaagaggatctacatcacctgcactaccagttatgtgatgcgaggaatgaaaggctacttgcagaaaataagccagaatgcttgctacctacagcgtcagattgccaaccttctacagcttgcgattgtacaagggaagagcctgaacaaacattaagatattcgagattcaaagattatcaccaagtggaggacggtttgtcaactgaacctgaagatcaacaagatgacgaaaaagacgccgaagatggagaacatgtatctctaaatatgctgatgcaagaggcatgctctatggaaaatgaaggcaaagaagatcagaagatagatgcattaacatttagtcagcccaatttcaagaaaagcgacatgagtggaaatttgtggaataatccaaaccagctctctgaagagatgaacgtctatctggttcaacattgactactttgtcagattcatctataatcgcctcagtgctgcggagtccttcgattgactggaacaacggcgatggtattattgatgatgttagaaactttgacccgtacaacgttaaaggcaaggaagcacggagagacgttgggagctattgttcagtagctgaagtgtcttggatgtatattggcaatgaacaacttgaatatgcatccggagctcttaaaaagttcaggtttcttgtggagcaactatcaaaggttgacccttcttgtatgaactgtgatgaacagatagcattttgggttaacttgtacaatgcattaataatgcatgcttatttggcatacggtgtccctgaaaatgacattaagctgttcgcgctaatgcaaaaggcctgttacacgatcggcgggcagcctgtcagtgcagccgaaatagagtttgtgattctgaagatgaagacaccggtgcaccggccacagctctccttgatgctggcccttcacaagtttaaaacgtcagagaacctcaggagatattcaatcgatggcactgagcctcgcgtcctcttcgcgctctgctgtgggatgttctcttctcctgcggtaaggatcttctctgctgaaaacgttcgagctgagcttcaggagtccatgagagactacatccgagcgtcagttggcataaacgacaagggagagctcgtagtccccaagctactgcagagctacgccaagggcatcgtggaggactccctgctcgccgactggatctgccgccatctgacactagaccaagtcgccgcgatccaggacacgtcgtcgtcgtcgtcgcataagcagcggcttcttggagtgcgcagcttcagcgtcatcccgttcgactcgaggttccggtacctgttcttgtccaacaacaccaggtgccagaattgaaacaagagtacaagactgcattgctatgcgcagacagccacaggagtgggtgcttgacaagttgacacttttttcgagagctgaaaatattagcttttgctgtacattctgtaaatttttccgttgactaggattcttctttgtacgtaacattcagctaactttttgtacatcaagcgaacccagaatacaagtgtagattcggtgatggttcagtctcaggttagtggcttgattaccgccaaggaacccaaaattacactgcaaattcacagccagtaaaaaaaatctgcatgttgcacatccaacaaactgagctatcgctgctactgaactttacaaggcgatttttccgtgactaggattcttcttt

SEQ ID NO: 58189 - DNA, 2121 bp, Zea Mays
cttttcccttgtgctagttcttcactgatgatatcagcagcactggtagtgccaagagggaagcggtacaaaggtgcaccatgcatcggtacagatcgcagctagagcaggaagttaacaaattgcaaaggcaactccaagaagagattgatttgcacatggcgttgacagatgccattacatataatgcggcgctgatacttaaggcatctatgaagcttcctgacaaggcacacgagctattgattagcatatcctctctggaaaccgctatcacaaagcttgaagaggatctacatcacctgcactaccagttatgtgatgcgaggaatgaaaggctacttgcagaaaataagccagaatgcttgctacctacagcgtcagattgccaaccttctacagcttgcgattgtacaagggaagagcctgaacaaacattaagatattcgagattcaaagattatcaccaagtggaggacggtttgtcaactgaacctgaagatcaacaagatgacgaaaaagacgccgaagatggagaacatgtatctctaaatatgctgatgcaagaggcatgctctatggaaaatgaaggcaaagaagatcagaagatagatgcattaacatttagtcagcccaatttcaagaaaagcgacatgagtggaaatttgtggaataatccaaaccagctctctgaagagatggtgcgctcgatgaaagatatcttccttcatttatctgcatctcccaagatatcacgagaggagccttttgctaattcatcttcatcagcagaacgtctatctggttcaacattgactactttgtcagattcatctataatcgcctcagtgctgcggagtccttcgattgactggaacaacggcgatggtattattgatgatgttagaaactttgacccgtacaacgttaaaggcaaggaagcacggagagacgttgggagctattgttcagtagctgaagtgtcttggatgtatattggcaatgaacaacttgaatatgcatccggagctcttaaaaagttcaggtttcttgtggagcaactatcaaaggttgacccttcttgtatgaactgtgatgaacagatagcattttgggttaacttgtacaatgcattaataatgcatgcttatttggcatacggtgtccctgaaaatgacattaagctgttcgcgctaatgcaaaaggcctgttacacgatcggcgggcagcctgtcagtgcagccgaaatagagtttgtgattctgaagatgaagacaccggtgcaccggccacagctctccttgatgctggcccttcacaagtttaaaacgtcagagaacctcaggagatattcaatcgatggcactgagcctcgcgtcctcttcgcgctctgctgtgggatgttctcttctcctgcggtaaggatcttctctgctgaaaacgttcgagctgagcttcaggagtccatgagagactacatccgagcgtcagttggcataaacgacaagggagagctcgtagtccccaagctactgcagagctacgccaagggcatcgtggaggactccctgctcgccgactggatctgccgccatctgacactagaccaagtcgccgcgatccaggacacgtcgtcgtcgtcgtcgcataagcagcggcttcttggagtgcgcagcttcagcgtcatcccgttcgactcgaggttccggtacctgttcttgtccaacaacaccaggtgccagaattgaaacaagagtacaagactgcattgctatgcgcagacagccacaggagtgggtgcttgacaagttgacacttttttcgagagctgaaaatattagcttttgctgtacattctgtaaatttttccgttgactaggattcttctttgtacgtaacattcagctaactttttgtacatcaagcgaacccagaatacaagtgtagattcggtgatggttcagtctcaggttagtggcttgattaccgccaaggaacccaaaattacactgcaaattcacagccagtaaaaaaaatctgcatgttgcacatccaacaaactgagctatcgctgctactgaactttacaaggcgatttttccgtgactaggattcttcttt

SEQ ID NO: 58190 - DNA, 2278 bp, Zea Mays
cgctttgtttcgagctgtgatgggctctgttcctcttaaatggaagctggctgatgttggccgtggtgggcatgtggttatacgaaagttgaaaattgaagtcctctgatgaaatccattctctaaaatttgttccctgattatacgaaagttcgtcaaaatcatgttcatttttaactcatgccttcccatgtgcctttagtttcatcattaacagcaccattgtagttcaagcagttttccttgggcgccttttctatgacaggagaatatttttttgcaagttcaaaagaacaaaaaagaagatatttcttgatgtggttgtgtactgactgtgtaatgctctactcttgacatacctgtacaggttaacaaattgcaaaggcaactccaagaagagattgatttgcacatggcgttgacagatgccattacatataatgcggcgctgatacttaaggcatctatgaagcttcctgacaaggcacacgagctattgattagcatatcctctctggaaaccgctatcacaaagcttgaagaggatctacatcacctgcactaccagttatgtgatgcgaggaatgaaaggctacttgcagaaaataagccagaatgcttgctacctacagcgtcagattgccaaccttctacagcttgcgattgtacaagggaagagcctgaacaaacattaagatattcgagattcaaagattatcaccaagtggaggacggtttgtcaactgaacctgaagatcaacaagatgacgaaaaagacgccgaagatggagaacatgtatctctaaatatgctgatgcaagaggcatgctctatggaaaatgaaggcaaagaagatcagaagatagatgcattaacatttagtcagcccaatttcaagaaaagcgacatgagtggaaatttgtggaataatccaaaccagctctctgaagagatgaacgtctatctggttcaacattgactactttgtcagattcatctataatcgcctcagtgctgcggagtccttcgattgactggaacaacggcgatggtattattgatgatgttagaaactttgacccgtacaacgttaaaggcaaggaagcacggagagacgttgggagctattgttcagtagctgaagtgtcttggatgtatattggcaatgaacaacttgaatatgcatccggagctcttaaaaagtttcttgtggagcaactatcaaaggttgacccttcttgtatgaactgtgatgaacagatagcattttgggttaacttgtacaatgcattaataatgcatgcttatttggcatacggtgtccctgaaaatgacattaagctgttcgcgctaatgcaaaaggcctgttacacgatcggcgggcagcctgtcagtgcagccgaaatagagtttgtgattctgaagatgaagacaccggtgcaccggccacagctctccttgatgctggcccttcacaagtttaaaacgtcagagaacctcaggagatattcaatcgatggcactgagcctcgcgtcctcttcgcgctctgctgtgggatgttctcttctcctgcggtaaggatcttctctgctgaaaacgttcgagctgagcttcaggagtccatgagagactacatccgagcgtcagttggcataaacgacaagggagagctcgtagtccccaagctactgcagagctacgccaagggcatcgtggaggactccctgctcgccgactggatctgccgccatctgacactagaccaagtcgccgcgatccaggacacgtcgtcgtcgtcgtcgcataagcagcggcttcttggagtgcgcagcttcagcgtcatcccgttcgactcgaggttccggtacctgttcttgtccaacaacaccaggtgccagaattgaaacaagagtacaagactgcattgctatgcgcagacagccacaggagtgggtgcttgacaagttgacacttttttcgagagctgaaaatattagcttttgctgtacattctgtaaatttttccgttgactaggattcttctttgtacgtaacattcagctaactttttgtacatcaagcgaacccagaatacaagtgtagattcggtgatggttcagtctcaggttagtggcttgattaccgccaaggaacccaaaattacactgcaaattcacagccagtaaaaaaaatctgcatgttgcacatccaacaaactgagctatcgctgctactgaactttacaaggcgatttttccgtgactaggattcttcttt

SEQ ID NO: 58191 - DNA, 816 bp, Zea Mays
cacggccgcacaggcacagccactgaccgtctggccgtgtgacggagcggcgacccctcccgttccgcatggagtcacgcgcgttcctggctcggcgaccaccggaagccggcaaccgcgaccggtcccggctgctgttgatcattgtgagccccttttctgggacggtttctgcagaactgggacaagaaaaaggaggcgacagcaacgggcgaagattcgcgtttttgcagtgggcgcttgtgtgttgtgttctggactggaggaagtggctggtgcatcgaagacgaagatatcattaacgtcgtggtcaatgcgcgcgtagtctgtggctgattgaggggagcaactggatggaggaggaggtgaggaagaggataatggcgctggcgcggccggggtgggtgggtgtgggtgagtgggcacggctgtgccccccgtttacttttggtgcgttggagagcgtcgggcgatgtgtacgtctgcgtcgctgtttgcctcggccctacggcgtagtgtctctgtccaccaaaaaaaaaaatagcacacaattttatgtccactcaaactcaagttgttttaattttgggccaaaagtgtaaaaaaaactattatcaatatatatggctttacataaatgtgtaataagaatatgtctcgtggcagatgtagttattatgataaatattagtatttttttctatataaatttagtctagtcttacttggtcttgttctgtaattgtattctttgcttgggattgtatccatccatgacctatatatgcatctatgtggtacggattgatgatggat

SEQ ID NO: 58192 - DNA, 771 bp, Zea Mays
gctgtttgctctctctgagtctcaggtggcgttgatctttcttcttcgtcttgttccccgagggagaatggcaaaggtatatgttgcagaaccatccagttgtgagccccttttctgggacggtttctgcagaactgggacaagaaaaaggaggcgacagcaacgggcgaagattcgcgtttttgcagtgggcgcttgtgtgttgtgttctggactggaggaagtggctggtgcatcgaagacgaagatatcattaacgtcgtggtcaatgcgcgcgtagtctgtggctgattgaggggagcaactggatggaggaggaggtgaggaagaggataatggcgctggcgcggccggggtgggtgggtgtgggtgagtgggcacggctgtgccccccgtttacttttggtgcgttggagagcgtcgggcgatgtgtacgtctgcgtcgctgtttgcctcggccctacggcgtagtgtctctgtccaccaaaaaaaaaaatagcacacaattttatgtccactcaaactcaagttgttttaattttgggccaaaagtgtaaaaaaaactattatcaatatatatggctttacataaatgtgtaataagaatatgtctcgtggcagatgtagttattatgataaatattagtatttttttctatataaatttagtctagtcttacttggtcttgttctgtaattgtattctttgcttgggattgtatccatccatgacctatatatgcatctatgtggtacggattgatgatggat

SEQ ID NO: 58193 - DNA, 2273 bp, Zea Mays
ggatcacaagctagatttcattaaatgcttggtactagtagtattattgacaacacaagagtacataccgctgatttaaataaactttagttgctccactaaaaactgtataccatggcccatggggattaggccgaggagaggagatccttctccggtggtccctacaaaccaggaccagcccgcacgaccacaagtgccagcgaggagtggcacctgggcatgccacgtgtgcagtgggcatcaccatagccccgattcaccaatgggaagagaccccttatccgctgctcttatcctccgcctgtggcctgtgctcagctgcgcgtagataacgaactctcccgccctcacaaaaccgcccttcacgatacgcacccaccagaggaaaagggcaaaagccaaaaggcatcaccgccgcgacgacgatggcagcctcgctccaagccgcggccaccctgatgcagccggccaagatcggcggccgggcgccctttgcctcgctgccgtcccgcccgtcgtcgcaactcgcctgcagggcgttcggcgtcgacgccggcgccgccaggatcacgtgctccctgcaggacgtcgccagcaggtgcgtcgacgccgcgaagctcgccggcttcgcgctcgccacctcggcgctcctcgtctcgggcgcgagcgcggagggcacgcccaagaggctgacctacgacgagatccagagcaaaacgtacatggaggtgaagggcacgggcacggcgaaccagtgcccgaccatcgacggcggcgtggagtcgttcccgttcaaggccggcaagtaccagatgaagaagctgtgcctggagccgacgtccttcaccgtcaaggcggagggcatcgccaagaacgccccgcccgagttccagaagaccaagctcatgacccgcctcacgtacacgctggacgagatcgagggcccgctcgaggtcggctccgacggcacgctcaagttcgaggagaaggacggcatcgactacgccgccgtcaccgtgcagctcccggggggcgagcgcgtgccgttcctcttcaccgtcaagcagctcgtcgccaccggcaagcccgagagcttcggcgggcccttcctcgtgcccagctaccgtggctcctccttcctcgaccccaagggccgcggcggctccaccggctacgacaacgccgtcgcgctccccgccgggggcagaggtgacgaggaggagctccagaaggagaacatcaagaacgccgcctcctccaccggcaacatcacgttgagcgtcaccaagagcaacccggagaccggcgaggtcatcggcgtcttcgagagcgtgcagccgtccgacaccgacctcggggccaaggcgcccaaggatgtcaagatccagggggtctggtacgctcagctcgagtgattcgagtgtctaactgctaggtgtccgaccgccgtcatggatcttgggaaggtgtatgtataccatggaaaactttggagagcagaggaggaatcgtgtatgtaatgtacttgttaatgcaaattcgggctgtcgcttttttactccgctaaattcccatagagtcacagcaaaacaatccactaaaaaaaaatctccataactgaagtccacaggcgctttaggatttagtcgtttttttccagccacaactgacttgtatatagtatagtatactagtattcaacacagcaagaactttcctcccgttgatttgatccaacgcttcctccccctttcaaccaggaacaacaaagaagggtgcaacccccatcgctttccctttcaaccaagaacaatcaagaagagaatgcttcagaaccaggaaactatatcagcattgtacagttcagcttaaattgaggtaaccaaacaaacagatagcatcctatgtctacacttgcactcaaggaggggggctaatcatgcacaggaagggggagctgcacatcacctgatcttacacaccagaacgagtcatcctgaaagaaacagtaaccatcgcgacgggcaagcaattaattaagcagaacacctctagtcgtcaactccattcattcgctgtccaagaagaggcttcaagaatttgtttcggggtcacaacgcaagtcttcacgaatccgtatgatcaatggggccagtcgctgttaatccagtgcttacaagaaatagcaaaaccaacagaattagaatcagccagcttgagggaagaagcgctgcaaaaaaaaaataaaattatagtccaagtattgcctt

SEQ ID NO: 58194 - DNA, 1811 bp, Zea Mays
cgataacagtatacctgtggtagtcgcccttcatcttgaggtagaataccttggactcggtgacattggttgaatggaatctatggaacagcaaaatcacaatggaacacgtgcatattgagccacatccattgaaaaatgaatgggggagaaatggcaagaaggatgatgacctgaaaaatgaagcattaccttttggtgatttctcttgtgggactatctctgcaagttcagactttgcaggagaggcagctctaaggctttgtaaagagcacaccgccgatgctgaaagtatatggaaccgttcagttgcgagtgtcataggttaaagagcacaatctatccaaaaaacactgaaaaagaactctaaaaaaggaaacaaaacacacaagaaccgaagccatggtccgaagcacaaaaaaggaatgtcaaatggcacgaagaaattgaggagtatcttgtggagatatcgtgtagccatggtccatatcatcagaggagcccatcctgcgcttgcccgacccaccagctagcaggctgccacctgccgctggcgtcgtcagccggcaagggcacgggcggcgtggagccatgaaatgacttacaaaatattagcttcaaagaaaaggacaaacttcaaatataaacatcactgtgtgctaaacacaaacttcaaatataaacttgtatcagtttctattttctactgaagctatgtttgtgtttagagaaacacaaacttcaaatattaacctgtgggaggggatgcggagcctacctggaaattgccgtagcagaggttggatcaatggtgaaaatttgacctgatacagcttaagccagaaccctttagcttcctctcacgcggctcttccagatccatgtgagaaaaaaatgtgacaggtcacatgcaagtaaggaaaaaacataccatgtttggatgtgattgaagagcacattccaatgccacatgggaagccttgcgtcccatcaagcgaataaagtagtaatactatcatttagagtaaagacacaaggcggatcagaaattagattcagtaattaaaattcataagaaaaaacttttggtagcatcttcggtaaaacttgattatatttttgcatataaaacagacataaaacaatcacttgatcatcgcttcacagtcatcatagactgcagggatagacatgggttagacactacattcttacttttcctaaactattaggcatatcaacacaaatcttaccgaaataggagtcgcaccacatcgccacttgttcactggattcttaagatttgtcactgtagtcatgtatccgttatccgttcaatccggcagctatgatgtggtagcacacatgccccaaaacctgagaccaataacccacgtgttaaaccaacatcaatcaatattctttattaaatgagctggtgagggacttgcgtaggcataatcgcaatcaaactttgcaggcagtgctcccctagcttggtagcccaagaagtgacagaatgcattaaacttctttcctttgtaagtgtcctccttctgcaaaaatggctgagaacattatgaacttacagtgataaagatctactgtttgcttgtgtacaacagagtccaaagaaagcataccaaacgtctgttcatctcagtctcaactaactgggctagcagcttttcagtctcaatctgcacaagtgcacagaaaaaaaatcgaggtcaaccagaagcaacaatttaaaacaaaattgatggtttacatttccatattctattgtacctaggaaagttgagctgaat

SEQ ID NO: 58195 - DNA, 609 bp, Zea Mays
aggaaatccatggcttccatggcaaaggtgtttctgttgagaatatctcttctcagctttcaccatgcttatataggattttcaaaaatgaacaaaaatagagcatgatcctaatctgatttgatccttaaattttagatcccattacgacccctacaaaaacttaacctttggttttaggtgcaacacaatctgattgcttgcttcatcaaattggttctgttcctctctagtttttttaagcttcactgtagcaactttcaatttagtattcacctgtaatctgagtttcagaatcacttttaaaaacaaacctctcatgtaaacattaccctctatgaataagtaaacctaactaacaaagattaatgttcacagcaaaatctgttggttgtctccaccctgaactgtttagcaaaaaaacagcaattttgccactatgtaagttgctgaaatattttggaagaaatatattgaacgatagatcttcatgaaggtggaaatagagagaatagtattgcctttttcagttctgcctcgagttgattcctttgctcctcaagtccagagatctaagcaactaattccttttacaaaacttaattgatt

SEQ ID NO: 58196 - DNA, 1125 bp, Zea Mays
tttgtttcaatgggaaatcatggggtgttgtatttctgtcaatatggatgtagagtaaatccttgttaacccattgacatatcatttagctaataaaaattactgtggtggtttgcagatgacaagctagtagcacaaaaattaccttttctataccactaacttcatttgttttggtgacccggaagataagagattcttccttttgtagcctgcattgtaaagcatagacaatcaattcactttaagcagagaatgctatttcaaatgttttgaaccaaataaatcagtggttctgaattgaacaacagcttgtattgcaagagttaacaacataacatatgtgtttaatcgatatataagtatgcaagcatgtttatgactgatacatgctaaattgctgagactaaatacacagcacaaagaatgctcaagatataaacctattttccatgatacgcttttctacttttgcagatgaatttgcaagggatttagacaaaacctttagtttatctgaaattagtgcatggtgggaataaaaggctgccaaaatcccaaggaaaaggcgacaacacttcaatgggggtggtaatctacacgttttgaaacatttggaaggaaagaaataggaggatcttccaaaacagctccatggacgcaagccaggtggcctccagaaccaaagaagacactgatctacatggaagggtgcttaggtttggcgccgaagatggaaggggatctccgagggggcgccgcgtgcaatggagcggagccggggaaggagagtgcgggcgtcgtggcgccgtgctgtttggggaaggggccgcggcgacagggggctgcaccggcgcggggaaaggaggcgggcaacacggtgacataccagagtgcagggtgagggaggtcgctgtccacgccatgggcgacgtcggggagaatcggtgcgtcgctgatgagggagcggatgcgcggacgggactggggtctggagggcagccatggggaggaggtgttggctcgccgctaagggctagagaagggaggtcgccggtggccaggaacgtggacggctgtggctcgccagggaagggggcgccgatggtggatctcgccgtgtaa

SEQ ID NO: 58197 - DNA, 913 bp, Zea Mays
gcttattgctgctctccttggtcgattgcccttcgttgaaatttcatggcacagaattgatgacctcttaccagctagtgatgatgcagtatctcgtgcagtgaatggaatgaagctgtacatggttgcgccatttttgacgggtcttaaggcttggattgccacacatcctccaccactgcatcagaaaccagagacatctgctagaggtactgtgtggagggcgaagggttcgtcgagcggcacaaccccagtggagaatcctgttgctaaagcaggatctgacgtgcagcacgctgccgaccgccctggttgcagcttcagaaacttcaggtttgacaccgcaagcatcctgcaggccatggaggcttccttcctacgcacctagaatcctgacgaagcatcaacacctgcacccttgatgtgtatagaccgcggaccagcgctatctgtgttgtcaatctgtctttgtttcgtctttctcgccttgtatctgtactcttcacagcaatcctgtcagacgcttgaacctgattttgctgctgccccgtttggtggtggttgtccataaagttctaacgatggtgctgcaaagtctggaaagggccgacttgcgatcttcgtgctgatggctcggatggggccaatccattgggccgctggagccactgcccgcgttgttctacaagagttagttatcctcgcggttgacacagaaaggataaaattgcaagttgtgtctcagtttggcactcgaagggagcttgtgtgggtgttgttgttttttttttgtcatggcagcgtcgtctctaactctaaaggataccgcagtttctccaggtattttgtttaatagcgttatgtacctactcagttgctgtgccatgatagtgtagcctctcaaaaaaaaaga

SEQ ID NO: 58198 - DNA, 4558 bp, Zea Mays
tgccccgcgagaccgcccgaccaccgctagccagtgaagtaaaaacgccaggcgccacgccgcgcggcgcgagtgggaacgataatgaagccgccgccgccgaagggacggggagcaggagggagttgcgtgttcggccgccgcgcgttcgcgttcctcctcgcggcggccgtcgtcgcgctcgcgctcctctgcctcttctacggcgccgccttcgcaccctccatccgccgcgcgcaccctcgccttcccctccggctgcggttcggggacctagggacgcaatctatcccagcgggcctcgtcgtctcctccatcccggtgtgcgacgcgaggcactcggagctgatcccgtgcttggaccggggcctccactaccagctccggctccggctcaatctctccctcatggagcactacgagcgccattgcccaccggcgccgcgccgcctcaactgcctcatcccaccgcccgacggctaccaggtgcccatcaggtggccgaggagcagggacgaggtctggaaggccaacataccccacccataccttgctgctgagaagtcagaccagcggtggatggtcgtcaatggcgataagatcaacttccctggcggtggcacccacttccccactggcgctggcaagtatattgtgcaccttgcgcagatgctgaattttccaaatggtacgctcaacaatggagggaacatcaggaatgtgcttgatgttggctgtggggttgccagcttctgcgcttaccttctttcacatgatgtacttgcgatgtctcttgctcccaacgacgtgcatgaaaatcaaatccagcttgcccttgagagagggatcccggcaacccttggtgtgctgggcacaaggaggctgccatacccattacccaagccgctcgtttgaaatggcacattgctctcgttgtcggattgactggctacagagggatggggtcttgttgctggaagtcgatagggtattaaggcctggaggatattttgtgtattcatcaccggaggcctatgctttggaccccttcaacaggaagatatggagacagatgagtgaccttgctcgaaggatgtgttggcgggttgcatctaagaagaaccagacagtgatatgggctaaaccattgactaatggatgctatatgaggagagagcctggaacacttccccccatgtgtgaacgtgatggtgactcagatgctgattggggtgtccccatgaaagtatgcctaaccccatactctaagagtaagttcattcccttcattttccttcagaacaccaaatacgataatagtgtatactgcctcgtggagtttgaattttatatcgattatacatgtagaaaaacacatggtgcaaaaacgctattgctcagattgcccatcaactgccaaccggctcaaacccatgtatgatttgctctgacatttgcaggaagacactatctatgtagatgtgtagatctcaatctcatagattactccctatttttttacaagttttgtccatgatccccacacccctttgttggttaccttctactatttttcgcacacacaccagaggggctatttttgtgcctttttttcttaaaataccgtaaacaattgtgttaagatagtcacaacacatagttactggtgaccattggtgaaatgattatcctataattttcaaacttttactattacaatatgaccgtacaatttgctagaattctgtacagcttccgtgctgaaccaccatatgtaatatgagaatcatagcattgtatttctggttgagttcaaacatgcatgttctggttttggaactaaaaaattaaattctccttgcatgtttcataaggaaatggtgaacctagttgtcattctatactaaatagctcactgctcacgtatcaatcatgtgttgggccctattggttattcgttttagcacaccggtaatctgttcccagcatgtttttttcacctaaacaggagttagtaaggctaaaggcagcgaattacttccctggccacaaaggctcacaacaccaccaccgtgcctggaagagcttggaatcagttggaacaatttttcagaggacaatgagatttggcattctagagtaattcagtactggaagcacatgaagttcgagatacaaaaggattcctttcgaaacgttatggatatgagtgctaaccttggtggatttgcagcatctctgaagaaaaagaatgtctgggttatgaatgtagttcctttcacggaatctggaaagctgaaaattatatatgatcgtggtttaatggggactacccatgactggtgtgaatcattctcgacatacccgcgcacctacgacctccttcacgcctggctcctgttttctgagatagagaagcggggatgtagcctggaggatcttctgatcgagatggaccgcatcctaaggccttatggttacgccatcatcagagacaaagttgatgtcgttacctacatcaagaaacttttaccagcgctaaggtgggacgacacaccagcgccgcggcagaaggagcaagggagaagaaggaaagcggcacccgccgcacatacgccgcgcggcggagccatggccgagctgcggcacgccacggcggcggcggcggcgacgcgcgccactggctccccttccaagcgcgacgccgaggccgcgtcctcgcccttggtcgcgtccccccgcgtcggcggcggcagggacgggctccgccctcaccagaggtggccgctcccgccccccgtccgcgccctcctcgcgtgcgaggaccccaggtcccccaccgcctccgcctcctaccggatcctggtcgcggccatcgcctgcttcgccctcgctgcgctcttctccgcgccttccctctgggcacgcctcaacgctccgtacctgtgccgcaaggaggggattcggctccactgccccagggtcagccagccagactctctgtgggagaatcctcatgcagcagcaacttcgtggaagccgtgtgctgagcgtcagagacatgaggtctcagacctcgtgtcagagaatgaaacttctgggtttatatttattcacgctgagggtggattaaaccagcaacgtatagctatatgtaatgctgttgcaattgctaagataatgaatgctacacttattctgccagtgctaaaacaggaccaaatatggaaagatcaaacgaaattcgaggacatctttgatgtagaccattttataaattatttgaaggaggatgtgcacattgttcgagatattcctgactggtttacagaaaaggatgaccttttcactagtataaagcgcactgtgaaaaatgtcccaaagtatgcatcagcacaattttatattgataatgtgcttccaaggatcaaggagaaaaagataatgtctatcaagccatttgttgataggttaggatatgataatgttccaatggagattaaccgactgaggtgccgagttaattatcatgctttgaagtttctacctgacattgaagaaatggctgacaagctagcaacaaggatgaggaatcgaacaggaagtttaaatccatacatggctcttcacttgcgatttgagaaaggaatggtgggcctttcattttgtgattttgctggaacccgggaggagaaagctatgatggctacttacagacaacaacaatggccaaggcggtacaagaatggatcacacttatggccactagcgctacaaaagagaaaaagaaggccgatgcccccttgagcctgggggaaataggaatcattttgcgcgcgatggggtatacgaaggaaactcagatatatgttgcatcagggcaggtgtatggtgggaacaacagaatggcacccttgaggaatatgttccccaatatggttagcaaagaagatctcgcaagcaaggaagagatggagcctttcaagaagcatgtaaccagccttgctgcgctggacttcctggtatgcctgaagtcggacgtgttcgtcatgacccacggcggcaatttcgccaagctgatcattggctaccgtcgctacatgggccgccacaggctcaagtcaatcaagccggacaagggtctcatgtccaagttcttcggtgacccttacatgccgtgggcgacgttcgtggaggacgtggtgataacccatcagacacggaccggcctccctgaacccaccttcccgcactatgacctatgggagaaccctctcaccccttgcatgtgtagagcttaaattacagtcagcgagtgatggtgcatagttattctttgtatcatatgctgatatgcaagctgcaaattttgtccaccttgtttatttttttttaccacttctgctgtacaagtttaacaaagcaaagctcagttcatcacgatcctctgcaatctttccctcctgaaaaatcttggtgatgtctaaatatgtaatctgatgtagctcttcatcagatgaatcacaaagttttatgtactccatcagatccaaacagt

SEQ ID NO: 58199 - DNA, 4048 bp, Zea Mays
tgccccgcgagaccgcccgaccaccgctagccagtgaagtaaaaacgccaggcgccacgccgcgcggcgcgagtgggaacgataatgaagccgccgccgccgaagggacggggagcaggagggagttgcgtgttcggccgccgcgcgttcgcgttcctcctcgcggcggccgtcgtcgcgctcgcgctcctctgcctcttctacggcgccgccttcgcaccctccatccgccgcgcgcaccctcgccttcccctccggctgcggttcggggacctagggacgcaatctatcccagcgggcctcgtcgtctcctccatcccggtgtgcgacgcgaggcactcggagctgatcccgtgcttggaccggggcctccactaccagctccggctccggctcaatctctccctcatggagcactacgagcgccattgcccaccggcgccgcgccgcctcaactgcctcatcccaccgcccgacggctaccaggtgcccatcaggtggccgaggagcagggacgaggtctggaaggccaacataccccacccataccttgctgctgagaagtcagaccagcggtggatggtcgtcaatggcgataagatcaacttccctggcggtggcacccacttccccactggcgctggcaagtatattgtgcaccttgcgcagatgctgaattttccaaatggtacgctcaacaatggagggaacatcaggaatgtgcttgatgttggctgtggggttgccagcttctgcgcttaccttctttcacatgatgtacttgcgatgtctcttgctcccaacgacgtgcatgaaaatcaaatccagcttgcccttgagagagggatcccggcaacccttggtgtgctgggcacaaggaggctgccatacccattacccaagccgctcgtttgaaatggcacattgctctcgttgtcggattgactggctacagagggatggggtcttgttgctggaagtcgatagggtattaaggcctggaggatattttgtgtattcatcaccggaggcctatgctttggaccccttcaacaggaagatatggagacagatgagtgaccttgctcgaaggatgtgttggcgggttgcatctaagaagaaccagacagtgatatgggctaaaccattgactaatggatgctatatgaggagagagcctggaacacttccccccatgtgtgaacgtgatggtgactcagatgctgattggggtgtccccatgaaagtatgcctaaccccatactctaagagagttagtaaggctaaaggcagcgaattacttccctggccacaaaggctcacaacaccaccaccgtgcctggaagagcttggaatcagttggaacaatttttcagaggacaatgagatttggcattctagagtaattcagtactggaagcacatgaagttcgagatacaaaaggattcctttcgaaacgttatggatatgagtgctaaccttggtggatttgcagcatctctgaagaaaaagaatgtctgggttatgaatgtagttcctttcacggaatctggaaagctgaaaattatatatgatcgtggtttaatggggactacccatgactggtgtgaatcattctcgacatacccgcgcacctacgacctccttcacgcctggctcctgttttctgagatagagaagcggggatgtagcctggaggatcttctgatcgagatggaccgcatcctaaggccttatggttacgccatcatcagagacaaagttgatgtcgttacctacatcaagaaacttttaccagcgctaaggtgggacgacacaccagcgccgcggcagaaggagcaagggagaagaaggaaagcggcacccgccgcacatacgccgcgcggcggagccatggccgagctgcggcacgccacggcggcggcggcggcgacgcgcgccactggctccccttccaagcgcgacgccgaggccgcgtcctcgcccttggtcgcgtccccccgcgtcggcggcggcagggacgggctccgccctcaccagaggtggccgctcccgccccccgtccgcgccctcctcgcgtgcgaggaccccaggtcccccaccgcctccgcctcctaccggatcctggtcgcggccatcgcctgcttcgccctcgctgcgctcttctccgcgccttccctctgggcacgcctcaacgctccgtacctgtgccgcaaggaggggattcggctccactgccccagggtcagccagccagactctctgtgggagaatcctcatgcagcagcaacttcgtggaagccgtgtgctgagcgtcagagacatgaggtctcagatatgtaatgctgttgcaattgctaagataatgaatgctacacttattctgccagtgctaaaacaggaccaaatatggaaagatcaaacgaaattcgaggacatctttgatgtagaccattttataaattatttgaaggaggatgtgcacattgttcgagatattcctgactggtttacagaaaaggatgaccttttcactagtataaagttagttgtttcattttcagctatccattgtgccttaactgctatctactgaatattggcgatactacttttttcatcaatataagcacttctttttttcatcaatataagcacttcgattgttagtgaggattattacatctcagccacatgaaccagaagggcaacctgactagcaattgctgctggacttgtattgttcacttttctttttgcaagagttattatccctacgtaattttttttgcagctagagattgtgtttgaactctcgccttaaggttttgtatgtttgttgtaacaggcgcactgtgaaaaatgtcccaaagtatgcatcagcacaattttatattgataatgtgcttccaaggatcaaggagaaaaagataatgtctatcaagccatttgttgataggttaggatatgataatgttccaatggagattaaccgactgaggtgccgagttaattatcatgctttgaagtttctacctgacattgaagaaatggctgacaagctagcaacaaggatgaggaatcgaacaggaagtttaaatccatacatggctcttcacttgcgatttgagaaaggaatggtgggcctttcattttgtgattttgctggaacccgggaggagaaagctatgatggctacttacagacaacaacaatggccaaggcggtacaagaatggatcacacttatggccactagcgctacaaaagagaaaaagaaggccgatgcccccttgagcctgggggaaataggaatcattttgcgcgcgatggggtatacgaaggaaactcagatatatgttgcatcagggcaggtgtatggtgggaacaacagaatggcacccttgaggaatatgttccccaatatggttagcaaagaagatctcgcaagcaaggaagagatggagcctttcaagaagcatgtaaccagccttgctgcgctggacttcctggtatgcctgaagtcggacgtgttcgtcatgacccacggcggcaatttcgccaagctgatcattggctaccgtcgctacatgggccgccacaggctcaagtcaatcaagccggacaagggtctcatgtccaagttcttcggtgacccttacatgccgtgggcgacgttcgtggaggacgtggtgataacccatcagacacggaccggcctccctgaacccaccttcccgcactatgacctatgggagaaccctctcaccccttgcatgtgtagagcttaaattacagtcagcgagtgatggtgcatagttattctttgtatcatatgctgatatgcaagctgcaaattttgtccaccttgtttatttttttttaccacttctgctgtacaagtttaacaaagcaaagctcagttcatcacgatcctctgcaatctttccctcctgaaaaatcttggtgatgtctaaatatgtaatctgatgtagctcttcatcagatgaatcacaaagttttatgtactccatcagatccaaacagt

SEQ ID NO: 58200 - DNA, 4125 bp, Zea Mays
tgccccgcgagaccgcccgaccaccgctagccagtgaagtaaaaacgccaggcgccacgccgcgcggcgcgagtgggaacgataatgaagccgccgccgccgaagggacggggagcaggagggagttgcgtgttcggccgccgcgcgttcgcgttcctcctcgcggcggccgtcgtcgcgctcgcgctcctctgcctcttctacggcgccgccttcgcaccctccatccgccgcgcgcaccctcgccttcccctccggctgcggttcggggacctagggacgcaatctatcccagcgggcctcgtcgtctcctccatcccggtgtgcgacgcgaggcactcggagctgatcccgtgcttggaccggggcctccactaccagctccggctccggctcaatctctccctcatggagcactacgagcgccattgcccaccggcgccgcgccgcctcaactgcctcatcccaccgcccgacggctaccaggtgcccatcaggtggccgaggagcagggacgaggtctggaaggccaacataccccacccataccttgctgctgagaagtcagaccagcggtggatggtcgtcaatggcgataagatcaacttccctggcggtggcacccacttccccactggcgctggcaagtatattgtgcaccttgcgcagatgctgaattttccaaatggtacgctcaacaatggagggaacatcaggaatgtgcttgatgttggctgtggggttgccagcttctgcgcttaccttctttcacatgatgtacttgcgatgtctcttgctcccaacgacgtgcatgaaaatcaaatccagcttgcccttgagagagggatcccggcaacccttggtgtgctgggcacaaggaggctgccatacccattacccaagccgctcgtttgaaatggcacattgctctcgttgtcggattgactggctacagagggatggggtcttgttgctggaagtcgatagggtattaaggcctggaggatattttgtgtattcatcaccggaggcctatgctttggaccccttcaacaggaagatatggagacagatgagtgaccttgctcgaaggatgtgttggcgggttgcatctaagaagaaccagacagtgatatgggctaaaccattgactaatggatgctatatgaggagagagcctggaacacttccccccatgtgtgaacgtgatggtgactcagatgctgattggggtgtccccatgaaagtatgcctaaccccatactctaagagagttagtaaggctaaaggcagcgaattacttccctggccacaaaggctcacaacaccaccaccgtgcctggaagagcttggaatcagttggaacaatttttcagaggacaatgagatttggcattctagagtaattcagtactggaagcacatgaagttcgagatacaaaaggattcctttcgaaacgttatggatatgagtgctaaccttggtggatttgcagcatctctgaagaaaaagaatgtctgggttatgaatgtagttcctttcacggaatctggaaagctgaaaattatatatgatcgtggtttaatggggactacccatgactggtgtgaatcattctcgacatacccgcgcacctacgacctccttcacgcctggctcctgttttctgagatagagaagcggggatgtagcctggaggatcttctgatcgagatggaccgcatcctaaggccttatggttacgccatcatcagagacaaagttgatgtcgttacctacatcaagaaacttttaccagcgctaaggtgggacgacacaccagcgccgcggcagaaggagcaagggagaagaaggaaagcggcacccgccgcacatacgccgcgcggcggagccatggccgagctgcggcacgccacggcggcggcggcggcgacgcgcgccactggctccccttccaagcgcgacgccgaggccgcgtcctcgcccttggtcgcgtccccccgcgtcggcggcggcagggacgggctccgccctcaccagaggtggccgctcccgccccccgtccgcgccctcctcgcgtgcgaggaccccaggtcccccaccgcctccgcctcctaccggatcctggtcgcggccatcgcctgcttcgccctcgctgcgctcttctccgcgccttccctctgggcacgcctcaacgctccgtacctgtgccgcaaggaggggattcggctccactgccccagggtcagccagccagactctctgtgggagaatcctcatgcagcagcaacttcgtggaagccgtgtgctgagcgtcagagacatgaggtctcagacctcgtgtcagagaatgaaacttctgggtttatatttattcacgctgagggtggattaaaccagcaacgtatagctatatgtaatgctgttgcaattgctaagataatgaatgctacacttattctgccagtgctaaaacaggaccaaatatggaaagatcaaacgaaattcgaggacatctttgatgtagaccattttataaattatttgaaggaggatgtgcacattgttcgagatattcctgactggtttacagaaaaggatgaccttttcactagtataaagttagttgtttcattttcagctatccattgtgccttaactgctatctactgaatattggcgatactacttttttcatcaatataagcacttctttttttcatcaatataagcacttcgattgttagtgaggattattacatctcagccacatgaaccagaagggcaacctgactagcaattgctgctggacttgtattgttcacttttctttttgcaagagttattatccctacgtaattttttttgcagctagagattgtgtttgaactctcgccttaaggttttgtatgtttgttgtaacaggcgcactgtgaaaaatgtcccaaagtatgcatcagcacaattttatattgataatgtgcttccaaggatcaaggagaaaaagataatgtctatcaagccatttgttgataggttaggatatgataatgttccaatggagattaaccgactgaggtgccgagttaattatcatgctttgaagtttctacctgacattgaagaaatggctgacaagctagcaacaaggatgaggaatcgaacaggaagtttaaatccatacatggctcttcacttgcgatttgagaaaggaatggtgggcctttcattttgtgattttgctggaacccgggaggagaaagctatgatggctacttacagacaacaacaatggccaaggcggtacaagaatggatcacacttatggccactagcgctacaaaagagaaaaagaaggccgatgcccccttgagcctgggggaaataggaatcattttgcgcgcgatggggtatacgaaggaaactcagatatatgttgcatcagggcaggtgtatggtgggaacaacagaatggcacccttgaggaatatgttccccaatatggttagcaaagaagatctcgcaagcaaggaagagatggagcctttcaagaagcatgtaaccagccttgctgcgctggacttcctggtatgcctgaagtcggacgtgttcgtcatgacccacggcggcaatttcgccaagctgatcattggctaccgtcgctacatgggccgccacaggctcaagtcaatcaagccggacaagggtctcatgtccaagttcttcggtgacccttacatgccgtgggcgacgttcgtggaggacgtggtgataacccatcagacacggaccggcctccctgaacccaccttcccgcactatgacctatgggagaaccctctcaccccttgcatgtgtagagcttaaattacagtcagcgagtgatggtgcatagttattctttgtatcatatgctgatatgcaagctgcaaattttgtccaccttgtttatttttttttaccacttctgctgtacaagtttaacaaagcaaagctcagttcatcacgatcctctgcaatctttccctcctgaaaaatcttggtgatgtctaaatatgtaatctgatgtagctcttcatcagatgaatcacaaagttttatgtactccatcagatccaaacagt

SEQ ID NO: 58201 - DNA, 2128 bp, Zea Mays
cgcgctcacccagtgcaccagaaccgtgggtccgagtcgtcagccgcgaccgcacccacctcgccgctaatggcggacgcgcgtcgggaaattggggataggtagttgaagaccgggtcgccctgctccttggactataagagctctaccatcgtaaccctctcctccgcatgtgccaacagcctctaccctaacgccgtagtccatcgccgagaacacagagagaggagtggaggtctagggcgccgccgacgtcgtctgcggtcgtcacctccgttcagtactcgcgtacaaattccggggaagcttcgtgtcgtgagggacctgggtagacctctcgcatgggaattggccggactcgcggggaatttctctctgtcgctcaaggttcgccgccgaccgcatcacaacgtggctgggaacctccgcaccataaacaccgagaggttacgaggatctgaagaatcaccttggtaactggaatctcaagtgccaggcaagttgtgctcttgaccacttttgttacccaataattttctttaatatcacttttctatgcataggtttaattttgatgagacccaataggtcaccctagtctgtttatcatttttaccttatttacccctgaatcacttgggtagttttgctattgctttacatggttttgggttaaaatttcattatatcattgttccaattattctgttatgttatttatgttcatgtcaagatcattaaattcttttaattggaacatggagcttaacttaagaaacacgtgccaccacaagggaggaatgggaccccttggctaactaattaggaaagctagtgaaagactaccttacccgaaatgggtaagggcagtaggggagttgcatgcaaggaggttctcgggttgattttgttgtgatggcggtcagacgggggattcttgcaagtgctcttcccataaactgtagcgggtttttggaagttagtggaactttgtaaaggcctcgtagtggatccctagccattcacctcggtagtgtctaagggccttgcaaaccctggcgacatgggaaacacgacttgtgggtaaatggtacaacctctgcagagcgtaaaactggtatactagccgagctcacggtcaagagcagctcaggactctcgcatgattaatttatggaacttaaattcaatttgtcatttgcatttgcatgggatttgttattaattttgttctattatttattatggtttggtattttcttacatttagtaattgctaataaaatttgtccaacttattaaaagcaatgctgagctttaacccctattgctgatcagccttacacatcacatgaacccccacctttgggtgagttcatgccacattattccccacaacttgttgagcgttgaacatgtgtgagctcacccttgttgtctcacaccccccacaggagatgaacaggtggttcaagaggagccatacaacgaggagtttgattcaattctaggtggtgtctccgagtcgactttctagcgctaaggatggattttagatcatgttatatttatcttttattttgtaagacttccgctatgtaataagtactctgattatattgtgatatttatctctatacactctgttattatatatgttgtcttctttggcgcatgtatgagatgcacctggctttgttccttaaatccgggtgtgacaggtaataactgatttattactaaaatttgtctctactgttagtaataaatacttggccaactaaaagcaactgcttaaccttaactccaccaacagctagtccactttagccaaacaggacatttgctgagtacgttgatgtgtactcacccttgctttaaaaaccaccccaccccaggttgtccccactatattcagtgctcaggaggagatgctggtaacatggaggactttgtggagtttcaggattatgacgagttctagttatgttagtggcaatcccccagtcagctgcctgtgaaggccttatcttctacatttcgtattccgcactttgattatgttaatgactatgttatagactctatggatgtcttggacatctttatgtaataaagtacctttccg

SEQ ID NO: 58202 - DNA, 2131 bp, Zea Mays
cgcgctcacccagtgcaccagaaccgtgggtccgagtcgtcagccgcgaccgcacccacctcgccgctaatggcggacgcgcgtcgggaaattggggataggtagttgaagaccgggtcgccctgctccttggactataagagctctaccatcgtaaccctctcctccgcatgtgccaacagcctctaccctaacgccgtagtccatcgccgagaacacagagagaggagtggaggtctagggcgccgccgacgtcgtctgcggtcgtcacctccgttcagtactcgcgtacaaattccggggaagcttcgtgtcgtgagggacctgggtagacctctcgcatgggaattggccggactcgcggggaatttctctctgtcgctcaaggttcgccgccgaccgcatcacaacgtggctgggaacctccgcaccataaacaccgtagagaggttacgaggatctgaagaatcaccttggtaactggaatctcaagtgccaggcaagttgtgctcttgaccacttttgttacccaataattttctttaatatcacttttctatgcataggtttaattttgatgagacccaataggtcaccctagtctgtttatcatttttaccttatttacccctgaatcacttgggtagttttgctattgctttacatggttttgggttaaaatttcattatatcattgttccaattattctgttatgttatttatgttcatgtcaagatcattaaattcttttaattggaacatggagcttaacttaagaaacacgtgccaccacaagggaggaatgggaccccttggctaactaattaggaaagctagtgaaagactaccttacccgaaatgggtaagggcagtaggggagttgcatgcaaggaggttctcgggttgattttgttgtgatggcggtcagacgggggattcttgcaagtgctcttcccataaactgtagcgggtttttggaagttagtggaactttgtaaaggcctcgtagtggatccctagccattcacctcggtagtgtctaagggccttgcaaaccctggcgacatgggaaacacgacttgtgggtaaatggtacaacctctgcagagcgtaaaactggtatactagccgagctcacggtcaagagcagctcaggactctcgcatgattaatttatggaacttaaattcaatttgtcatttgcatttgcatgggatttgttattaattttgttctattatttattatggtttggtattttcttacatttagtaattgctaataaaatttgtccaacttattaaaagcaatgctgagctttaacccctattgctgatcagccttacacatcacatgaacccccacctttgggtgagttcatgccacattattccccacaacttgttgagcgttgaacatgtgtgagctcacccttgttgtctcacaccccccacaggagatgaacaggtggttcaagaggagccatacaacgaggagtttgattcaattctaggtggtgtctccgagtcgactttctagcgctaaggatggattttagatcatgttatatttatcttttattttgtaagacttccgctatgtaataagtactctgattatattgtgatatttatctctatacactctgttattatatatgttgtcttctttggcgcatgtatgagatgcacctggctttgttccttaaatccgggtgtgacaggtaataactgatttattactaaaatttgtctctactgttagtaataaatacttggccaactaaaagcaactgcttaaccttaactccaccaacagctagtccactttagccaaacaggacatttgctgagtacgttgatgtgtactcacccttgctttaaaaaccaccccaccccaggttgtccccactatattcagtgctcaggaggagatgctggtaacatggaggactttgtggagtttcaggattatgacgagttctagttatgttagtggcaatcccccagtcagctgcctgtgaaggccttatcttctacatttcgtattccgcactttgattatgttaatgactatgttatagactctatggatgtcttggacatctttatgtaataaagtacctttccg

SEQ ID NO: 58203 - DNA, 2136 bp, Zea Mays
cccgaccctagtcgccaggcgcgccgtccggacgagaaagggcgggaagtggcggaggccttgtggcgtacgcggattccgctgcagagagcgcgccggacccatctcaggatgctcccaggaagaaggtggtggttcttgggactggctgggctgggacgtcgttcctcaagaacctcgactgctccaggtatgaagtgaaggtcatatcgccccggaactacttcgcgttcactcctctgcttccgagtgtcacgtgtgggactgtcgagccgcgcagcattattgaaccgaaaaacaaggatgtcacattttgtgaagccgagtgtttcaagattgatgcaaatagaaaaactgtacattgccgttctgctgttggaactaatcttgatgggaatggtgattttatgttggattatgactacttagttgttgctcttggggctactgtaagtacatttaacactcctggagtgctggagcactgctgctttttgaaggaagtagaggatgctcagaagatacggaagggtgtgatagattgttttgaaaaagcatcacttccaaatattagtgaagaagagaaaaggaaaatcctacattttgtagttattggtggtggacctactggagttgaatttgcagcagagatgcatgattttcttgtcgaagatttagtgaaactatatcctgccattcaagacctcgtgaagataacaattattcaatcggcagagcatatattgactatgtttgatgaaagaatagcttcatttgctgaacaaaagttcaagagggatggcatcgaagtgtgcacgggcttcagagtgataaaggtgtctgatgatttgattacaatgaagagaaaatctgatggtgaggagttatcagttccttacggaatggctgtttggtctgctggcattggtactcgtcctgtcgtcatggacttcatgcaacaaattgggcagaccaatcgtcgtgccttggcaactaacgagtggttaagggttcgcgagtgtgaaggcgtctatgcaattggcgactgtgctacagtgagtcaaagaaaaataatggacgatatttcaacagtattcaagatggcagacaaggacaattccggcaccttaacactaaaagagatcaatggtgttttagatgatatatgtataagatacccgcaagtagagctgtatatgaaaagcatgcacatgcttgacattgcggatttaataaaaggcgcagttggcgattctcacaaggagtccatggtggttgacatagaggagttcaagaaggctctgcgccacgttgactcccaggtgaaaaacgctccagcgacggcccaggtcgccgcacagcaagggcagtacctcgcccagtgtttcaacaagatggagaaatgcagagaggagcccgaaggccctctgcgcatggcaggggggtccggccgccacttcttccgcccgtttcgctacaagcacttcgggcagttcgcgcctctgggtggagaacaagccgctgcagagctcccgggcgactgggtctccatgggccacagcacgcagtggctctggtactccgtgtatgccagcaagcaagtgagctggcgcacgcgggtgctggtggtttccgactggactcgccgcttcatattcgggagggactcaagccggatctagctgccaaggattctcttctgcacaggggggggggggggggggttcgttccgtccgaagaataatcggtttcgctgctgctggagcttgagcaagcaaagctgtttccccgcgcctggccctgccggcgaaactgctgttctttcttctgctacatggtagatggctctcaaagcctcacgccggttactttcactgaggttttagctctggtttatttgatgtccataggttttcttcctttgcttgtgatctcaacacatccatcactatgattcatttgtgtgtgatacatattgcaacttcagttaaaatccaaccttttcttaggaacagggctctaaaatccagcgtcctcgtcagccttctctcacattggtcttctagtctcttatcacttttgtgcaatttattgtaaatctagtgtttgtcttacaaaatcaatgtcaatttatg

SEQ ID NO: 58204 - DNA, 2157 bp, Zea Mays
cccgaccctagtcgccaggcgcgccgtccggacgagaaagggcgggaagtggcggaggccttgtggcgtacgcggattccgctgcagagagcgcgccggacccatctcaggatgctcccaggaagaaggtggtggttcttgggactggctgggctgggacgtcgttcctcaagaacctcgactgctccaggtatgaagtgaaggtcatatcgccccggaactacttcgcgttcactcctctgcttccgagtgtcacgtgtgggactgtcgagccgcgcagcattattgaaccggtacggaggatgtttgagaagaaaaacaaggatgtcacattttgtgaagccgagtgtttcaagattgatgcaaatagaaaaactgtacattgccgttctgctgttggaactaatcttgatgggaatggtgattttatgttggattatgactacttagttgttgctcttggggctactgtaagtacatttaacactcctggagtgctggagcactgctgctttttgaaggaagtagaggatgctcagaagatacggaagggtgtgatagattgttttgaaaaagcatcacttccaaatattagtgaagaagagaaaaggaaaatcctacattttgtagttattggtggtggacctactggagttgaatttgcagcagagatgcatgattttcttgtcgaagatttagtgaaactatatcctgccattcaagacctcgtgaagataacaattattcaatcggcagagcatatattgactatgtttgatgaaagaatagcttcatttgctgaacaaaagttcaagagggatggcatcgaagtgtgcacgggcttcagagtgataaaggtgtctgatgatttgattacaatgaagagaaaatctgatggtgaggagttatcagttccttacggaatggctgtttggtctgctggcattggtactcgtcctgtcgtcatggacttcatgcaacaaattgggcagaccaatcgtcgtgccttggcaactaacgagtggttaagggttcgcgagtgtgaaggcgtctatgcaattggcgactgtgctacagtgagtcaaagaaaaataatggacgatatttcaacagtattcaagatggcagacaaggacaattccggcaccttaacactaaaagagatcaatggtgttttagatgatatatgtataagatacccgcaagtagagctgtatatgaaaagcatgcacatgcttgacattgcggatttaataaaaggcgcagttggcgattctcacaaggagtccatggtggttgacatagaggagttcaagaaggctctgcgccacgttgactcccaggtgaaaaacgctccagcgacggcccaggtcgccgcacagcaagggcagtacctcgcccagtgtttcaacaagatggagaaatgcagagaggagcccgaaggccctctgcgcatggcaggggggtccggccgccacttcttccgcccgtttcgctacaagcacttcgggcagttcgcgcctctgggtggagaacaagccgctgcagagctcccgggcgactgggtctccatgggccacagcacgcagtggctctggtactccgtgtatgccagcaagcaagtgagctggcgcacgcgggtgctggtggtttccgactggactcgccgcttcatattcgggagggactcaagccggatctagctgccaaggattctcttctgcacaggggggggggggggggggttcgttccgtccgaagaataatcggtttcgctgctgctggagcttgagcaagcaaagctgtttccccgcgcctggccctgccggcgaaactgctgttctttcttctgctacatggtagatggctctcaaagcctcacgccggttactttcactgaggttttagctctggtttatttgatgtccataggttttcttcctttgcttgtgatctcaacacatccatcactatgattcatttgtgtgtgatacatattgcaacttcagttaaaatccaaccttttcttaggaacagggctctaaaatccagcgtcctcgtcagccttctctcacattggtcttctagtctcttatcacttttgtgcaatttattgtaaatctagtgtttgtcttacaaaatcaatgtcaatttatg

SEQ ID NO: 58205 - DNA, 2480 bp, Zea Mays
gccgtccggacgagaaagggcgggaaggagtacctgggagtctgggacaggtcagaggcagctgctgctgcggatggacacgcgacacatccgcagcggctagccaatgagcggcgaccaagggagcaggtagtaggccgtgttctaggctggccttttccatcgcttttctcgccggtattattagcgcggatcgttcatcgttcgggattggggttctgactcggaacctgatcagtgagtgtggtcttctgaaagcgagcaaaggaggatggggttctccttcttcacctcccgagccggtgctcgactgctggacgggatcgcgcgccccggcttctccaccgccgcgcttctgctcacagcggccagtggcggaggccttgtggcgtacgcggattccgctgcagagagcgcgccggacccatctcaggatgctcccaggaagaaggtggtggttcttgggactggctgggctgggacgtcgttcctcaagaacctcgactgctccaggtatgaagtgaaggtcatatcgccccggaactacttcgcgttcactcctctgcttccgagtgtcacgtgtgggactgtcgagccgcgcagcattattgaaccggtacggaggatgtttgagaagaaaaacaaggatgtcacattttgtgaagccgagtgtttcaagattgatgcaaatagaaaaactgtacattgccgttctgctgttggaactaatcttgatgggaatggtgattttatgttggattatgactacttagttgttgctcttggggctactgtaagtacatttaacactcctggagtgctggagcactgctgctttttgaaggaagtagaggatgctcagaagatacggaagggtgtgatagattgttttgaaaaagcatcacttccaaatattagtgaagaagagaaaaggaaaatcctacattttgtagttattggtggtggacctactggagttgaatttgcagcagagatgcatgattttcttgtcgaagatttagtgaaactatatcctgccattcaagacctcgtgaagataacaattattcaatcggcagagcatatattgactatgtttgatgaaagaatagcttcatttgctgaacaaaagttcaagagggatggcatcgaagtgtgcacgggcttcagagtgataaaggtgtctgatgatttgattacaatgaagagaaaatctgatggtgaggagttatcagttccttacggaatggctgtttggtctgctggcattggtactcgtcctgtcgtcatggacttcatgcaacaaattgggcagaccaatcgtcgtgccttggcaactaacgagtggttaagggttcgcgagtgtgaaggcgtctatgcaattggcgactgtgctacagtgagtcaaagaaaaataatggacgatatttcaacagtattcaagatggcagacaaggacaattccggcaccttaacactaaaagagatcaatggtgttttagatgatatatgtataagatacccgcaagtagagctgtatatgaaaagcatgcacatgcttgacattgcggatttaataaaaggcgcagttggcgattctcacaaggagtccatggtggttgacatagaggagttcaagaaggctctgcgccacgttgactcccaggtgaaaaacgctccagcgacggcccaggtcgccgcacagcaagggcagtacctcgcccagtgtttcaacaagatggagaaatgcagagaggagcccgaaggccctctgcgcatggcaggggggtccggccgccacttcttccgcccgtttcgctacaagcacttcgggcagttcgcgcctctgggtggagaacaagccgctgcagagctcccgggcgactgggtctccatgggccacagcacgcagtggctctggtactccgtgtatgccagcaagcaagtgagctggcgcacgcgggtgctggtggtttccgactggactcgccgcttcatattcgggagggactcaagccggatctagctgccaaggattctcttctgcacaggggggggggggggggggttcgttccgtccgaagaataatcggtttcgctgctgctggagcttgagcaagcaaagctgtttccccgcgcctggccctgccggcgaaactgctgttctttcttctgctacatggtagatggctctcaaagcctcacgccggttactttcactgaggttttagctctggtttatttgatgtccataggttttcttcctttgcttgtgatctcaacacatccatcactatgattcatttgtgtgtgatacatattgcaacttcagttaaaatccaaccttttcttaggaacagggctctaaaatccagcgtcctcgtcagccttctctcacattggtcttctagtctcttatcacttttgtgcaatttattgtaaatctagtgtttgtcttacaaaatcaatgtcaatttatg

SEQ ID NO: 58206 - DNA, 2594 bp, Zea Mays
gtcgcatcgcatggtatatctaaacaagaaaaagggggaaagaagcgatagcgataggccatgtggacgtgtcacatgctggtcaggtggaagtcaattaggtcatgtaaagaaatgcagaatggccatgactcatcagagggagatgggaaattgccgaccggtgtataatacgaagtcttggacgtggatgagatctggaacttttttattcctgcattgcctcaaatctggggtaattttccttttatttttatttttttctggtaggagtacctgggagtctgggacaggtcagaggcagctgctgctgcggatggacacgcgacacatccgcagcggctagccaatgagcggcgaccaagggagcagcgagcaaaggaggatggggttctccttcttcacctcccgagccggtgctcgactgctggacgggatcgcgcgccccggcttctccaccgccgcgcttctgctcacagcggccagtggcggaggccttgtggcgtacgcggattccgctgcagagagcgcgccggacccatctcaggatgctcccaggaagaaggtggtggttcttgggactggctgggctgggacgtcgttcctcaagaacctcgactgctccaggtatgaagtgaaggtcatatcgccccggaactacttcgcgttcactcctctgcttccgagtgtcacgtgtgggactgtcgagccgcgcagcattattgaaccggtacggaggatgtttgagaagaaaaacaaggatgtcacattttgtgaagccgagtgtttcaagattgatgcaaatagaaaaactgtacattgccgttctgctgttggaactaatcttgatgggaatggtgattttatgttggattatgactacttagttgttgctcttggggctactgtaagtacatttaacactcctggagtgctggagcactgctgctttttgaaggaagtagaggatgctcagaagatacggaagggtgtgatagattgttttgaaaaagcatcacttccaaatattagtgaagaagagaaaaggaaaatcctacattttgtagttattggtggtggacctactggagttgaatttgcagcagagatgcatgattttcttgtcgaagatttagtgaaactatatcctgccattcaagacctcgtgaagataacaattattcaatcggcagagcatatattgactatgtttgatgaaagaatagcttcatttgctgaacaaaagttcaagagggatggcatcgaagtgtgcacgggcttcagagtgataaaggtgtctgatgatttgattacaatgaagagaaaatctgatggtgaggagttatcagttccttacggaatggctgtttggtctgctggcattggtactcgtcctgtcgtcatggacttcatgcaacaaattgggcagaccaatcgtcgtgccttggcaactaacgagtggttaagggttcgcgagtgtgaaggcgtctatgcaattggcgactgtgctacagtgagtcaaagaaaaataatggacgatatttcaacagtattcaagatggcagacaaggacaattccggcaccttaacactaaaagagatcaatggtgttttagatgatatatgtataagatacccgcaagtagagctgtatatgaaaagcatgcacatgcttgacattgcggatttaataaaaggcgcagttggcgattctcacaaggagtccatggtggttgacatagaggagttcaagaaggctctgcgccacgttgactcccaggtgaaaaacgctccagcgacggcccaggtcgccgcacagcaagggcagtacctcgcccagtgtttcaacaagatggagaaatgcagagaggagcccgaaggccctctgcgcatggcaggggggtccggccgccacttcttccgcccgtttcgctacaagcacttcgggcagttcgcgcctctgggtggagaacaagccgctgcagagctcccgggcgactgggtctccatgggccacagcacgcagtggctctggtactccgtgtatgccagcaagcaagtgagctggcgcacgcgggtgctggtggtttccgactggactcgccgcttcatattcgggagggactcaagccggatctagctgccaaggattctcttctgcacaggggggggggggggggggttcgttccgtccgaagaataatcggtttcgctgctgctggagcttgagcaagcaaagctgtttccccgcgcctggccctgccggcgaaactgctgttctttcttctgctacatggtagatggctctcaaagcctcacgccggttactttcactgaggttttagctctggtttatttgatgtccataggttttcttcctttgcttgtgatctcaacacatccatcactatgattcatttgtgtgtgatacatattgcaacttcagttaaaatccaaccttttcttaggaacagggctctaaaatccagcgtcctcgtcagccttctctcacattggtcttctagtctcttatcacttttgtgcaatttattgtaaatctagtgtttgtcttacaaaatcaatgtcaatttatg

SEQ ID NO: 58207 - DNA, 2593 bp, Zea Mays
gtcgcatcgcatggtatatctaaacaagaaaaagggggaaagaagcgatagcgataggccatgtggacgtgtcacatgctggtcaggtggaagtcaattaggtcatgtaaagaaatgcagaatggccatgactcatcagagggagatgggaaattgccgaccggtgtataatacgaagtcttggacgtggatgagatctggaacttttttattcctgcattgcctcaaatctggggtaattttccttttatttttatttttttctggtaggagtacctgggagtctgggacaggtcagaggcagctgctgctgcggatggacacgcgacacatccgcagcggctagccaatgagcggcgaccaagggagcagtgagtgtggtcttctgaaagcgagcaaaggaggatggggttctccttcttcacctcccgagccggtgctcgactgctggacgggatcgcgcgccccggcttctccaccgccgcgcttctgctcacagcggccagtggcggaggccttgtggcgtacgcggattccgctgcagagagcgcgccggacccatctcaggatgctcccaggaagaaggtggtggttcttgggactggctgggctgggacgtcgttcctcaagaacctcgactgctccaggtatgaagtgaaggtcatatcgccccggaactacttcgcgttcactcctctgcttccgagtgtcacgtgtgggactgtcgagccgcgcagcattattgaaccgaaaaacaaggatgtcacattttgtgaagccgagtgtttcaagattgatgcaaatagaaaaactgtacattgccgttctgctgttggaactaatcttgatgggaatggtgattttatgttggattatgactacttagttgttgctcttggggctactgtaagtacatttaacactcctggagtgctggagcactgctgctttttgaaggaagtagaggatgctcagaagatacggaagggtgtgatagattgttttgaaaaagcatcacttccaaatattagtgaagaagagaaaaggaaaatcctacattttgtagttattggtggtggacctactggagttgaatttgcagcagagatgcatgattttcttgtcgaagatttagtgaaactatatcctgccattcaagacctcgtgaagataacaattattcaatcggcagagcatatattgactatgtttgatgaaagaatagcttcatttgctgaacaaaagttcaagagggatggcatcgaagtgtgcacgggcttcagagtgataaaggtgtctgatgatttgattacaatgaagagaaaatctgatggtgaggagttatcagttccttacggaatggctgtttggtctgctggcattggtactcgtcctgtcgtcatggacttcatgcaacaaattgggcagaccaatcgtcgtgccttggcaactaacgagtggttaagggttcgcgagtgtgaaggcgtctatgcaattggcgactgtgctacagtgagtcaaagaaaaataatggacgatatttcaacagtattcaagatggcagacaaggacaattccggcaccttaacactaaaagagatcaatggtgttttagatgatatatgtataagatacccgcaagtagagctgtatatgaaaagcatgcacatgcttgacattgcggatttaataaaaggcgcagttggcgattctcacaaggagtccatggtggttgacatagaggagttcaagaaggctctgcgccacgttgactcccaggtgaaaaacgctccagcgacggcccaggtcgccgcacagcaagggcagtacctcgcccagtgtttcaacaagatggagaaatgcagagaggagcccgaaggccctctgcgcatggcaggggggtccggccgccacttcttccgcccgtttcgctacaagcacttcgggcagttcgcgcctctgggtggagaacaagccgctgcagagctcccgggcgactgggtctccatgggccacagcacgcagtggctctggtactccgtgtatgccagcaagcaagtgagctggcgcacgcgggtgctggtggtttccgactggactcgccgcttcatattcgggagggactcaagccggatctagctgccaaggattctcttctgcacaggggggggggggggggggttcgttccgtccgaagaataatcggtttcgctgctgctggagcttgagcaagcaaagctgtttccccgcgcctggccctgccggcgaaactgctgttctttcttctgctacatggtagatggctctcaaagcctcacgccggttactttcactgaggttttagctctggtttatttgatgtccataggttttcttcctttgcttgtgatctcaacacatccatcactatgattcatttgtgtgtgatacatattgcaacttcagttaaaatccaaccttttcttaggaacagggctctaaaatccagcgtcctcgtcagccttctctcacattggtcttctagtctcttatcacttttgtgcaatttattgtaaatctagtgtttgtcttacaaaatcaatgtcaatttatg

SEQ ID NO: 58208 - DNA, 777 bp, Zea Mays
gtccaaaaccagggcttgcataggcgcgtgctatgtttctgacaagactaataatagcgtaggagactaatagttcatattcagtcaacatagatgagttttgatacaaaagatgctacaagcacttcgggcagttcgcgcctctgggtggagaacaagccgctgcagagctcccgggcgactgggtctccatgggccacagcacgcagtggctctggtactccgtgtatgccagcaagcaagtgagctggcgcacgcgggtgctggtggtttccgactggactcgccgcttcatattcgggagggactcaagccggatctagctgccaaggattctcttctgcacaggggggggggggggggggttcgttccgtccgaagaataatcggtttcgctgctgctggagcttgagcaagcaaagctgtttccccgcgcctggccctgccggcgaaactgctgttctttcttctgctacatggtagatggctctcaaagcctcacgccggttactttcactgaggttttagctctggtttatttgatgtccataggttttcttcctttgcttgtgatctcaacacatccatcactatgattcatttgtgtgtgatacatattgcaacttcagttaaaatccaaccttttcttaggaacagggctctaaaatccagcgtcctcgtcagccttctctcacattggtcttctagtctcttatcacttttgtgcaatttattgtaaatctagtgtttgtcttacaaaatcaatgtcaatttatg

SEQ ID NO: 58209 - DNA, 818 bp, Zea Mays
tattttaattctattttactcctcacatgtttttcatgtcaacaattactcaaacacttctttatcataaatatatacacatctatagaagtaattaaaatatttcctcattacacaagcctattaatattctactcggtacgctaattccgctaattggccgaaatagcgaaataactcgctataactgaacctggctcgataatcgcaagaactgcgaagtcgacgagagtttcgtgactcacgcaatttatcgagcaccgtaatgagcatcacactagtacattaatttatttaacgatcgaaccattctaaacgatttatcagcttaccgtttccacagctgacacgaatccgcgagatcggtagtgattttccgatccaagtaatttgtcgagcgcttggaaaatatcgcgctgctaacttcgtcttgggatttcttgatgacacgcggaacgacgatgagatcatgtttggagcaagctggtgaggtgtggtcgagcaggttagcgcgagctctaggaaggacacaaagctagtgagggctctagcgacggcgaggtcacgagctctagcgagagctcggacactgaatccggtgagggaaagggcgacgcgagcttcggccaccggcaagcgcagtatcaacgacgatgaccgaggcggggcggactggagaagctgaccctgggaacggcggtcatggcgatggctggcgagctgagaggaggtcgggttgagcgctgccggtcgtgggcgacgctggaagatggagcagatgtggctggccaagacagagaaaagaaggagcagcgctg

SEQ ID NO: 58210 - DNA, 1908 bp, Zea Mays
cggatgggccgcctataggcccttccggccttccctgttgccctcccattttccctgtgtcattcgttgtcttcggttcatcctctcggccgccgtctggactgtagcaagcggtgctgctgtccgccgcgctccggagccatgcgggaggggatgaaggagagggacagaggtgggagcccagatgcctcgggccctcctcccttccgcggcccggcgtacaagacgaagctgtgcgctttatggagaggcaggggcggctgcccccgccccaactgcgggttcgcccacggcgaggctgagctccggaggccgccccctcgcgcctccttccagcctcgccctcggcctgatgattggtattacaagtactggatctattctaagtggtgaatcatgacgtgtaatcatgtattggcatatactctttcattagttgtattggctcgtctgtgtttatggtctatggtgtattggtgttattgtggaccctctaattcttgtagctaattgaataaccatttggctcaaggttatgggagaagggattacagagataatgactttagagttaggcctgagagaagacactcaccctatgggaggttttcccctgaaagagatatcaggcgtcgttcatttcgtgataagagacagagagcaagttctgaagataggggatctagtcattcaagatcacctattaggaagagtgagagaaaacatagcaaaagtcctgatggtggaaaaaccgattcatccgtaagttttagaagttcagataacgaagacaaaggaaaagatgaaaggtacttaagcagtgatgagaaaaatggccgtgaagaacaattgaaacaaatgcatctggacatggaagcattgcgtgaagataaatcaaagctggaggcgatattggagaagaagactgatgaagagcgcaaactttgtagcagagtagaagatcttgaattgcaattgaacaaagagaaagatgatttccaaaggatgacctccaaaaccaaaaagctaatcaaagcacatgggcgttatataaaagcacaggaggatttaaagaggctcgctttgagaggctagcagatttgcttgcttcagatattttgaagccttataccaaggagcagggttccatcggtattactgccaatgacgatccatataatggtaatgaaatgagcccaagcgaccaaagacaaaaccatgtttcagcatcgagaaagagacctatttccctcccaagaagtgaagaagcaaaaactgggaagagacagagagagaatggtgatgatatgattccaacaccagagaactatagacctgaagatgctctagaacatgtccaagatagcaagggaactgatcgactagaatcatttacagtgaagaagttaagagtgggtgactacgatgatgaaggaaacattgtttcttcaagcaatatttttgcggataggtacaagggcgatgatgaggaagttgatgttgattagtgacccgatgccgtcggtcgctgataacgatttgagctgtacgaagcaatttcagcagacgacatcgatgtcagcttctaaaactacttgtatgccttttgcatcgggtaatagggcctggtatatttggtagctatttatgtgcttagactgagttgtgatgctgtcaaacatgattacatgcgatgctagaattttcttcttttctgtgtttcctgagactcgaagaggatattaatctgtattcgcctcatgtattattcttagccagtttgagtatgagatttttggactggtgttattctcagcctcaggttagaaacaccatgcatccatgattcatttacctatcatgaaatgcatgtgtgatcattaagcttactaagggtgtgtttggttg

SEQ ID NO: 58211 - DNA, 3198 bp, Zea Mays
cggatgggccgcctataggcccttccggccttccctgttgccctcccattttccctgtgtcattcgttgtcttcggttcatcctctcggccgccgtctggactgtagcaagcggtgctgctgtccgccgcgctccggagccatgcgggaggggatgaaggagagggacagaggtgggagcccagatgcctcgggccctcctcccttccgcggcccggcgtacaagacgaagctgtgcgctttatggagaggcaggggcggctgcccccgccccaactgcgggttcgcccacggcgaggctgagctccggaggccgccccctcgcgcctccttccagcctcgccctcggcctggtatgcaccacgcgcacctccatccgtctctccctctcgctcccattctcgatctgcgcgtagtttgtcgttttaggttttgcatcgccttaccgtatgcttctgggttttgccgtacccaaattgttgtcgattccatgccaatctgtcggattaagttatttggacgtttcatccgagcaagagaaaccagcgcgctcttcttcaaagagatgcatcttctgcctgcttgtccatcttgttattgggatgattggttgatgagtagaggctccaaagtggtgcagcaaaccggcaatgtgatccgaatcatatgttctcaggagaagagctagcagacagggaagatagttgcaactgcaagaattatataatgataacaacttgcaagtgcatccttggaggatgtacaaatgggggatgcagatgttaatagctgacagttctgggaggctttatagtttgtactcgtggttgagaagaatctacacttcaattgcatagcaatatgatggtttgacacctgaatcttttctcagttcgtgttatctcatttttttgtcttctggtgcatatacaccacgattcctgtgtggtggtacttaaactgagtgcttgctgttgcagaacacaaaaaaaaacatcaacaagcctgatttcattgcagataatcttggcattgctgcttattattttgattttacaattgtgtctcatgggcagatttattgagactgagaatttgagattgactgcttccagaggatgacacatcctatttctatcctggccttcttttcagttgacaattggtcatttatgttcaattgaatgcttaacccgcctcagaagaacataatatggaagatatcatacattgtatcttgatgagattcatgctatggtcagtgagccttaataatgctgttagaagcttttgcaactaattgaaacacgtcatttgaatataatgcataaagctatatccgtggctttattgttacctgcccttcaagtatcatctttgaacaatttttttggcagtcatatggataacatctgaccaagtgaaattaaatttatttgctgctattggagttttggcagattatgccatgatgattggaaatgatagctaattaattttggtgattccatccaaattttcttcagatgattggtattacaagtactggatctattctaagtggtgaatcatgacgtgtaatcatgtattggcatatactctttcattagttgtattggctcgtctgtgtttatggtctatggtgtattggtgttattgtggaccctctaattcttgtagctaattgaataaccatttggctcaaggttatggtaagcttaatgggtttctgtgttgccttgtatctgtgcagctcaatctaacttttgttctttgatggcataatatttttgtgtaaaccttccaccttcctgatttatagggagaagggattacagagataatgactttagagttaggcctgagagaagacactcaccctatgggaggttttcccctgaaagagatatcaggcgtcgttcatttcgtgataagagacagagagcaagttctgaagataggggatctagtcattcaagatcacctattaggaagagtgagagaaaacatagcaaaagtcctgatggtggaaaaaccgattcatccgtaagttttagaagttcagataacgaagacaaaggaaaagatgaaaggtacttaagcagtgatgagaaaaatggccgtgaagaacaattgaaacaaatgcatctggacatggaagcattgcgtgaagataaatcaaagctggaggcgatattggagaagaagactgatgaagagcgcaaactttgtagcagagtagaagatcttgaattgcaattgaacaaagagaaagatgatttccaaaggatgacctccaaaaccaaaaagctaatcaaagcacatgggcgttatataaaagcacaggaggatttaaagaggtctcaggctcgctttgagaggctagcagatttgcttgcttcagatattttgaagccttataccaaggagcagggttccatcggtattactgccaatgacgatccatataatggtaatgaaatgagcccaagcgaccaaagacaaaaccatgtttcagcatcgagaaagagacctatttccctcccaagaagtgaagaagcaaaaactgggaagagacagagagagaatggtgatgatatgattccaacaccagagaactatagacctgaagatgctctagaacatgtccaagatagcaagggaactgatcgactagaatcatttacagtgaagaagttaagagtgggtgactacgatgatgaaggaaacattgtttcttcaagcaatatttttgcggataggtacaagggcgatgatgaggaagttgatgttgattagtgacccgatgccgtcggtcgctgataacgatttgagctgtacgaagcaatttcagcagacgacatcgatgtcagcttctaaaactacttgtatgccttttgcatcgggtaatagggcctggtatatttggtagctatttatgtgcttagactgagttgtgatgctgtcaaacatgattacatgcgatgctagaattttcttcttttctgtgtttcctgagactcgaagaggatattaatctgtattcgcctcatgtattattcttagccagtttgagtatgagatttttggactggtgttattctcagcctcaggttagaaacaccatgcatccatgattcatttacctatcatgaaatgcatgtgtgatcattaagcttactaagggtgtgtttggttg

SEQ ID NO: 58212 - DNA, 1961 bp, Zea Mays
cggatgggccgcctataggcccttccggccttccctgttgccctcccattttccctgtgtcattcgttgtcttcggttcatcctctcggccgccgtctggactgtagcaagcggtgctgctgtccgccgcgctccggagccatgcgggaggggatgaaggagagggacagaggtgggagcccagatgcctcgggccctcctcccttccgcggcccggcgtacaagacgaagctgtgcgctttatggagaggcaggggcggctgcccccgccccaactgcgggttcgcccacggcgaggctgagctccggaggccgccccctcgcgcctccttccagcctcgccctcggcctgatgattggtattacaagtactggatctattctaagtggtgaatcatgacgtgtaatcatgtattggcatatactctttcattagttgtattggctcgtctgtgtttatggtctatggtgtattggtgttattgtggaccctctaattcttgtagctaattgaataaccatttggctcaaggttatgggagaagggattacagagataatgactttagagttaggcctgagagaagacactcaccctatgggaggttttcccctgaaagagatatcaggcgtcgttcatttcgtgataagagacagagagcaagttctgaagataggggatctagtcattcaagatcacctattaggaagagtgagagaaaacatagcaaaagtcctgatggtggaaaaaccgattcatccgtaagttttagaagttcagataacgaagacaaaggaaaagatgaaaggtacttaagcagtgatgagaaaaatggccgtgaagaacaattgaaacaaatgcatctggacatggaagcattgcgtgaagataaatcaaagctggaggcgatattggagaagaagactgatgaagagcgcaaactttgtagcagagtagaagatcttgaattgcaattgaacaaagagaaagatgatttccaaaggatgacctccaaaaccaaaaagctaatcaaagcacatgggcgttatataaaagcacaggaggatttaaagaggtctcaggctcgctttgagaggctagcagatttgcttgcttcagatattttgaagccttataccaaggagcagggttccatcggtattactgccaatgacgatccatataatggtaatgaaatgagcccaagcgaccaaagacaaaaccatgtttcagcatcgagaaagagacctatttccctcccaagaagtgaagaagcaaaaactgggaagagacagagagagaatggtgatgatatgattccaacaccagagaactatagacctgaagatgctctagaacatgtccaagatagcaagggaactgatcgactagaatcatttacagtgaagaagttaagagtgggtgactacgatgatgaaggaaacattgtttcttcaagcaatatttttgcggataggttctagaaacgaagtcctgacactacgccttctgtttttccttcagtacaagggcgatgatgaggaagttgatgttgattagtgacccgatgccgtcggtcgctgataacgatttgagctgtacgaagcaatttcagcagacgacatcgatgtcagcttctaaaactacttgtatgccttttgcatcgggtaatagggcctggtatatttggtagctatttatgtgcttagactgagttgtgatgctgtcaaacatgattacatgcgatgctagaattttcttcttttctgtgtttcctgagactcgaagaggatattaatctgtattcgcctcatgtattattcttagccagtttgagtatgagatttttggactggtgttattctcagcctcaggttagaaacaccatgcatccatgattcatttacctatcatgaaatgcatgtgtgatcattaagcttactaagggtgtgtttggttg

SEQ ID NO: 58213 - DNA, 1623 bp, Zea Mays
ctcagaagaacataatatggaagatatcatacattgtatcttgatgagattcatgctatgatgattggtattacaagtactggatctattctaagtggtgaatcatgacgtgtaatcatgtattggcatatactctttcattagttgtattggctcgtctgtgtttatggtctatggtgtattggtgttattgtggaccctctaattcttgtagctaattgaataaccatttggctcaaggttatgggagaagggattacagagataatgactttagagttaggcctgagagaagacactcaccctatgggaggttttcccctgaaagagatatcaggcgtcgttcatttcgtgataagagacagagagcaagttctgaagataggggatctagtcattcaagatcacctattaggaagagtgagagaaaacatagcaaaagtcctgatggtggaaaaaccgattcatccgtaagttttagaagttcagataacgaagacaaaggaaaagatgaaaggtacttaagcagtgatgagaaaaatggccgtgaagaacaattgaaacaaatgcatctggacatggaagcattgcgtgaagataaatcaaagctggaggcgatattggagaagaagactgatgaagagcgcaaactttgtagcagagtagaagatcttgaattgcaattgaacaaagagaaagatgatttccaaaggatgacctccaaaaccaaaaagctaatcaaagcacatgggcgttatataaaagcacaggaggatttaaagaggtctcaggctcgctttgagaggctagcagatttgcttgcttcagatattttgaagccttataccaaggagcagggttccatcggtattactgccaatgacgatccatataatggtaatgaaatgagcccaagcgaccaaagacaaaaccatgtttcagcatcgagaaagagacctatttccctcccaagaagtgaagaagcaaaaactgggaagagacagagagagaatggtgatgatatgattccaacaccagagaactatagacctgaagatgctctagaacatgtccaagatagcaagggaactgatcgactagaatcatttacagtgaagaagttaagagtgggtgactacgatgatgaaggaaacattgtttcttcaagcaatatttttgcggataggtacaagggcgatgatgaggaagttgatgttgattagtgacccgatgccgtcggtcgctgataacgatttgagctgtacgaagcaatttcagcagacgacatcgatgtcagcttctaaaactacttgtatgccttttgcatcgggtaatagggcctggtatatttggtagctatttatgtgcttagactgagttgtgatgctgtcaaacatgattacatgcgatgctagaattttcttcttttctgtgtttcctgagactcgaagaggatattaatctgtattcgcctcatgtattattcttagccagtttgagtatgagatttttggactggtgttattctcagcctcaggttagaaacaccatgcatccatgattcatttacctatcatgaaatgcatgtgtgatcattaagcttactaagggtgtgtttggttg

SEQ ID NO: 58214 - DNA, 2145 bp, Zea Mays
cgttgctaggcctgcgcagcgtgcggaggaggtgcagctgcgcctgggcccgtctgctcccttggattgcagggaacgccagagatacgcatcgacggccgggagctgtcacggaccctctcctcctcctcccctgtcccgtgagtcgtctcagccgccgccggctctcggagccctacccttctttcgtcggagccctacccttcttctcgtcggagcccatggaccggcaaccccaggactacgcggctgcggccatggcgtacgcacaggggcagcagccaccgccgccgcagtacggcgggtaccacccacaggcgccgccgcctcagtacccgccccacccttacggcgcgccgctcccgcagtaccggcccgcgccctatgcgcgccccatgccgcctgcctactcgctccacccgccgatccggagctccagaagcgcatcgacaagctcgtcgagtacatcgcgaagaacgggccggatttcgaggccatgatccgcgacaagcagcacgacaacccggactacgccttcgtcttcggcggggaaggtcacgcctactacagccggggtacccgccattctatgaccagcaccagcagtttgctgctgctcacggccatggggactatgaagctgcggcgcaaccattcaagggactgtccggaccgctccctgcagatgttgctgctgagctccaagatgtgcttatcaatcttaatggcactaaggaatcaataaagggagcgaagtcatggtttatgcaaagattgccgttcgcgccggctctggctgaagctcttaaggagagagtatttgtgttggaggattcggagcggcagctgcacataattttcctggtgaacgatattctttttgaaagcttacagagacgaactagtattcgggaccttgacaatgaggctattgctttcaaatccgtactgggtcccatgcttgcaagggtttacaataattcacagagtaaagatgacaaccagacccgtgttgagaagatcctgcagttttggggttcaaaggaagtttacgaccaggaaacaattgctaattttgaaagagagatgaaaggtggcttgccttattcgctggtgccacgacatgtttcaccagaccctacgaccttttcaggatcagcgccagtgccctcaaaatggtcctcggaacctccagagaaggataagccgatccatcctgtcgctggccaaaatgcatttgcaggatctttgccagtgcaaccgtcgtcaacagttcccgctgtggctcctcaaagcactgccgccgcaaacgattcaactccacctccttatccgctcttcccgcctggcctcatccctggaatggttcggaagatgcaaataggcagcggggtaccgtactcttccctgagcccgctcgacatccccacgaccatcccgccatcgtcagtcccggagtccgagatcctcgagcgcgtgtccaagttcttcagcgacattggggaggtgaacccgtcagaaggtccgatgaggcaaggcgagcccgatgactacgacgactacgagagggagcttcctgcgcggaagggaggcgcctgcatccctcccccgccgaatctgcttctgaaccctgagacagggatgcacgccgatggcagcgtcgacagtaagccagggtccagcggccggttgggtctcggagcatccgccgatccgaacgaggtgagccagtatgacgatgtgtattcttcttatcgtaagcaaaggagctcaacgtatcacatttccatcaccgctcgctcatcgacgtcaaggtgatggtagcagagatgcatgtctcgagcacccccttctgacatttgtgggtgattctgtacggttaatacatgagatgagaaaactgtaagaacattgtagtgcctgagaacttttttatggcaaaatgtggtctacaggttcttaaatcgaaatgtagttgccccatctgcaaattatgcttgtcctgacctgctacgttgtgtgatagcttctccttctggtcagtcccggcagtgatcactgtgtatttgaacatgacattgatcaacggaaaaaagacacttgaaacattctttgtccttgttctcatttacattcaaacagaaa

SEQ ID NO: 58215 - DNA, 2684 bp, Zea Mays
aatcggcccacttgctcgcccgttgctttgcttcagctgacgcggtcactttcctagctgcttctcacgttgctgacagcctggctagtggcgaccgtctgcctgccctgcacgcccacttgccgccgccccggcttcgttcctgctaccactaccgccatcccgaccggctcgcgcgccaccgccatctcctcctgcgctcgccttgctgccgcggccgcccccacctcaaggacccagaggggctgccctcgatctgactgaccccacgggacaggatggacaaggggaaatcggtggtagccgagctgtcggcatcgtccagctcgctcccgtcgccctcctcctatcctttctcaaagaaggctaaacctcggaaattggtcagcttgtgcctgggcacccttggtcagcatcttgaagatatcatcactgatatttcagaatttgctgccttatttccaccccacataacgttggcaattatgtctattgcaaggagaaaaagcctcctgaatgataaagttttgacttctcttgctgaaagctcctggcaaatcctagatatatctggatctgatgttactgatgctggtttggctactgtagcaaatgtttgtagtaatttacgggcagttgatattagtcgctgtgaaaaaattactactgctggtgtgtctgagattgtatgccactgcccatccttggagatattgagataggctgtccaagaagtgaagtaacggcacggaggtgcttgaatctcttgaaacccaaattgaatgctcttgaagaggactcatgggaggaacttgatacactagatataggaggcggtgcagagtccttaagatggcttgtttggccaatgatagatgataagtcaaaggtgactctagctgtcgaatgccctcgtgttactgtcaacccacagccatcgctgttcgacctctccggatattccaaagtcccaatagaagcattgtcaagcgtaccactggaccattctgtggttgaggacattgatcccaaaacatgggctgtttctgctgctcctccaagagctgttgctccagcgaatccaaatgttccaagtgctccgcctgaaataccgatggcagaaaggttcaggctggcctatgtggagagggaagcgaggctggcacccaagagggccaagcgggaaaggcagcggcgtcggcgcgctgagagggactacatgatggttgacatcgacgcaaggtcggtcgcacttgctgctcaagcaagcaggaacctgcggaagagctgattgtttcttgtctacgctatctgtggagacttgagagtagagaatcatgaggcaagaaatgctgttcaatccttctactttcaaggcaaagatagcatacatatatggacacagtattgtatagttgtattggcagtagcggtagcgtttacactgccatgtactagtaatagaaaaaaatctgagtgggaataacagggaaggcgtgccttatcaaatcacaaatgggttgccacgaggatttgtgaacatgctcgtccagatttctttgaatctggatgatgcggttatgtgaggttcctcacgcaatttgtttaatccgaacaagattcgtgtgaactgttgtatacgtaatttttttcttggaatttgagaatgtgtttggatgcactcgtattcaaactaattcactgaatatgaatgtgtccaactctccaaacaagacctaaattatctaaattatgaattgaggttgatacaagtgcatcaaaacaaggtccaaattagaataaaaatcggagcacaaacgaaatctgtacgcactgggaacaacagttcttagatagttagatttatacgaattctagatccatacaagaagctagcagaaacataaccggatccgtctgcacactatatataatataccatatatgtatctaataacttggcaataatgccaagaatgtcgacgagcaccgagcgcaaaagctaccgctcactcgctcagtgcgcagcgaccacgtccggcgacgccgctggcgcgaacgcgtccatgaacgcctccacgacatccagcggtggggacaggagcaccacggctcgggcggcggccagcttcttccgcaacgggtaccgcatccccctcgtggcggaggcgggcccgaggaagcatggcacgccgtcccaggcggcgggcggcgcgggcgagcgaggaggcgaggagggcggcgcccacgcccgcgcggcacagcggagggagcgggccaggaccctggagtcgcggagccgcgcgagcgcgcccgggcggaggaagcggtgcgggctgccgctgcccgcgagctgctggcgctcgggacggcgcgccggggagcggaggcgtcggtccatggatggctggcgtcggcggatgggcggatcgggagggagattggaattgcgcgcgggtttggggaaacgggaggggggttttgatttttatgaaatcatgagatgagatgatggcgagcgggacgaggggtggacggtggagggaaacgaaaacaaggccgggcccgggcgggaatggaatcggagggtgatttggaaaatggcagggaagcgtaggcgccactccataaatctccagcagtttagtttacctataccactacctatacccaaagtagtttcc

SEQ ID NO: 58216 - DNA, 3127 bp, Zea Mays
ctgcttctcacgttgctgacagcctggctagtggcgaccgtctgcctgccctgcacgcccacttgccgccgccccggcttcgttcctgctaccactaccgccatcccgaccggctcgcgcgccaccgccatctcctcctgcgctcgccttgctgccgcggccgcccccacctcaaggacccagaggggctgccctcgatctgactgaccccacgggacaggatggacaaggggaaatcggtggtagccgagctgtcggcatcgtccagctcgctcccgtcgccctcctcctatcctttctcaaagaaggctaaacctcggaaattggtcagcttgtgcctgggcacccttggtcagcatcttgaagatatcatcactgatatttcagaatttgctgccttatttccaccccacataacgttggcaattatgtctattgcaaggagaaaaagcctcctgaatgataaagttttgacttctcttgctgaaagctcctggcaaatcctagatatatctggatctgatgttactgatgctggtttggctactgtagcaaatgtttgtagtaatttacgggcagttgatattagtcgctgtgaaaaaattactactgctggtgtgtctgagattgtatgccactgcccatccttggagatattgagatgtgggtatgacttacaacaaatttcaagcatagccttagcccttagggtcaatcagtctcaatctactttcatgactttaccttgagtttctttttgatacgttaagcatatgaatgtcttggtgtatccgtacctgttatttatagcatatttctcatgcattcttgatttatcagttacggcaagacctgcgctgctatttgctcagaccaaacatatgcacgggactgaaaagtgaaatcgtgtgattcttgacaattaactaacaatagggtatctcttttatcaactgatatgtggtattatcttatatgaattttcaatatttattgttaaagataaattcatatttgaacatgtgctcataagtctacttgagtttgcactcctgcttttgctagttaatagtcatgagtataacctttcattgctgaactgttgactatgttgtatcctgcatagcaggatactaaaaatagcttgaatcctatcattgcagaggctgtccaagaagtgaagtaacggcacggaggtgcttgaatctcttgaaacccaaattgaatgctcttgaagaggactcatgggaggaacttgatacactagatataggaggcggtgcagagtccttaagatggcttgtttggccaatgatagatgataagtcaaaggtgactctagctgtcgaatgccctcgtgttactgtcaacccacagccatcgctgttcgacctctccggatattccaaagtcccaatagaagcattgtcaagcgtaccactggaccattctgtggttgaggacattgatcccaaaacatgggctgtttctgctgctcctccaagagctgttgctccagcgaatccaaatgttccaagtgctccgcctgaaataccgatggcagaaaggttcaggctggcctatgtggagagggaagcgaggctggcacccaagagggccaagcgggaaaggcagcggcgtcggcgcgctgagagggactacatgatggttgacatcgacgcaaggtcggtcgcacttgctgctcaagcaagcaggaacctgcggaagagctgattgtttcttgtctacgctatctgtggagacttgagagtagagaatcatgaggcaagaaatgctgttcaatccttctactttcaaggcaaagatagcatacatatatggacacagtattgtatagttgtattggcagtagcggtagcgtttacactgccatgtactagtaatagaaaaaaatctgagtgggaataacagggaaggcgtgccttatcaaatcacaaatgggttgccacgaggatttgtgaacatgctcgtccagatttctttgaatctggatgatgcggttatgtgaggttcctcacgcaatttgtttaatccgaacaagattcgtgtgaactgttgtatacgtaatttttttcttggaatttgagaatgtgtttggatgcactcgtattcaaactaattcactgaatatgaatgtgtccaactctccaaacaagacctaaattatctaaattatgaattgaggttgatacaagtgcatcaaaacaaggtccaaattagaataaaaatcggagcacaaacgaaatctgtacgcactgggaacaacagttcttagatagttagatttatacgaattctagatccatacaagaagctagcagaaacataaccggatccgtctgcacactatatataatataccatatatgtatctaataacttggcaataatgccaagaatgtcgacgagcaccgagcgcaaaagctaccgctcactcgctcagtgcgcagcgaccacgtccggcgacgccgctggcgcgaacgcgtccatgaacgcctccacgacatccagcggtggggacaggagcaccacggctcgggcggcggccagcttcttccgcaacgggtaccgcatccccctcgtggcggaggcgggcccgaggaagcatggcacgccgtcccaggcggcgggcggcgcgggcgagcgaggaggcgaggagggcggcgcccacgcccgcgcggcacagcggagggagcgggccaggaccctggagtcgcggagccgcgcgagcgcgcccgggcggaggaagcggtgcgggctgccgctgcccgcgagctgctggcgctcgggacggcgcgccggggagcggaggcgtcggtccatggatggctggcgtcggcggatgggcggatcgggagggagattggaattgcgcgcgggtttggggaaacgggaggggggttttgatttttatgaaatcatgagatgagatgatggcgagcgggacgaggggtggacggtggagggaaacgaaaacaaggccgggcccgggcgggaatggaatcggagggtgatttggaaaatggcagggaagcgtaggcgccactccataaatctccagcagtttagtttacctataccactacctatacccaaagtagtttcc

SEQ ID NO: 58217 - DNA, 2363 bp, Zea Mays
aaaaaccaagaggaatcgactgaccgtatcctttctcaaagaaggctaaacctcggaaattggtcagcttgtgcctgggcacccttggtcagcatcttgaagatatcatcactgatatttcagaatttgctgccttatttccaccccacataacgttggcaattatgtctattgcaaggagaaaaagcctcctgaatgataaagttttgacttctcttgctgaaagctcctggcaaatcctagatatatctggatctgatgttactgatgctggtttggctactgtagcaaatgtttgtagtaatttacgggcagttgatattagtcgctgtgaaaaaattactactgctggtgtgtctgagattgtatgccactgcccatccttggagatattgagataggctgtccaagaagtgaagtaacggcacggaggtgcttgaatctcttgaaacccaaattgaatgctcttgaagaggactcatgggaggaacttgatacactagatataggaggcggtgcagagtccttaagatggcttgtttggccaatgatagatgataagtcaaaggtgactctagctgtcgaatgccctcgtgttactgtcaacccacagccatcgctgttcgacctctccggatattccaaagtcccaatagaagcattgtcaagcgtaccactggaccattctgtggttgaggacattgatcccaaaacatgggctgtttctgctgctcctccaagagctgttgctccagcgaatccaaatgttccaagtgctccgcctgaaataccgatggcagaaaggttcaggctggcctatgtggagagggaagcgaggctggcacccaagagggccaagcgggaaaggcagcggcgtcggcgcgctgagagggactacatgatggttgacatcgacgcaaggtcggtcgcacttgctgctcaagcaagcaggaacctgcggaagagctgattgtttcttgtctacgctatctgtggagacttgagagtagagaatcatgaggcaagaaatgctgttcaatccttctactttcaaggcaaagatagcatacatatatggacacagtattgtatagttgtattggcagtagcggtagcgtttacactgccatgtactagtaatagaaaaaaatctgagtgggaataacagggaaggcgtgccttatcaaatcacaaatgggttgccacgaggatttgtgaacatgctcgtccagatttctttgaatctggatgatgcggttatgtgaggttcctcacgcaatttgtttaatccgaacaagattcgtgtgaactgttgtatacgtaatttttttcttggaatttgagaatgtgtttggatgcactcgtattcaaactaattcactgaatatgaatgtgtccaactctccaaacaagacctaaattatctaaattatgaattgaggttgatacaagtgcatcaaaacaaggtccaaattagaataaaaatcggagcacaaacgaaatctgtacgcactgggaacaacagttcttagatagttagatttatacgaattctagatccatacaagaagctagcagaaacataaccggatccgtctgcacactatatataatataccatatatgtatctaataacttggcaataatgccaagaatgtcgacgagcaccgagcgcaaaagctaccgctcactcgctcagtgcgcagcgaccacgtccggcgacgccgctggcgcgaacgcgtccatgaacgcctccacgacatccagcggtggggacaggagcaccacggctcgggcggcggccagcttcttccgcaacgggtaccgcatccccctcgtggcggaggcgggcccgaggaagcatggcacgccgtcccaggcggcgggcggcgcgggcgagcgaggaggcgaggagggcggcgcccacgcccgcgcggcacagcggagggagcgggccaggaccctggagtcgcggagccgcgcgagcgcgcccgggcggaggaagcggtgcgggctgccgctgcccgcgagctgctggcgctcgggacggcgcgccggggagcggaggcgtcggtccatggatggctggcgtcggcggatgggcggatcgggagggagattggaattgcgcgcgggtttggggaaacgggaggggggttttgatttttatgaaatcatgagatgagatgatggcgagcgggacgaggggtggacggtggagggaaacgaaaacaaggccgggcccgggcgggaatggaatcggagggtgatttggaaaatggcagggaagcgtaggcgccactccataaatctccagcagtttagtttacctataccactacctatacccaaagtagtttcc

SEQ ID NO: 58218 - DNA, 2865 bp, Zea Mays
tcccaacactgattaatttgtttacaaaatgctcttctttcttccagttgactttgtgggttgtaactcttgcttcaaagtgcgaatatacagtccgaaagaagtgtccatctacatttcttgtttgattgctgttgaatttgtattttaaagtttggatatagcatatactagaacgtacaacactcatattaatgtgaatctctgagcttagctagacctttgctgtttgctagcaaagagttgcagttttttgtttggggggggggggggctggccagggtattaactatgttttttttcctgtgttccacttgagagtcatggtcatgttgctcttcttgaaataggcacacatgttctaattgaacctctacggtctaggtgacgtggtgtgtggttgtatggattcttaccctttttacctttttaaatataatgatatgtagctctcctgcatttgagaaaaaacattaacctcagaaaaacataggaatggttaatatggtcagtagaaaggaagaaactgttaaacaaaagtttgatgtgtgacatgtactaaggctctacattatgtatggccttcttgtagcaactgttgttagcaagttgacctcaagcttggcttcagttttttaaaagttttgaagtgaccagttggcaattatgtctattgcaaggagaaaaagcctcctgaatgataaagttttgacttctcttgctgaaagctcctggcaaatcctagatatatctggatctgatgttactgatgctggtttggctactgtagcaaatgtttgtagtaatttacgggcagttgatattagtcgctgtgaaaaaattactactgctggtgtgtctgagattgtatgccactgcccatccttggagatattgagataggctgtccaagaagtgaagtaacggcacggaggtgcttgaatctcttgaaacccaaattgaatgctcttgaagaggactcatgggaggaacttgatacactagatataggaggcggtgcagagtccttaagatggcttgtttggccaatgatagatgataagtcaaaggtgactctagctgtcgaatgccctcgtgttactgtcaacccacagccatcgctgttcgacctctccggatattccaaagtcccaatagaagcattgtcaagcgtaccactggaccattctgtggttgaggacattgatcccaaaacatgggctgtttctgctgctcctccaagagctgttgctccagcgaatccaaatgttccaagtgctccgcctgaaataccgatggcagaaaggttcaggctggcctatgtggagagggaagcgaggctggcacccaagagggccaagcgggaaaggcagcggcgtcggcgcgctgagagggactacatgatggttgacatcgacgcaaggtcggtcgcacttgctgctcaagcaagcaggaacctgcggaagagctgattgtttcttgtctacgctatctgtggagacttgagagtagagaatcatgaggcaagaaatgctgttcaatccttctactttcaaggcaaagatagcatacatatatggacacagtattgtatagttgtattggcagtagcggtagcgtttacactgccatgtactagtaatagaaaaaaatctgagtgggaataacagggaaggcgtgccttatcaaatcacaaatgggttgccacgaggatttgtgaacatgctcgtccagatttctttgaatctggatgatgcggttatgtgaggttcctcacgcaatttgtttaatccgaacaagattcgtgtgaactgttgtatacgtaatttttttcttggaatttgagaatgtgtttggatgcactcgtattcaaactaattcactgaatatgaatgtgtccaactctccaaacaagacctaaattatctaaattatgaattgaggttgatacaagtgcatcaaaacaaggtccaaattagaataaaaatcggagcacaaacgaaatctgtacgcactgggaacaacagttcttagatagttagatttatacgaattctagatccatacaagaagctagcagaaacataaccggatccgtctgcacactatatataatataccatatatgtatctaataacttggcaataatgccaagaatgtcgacgagcaccgagcgcaaaagctaccgctcactcgctcagtgcgcagcgaccacgtccggcgacgccgctggcgcgaacgcgtccatgaacgcctccacgacatccagcggtggggacaggagcaccacggctcgggcggcggccagcttcttccgcaacgggtaccgcatccccctcgtggcggaggcgggcccgaggaagcatggcacgccgtcccaggcggcgggcggcgcgggcgagcgaggaggcgaggagggcggcgcccacgcccgcgcggcacagcggagggagcgggccaggaccctggagtcgcggagccgcgcgagcgcgcccgggcggaggaagcggtgcgggctgccgctgcccgcgagctgctggcgctcgggacggcgcgccggggagcggaggcgtcggtccatggatggctggcgtcggcggatgggcggatcgggagggagattggaattgcgcgcgggtttggggaaacgggaggggggttttgatttttatgaaatcatgagatgagatgatggcgagcgggacgaggggtggacggtggagggaaacgaaaacaaggccgggcccgggcgggaatggaatcggagggtgatttggaaaatggcagggaagcgtaggcgccactccataaatctccagcagtttagtttacctataccactacctatacccaaagtagtttcc

SEQ ID NO: 58219 - DNA, 2272 bp, Zea Mays
gttgttagcaagttgacctcaagcttggcttcagttttttaaaagttttgaagtgaccagttggcaattatgtctattgcaaggagaaaaagcctcctgaatgataaagttttgacttctcttgctgaaagctcctggcaaatcctagatatatctggatctgatgttactgatgctggtttggctactgtagcaaatgtttgtagtaatttacgggcagttgatattagtcgctgtgaaaaaattactactgctggtgtgtctgagattgtatgccactgcccatccttggagatattgagatgtggaggctgtccaagaagtgaagtaacggcacggaggtgcttgaatctcttgaaacccaaattgaatgctcttgaagaggactcatgggaggaacttgatacactagatataggaggcggtgcagagtccttaagatggcttgtttggccaatgatagatgataagtcaaaggtgactctagctgtcgaatgccctcgtgttactgtcaacccacagccatcgctgttcgacctctccggatattccaaagtcccaatagaagcattgtcaagcgtaccactggaccattctgtggttgaggacattgatcccaaaacatgggctgtttctgctgctcctccaagagctgttgctccagcgaatccaaatgttccaagtgctccgcctgaaataccgatggcagaaaggttcaggctggcctatgtggagagggaagcgaggctggcacccaagagggccaagcgggaaaggcagcggcgtcggcgcgctgagagggactacatgatggttgacatcgacgcaaggtcggtcgcacttgctgctcaagcaagcaggaacctgcggaagagctgattgtttcttgtctacgctatctgtggagacttgagagtagagaatcatgaggcaagaaatgctgttcaatccttctactttcaaggcaaagatagcatacatatatggacacagtattgtatagttgtattggcagtagcggtagcgtttacactgccatgtactagtaatagaaaaaaatctgagtgggaataacagggaaggcgtgccttatcaaatcacaaatgggttgccacgaggatttgtgaacatgctcgtccagatttctttgaatctggatgatgcggttatgtgaggttcctcacgcaatttgtttaatccgaacaagattcgtgtgaactgttgtatacgtaatttttttcttggaatttgagaatgtgtttggatgcactcgtattcaaactaattcactgaatatgaatgtgtccaactctccaaacaagacctaaattatctaaattatgaattgaggttgatacaagtgcatcaaaacaaggtccaaattagaataaaaatcggagcacaaacgaaatctgtacgcactgggaacaacagttcttagatagttagatttatacgaattctagatccatacaagaagctagcagaaacataaccggatccgtctgcacactatatataatataccatatatgtatctaataacttggcaataatgccaagaatgtcgacgagcaccgagcgcaaaagctaccgctcactcgctcagtgcgcagcgaccacgtccggcgacgccgctggcgcgaacgcgtccatgaacgcctccacgacatccagcggtggggacaggagcaccacggctcgggcggcggccagcttcttccgcaacgggtaccgcatccccctcgtggcggaggcgggcccgaggaagcatggcacgccgtcccaggcggcgggcggcgcgggcgagcgaggaggcgaggagggcggcgcccacgcccgcgcggcacagcggagggagcgggccaggaccctggagtcgcggagccgcgcgagcgcgcccgggcggaggaagcggtgcgggctgccgctgcccgcgagctgctggcgctcgggacggcgcgccggggagcggaggcgtcggtccatggatggctggcgtcggcggatgggcggatcgggagggagattggaattgcgcgcgggtttggggaaacgggaggggggttttgatttttatgaaatcatgagatgagatgatggcgagcgggacgaggggtggacggtggagggaaacgaaaacaaggccgggcccgggcgggaatggaatcggagggtgatttggaaaatggcagggaagcgtaggcgccactccataaatctccagcagtttagtttacctataccactacctatacccaaagtagtttcc

SEQ ID NO: 58220 - DNA, 2044 bp, Zea Mays
ctgctatttgctcagaccaaacatatgcacgggactgaaaagtgaaatcgtgtgattcttgacaattaactaacaataggaggctgtccaagaagtgaagtaacggcacggaggtgcttgaatctcttgaaacccaaattgaatgctcttgaagaggactcatgggaggaacttgatacactagatataggaggcggtgcagagtccttaagatggcttgtttggccaatgatagatgataagtcaaaggtgactctagctgtcgaatgccctcgtgttactgtcaacccacagccatcgctgttcgacctctccggatattccaaagtcccaatagaagcattgtcaagcgtaccactggaccattctgtggttgaggacattgatcccaaaacatgggctgtttctgctgctcctccaagagctgttgctccagcgaatccaaatgttccaagtgctccgcctgaaataccgatggcagaaaggttcaggctggcctatgtggagagggaagcgaggctggcacccaagagggccaagcgggaaaggcagcggcgtcggcgcgctgagagggactacatgatggttgacatcgacgcaaggtcggtcgcacttgctgctcaagcaagcaggaacctgcggaagagctgattgtttcttgtctacgctatctgtggagacttgagagtagagaatcatgaggcaagaaatgctgttcaatccttctactttcaaggcaaagatagcatacatatatggacacagtattgtatagttgtattggcagtagcggtagcgtttacactgccatgtactagtaatagaaaaaaatctgagtgggaataacagggaaggcgtgccttatcaaatcacaaatgggttgccacgaggatttgtgaacatgctcgtccagatttctttgaatctggatgatgcggttatgtgaggttcctcacgcaatttgtttaatccgaacaagattcgtgtgaactgttgtatacgtaatttttttcttggaatttgagaatgtgtttggatgcactcgtattcaaactaattcactgaatatgaatgtgtccaactctccaaacaagacctaaattatctaaattatgaattgaggttgatacaagtgcatcaaaacaaggtccaaattagaataaaaatcggagcacaaacgaaatctgtacgcactgggaacaacagttcttagatagttagatttatacgaattctagatccatacaagaagctagcagaaacataaccggatccgtctgcacactatatataatataccatatatgtatctaataacttggcaataatgccaagaatgtcgacgagcaccgagcgcaaaagctaccgctcactcgctcagtgcgcagcgaccacgtccggcgacgccgctggcgcgaacgcgtccatgaacgcctccacgacatccagcggtggggacaggagcaccacggctcgggcggcggccagcttcttccgcaacgggtaccgcatccccctcgtggcggaggcgggcccgaggaagcatggcacgccgtcccaggcggcgggcggcgcgggcgagcgaggaggcgaggagggcggcgcccacgcccgcgcggcacagcggagggagcgggccaggaccctggagtcgcggagccgcgcgagcgcgcccgggcggaggaagcggtgcgggctgccgctgcccgcgagctgctggcgctcgggacggcgcgccggggagcggaggcgtcggtccatggatggctggcgtcggcggatgggcggatcgggagggagattggaattgcgcgcgggtttggggaaacgggaggggggttttgatttttatgaaatcatgagatgagatgatggcgagcgggacgaggggtggacggtggagggaaacgaaaacaaggccgggcccgggcgggaatggaatcggagggtgatttggaaaatggcagggaagcgtaggcgccactccataaatctccagcagtttagtttacctataccactacctatacccaaagtagtttcc

SEQ ID NO: 58221 - DNA, 3437 bp, Zea Mays
ctcatcaatacaacatcatttttattcatgaggttcacatcctgacttaggttgtaggtcagagatcaagtctccactcttcgggatataacggtgatccgaatcgatttactcacctgaggatctctaaccacacgacatatgtttctcgtaaaccttgcatgtctaccattcccacggatcctccactgcatgaacaggtccgcgccacccgagagcacaccaccctttttaggcgatcctttgccaggagggtacgtgccactctcgccatctctccactcccagtgcacgattgtcttttcatgtatggaatagccgggttcaagcttatcctgtcccatttccagggcatatggctagttaagatagtccttgatcaacaggcctacatacgcatccaatccttaactaacctgggtagaacatcacctgtttctagcccaagtcccaatttaagtacttccacccttaggattgtttgtattcctaggatgaaaagagcatcaaagggaactttgcagtaagatcccaccacgctctcaatgaaaatattcttgcaggtagaagccatatttcctcaggataacccctgagctaggccttaatgcaaaagacaacctctatccacaagatctgagcagggctaagcatttttgtaaatcataattttgatacttcatcagaagtatctataaaggtgtggatatcaaggtaggcaatgcatcaaagggttccaagcaactcctataaacctaatgcacatttcactagacttaaagtgtgcaaaaattatttaaaaacacaaggaaaggggttgcatgcaccggggcttgcctaaataacactaggttagtgttgttaagtggcgatgtccgcttgacgagtatctctcgaccgagcaattgattgatttaaccatcttcaagttggtccatcagcttcatcttgcggattagcccgcgcttggggtcgacttggctttggttctccgcatcacatagtcaacaaacgtacctaaatgatttgcataatgcacatgaatgcatataagcaggaataacacaaatataaatagtgctacgcgatagcgaattaaacacctatagcaagacatcgcaaatctagtatgaaaatactggatgtcgatatcacattaaaactatagctatggcattctaacttaatcggactcaattctaatagcacacaacagtaaactatgtataagcattttcctctcctaaaacctaccccaacggacttatagaacttagggtcattacttgcttcaatttaacttgtataaaacactaactaacaaatcagcacacaaatgtagcgtgcttactacaaacacgtaattgtaatggtatcgtataaattggattacttcaattaaccaaatcgacataatatcactagaaaatctagcaactagctgataaaaatactaagcctctcttttacgtcatcagttcgcctaaacatctcatttatgtttatcaatacaaccacacgtgacatctacatataaccatgcccgctccgcataatcgacaaccacaacctaacatatacatcaattaattaatgttgatttgtcaatcgtgtttgcgaccaaatcgatattgacaattacgatatctactcaccatgttcgtcagtcaaactaataggaataataatttaacttaccaagatcaaatcgatttgaaatcacaagaacgacgacggttgatggcacatattagcaaaagagccagagacgatgacgttcgaggtagcaaggcgaggctgagtccgccgcgaaggaataacctgcagccagagcgctcgcgcgacgatcaggacaataccgatgaatcgacgacgagcaccataatcagtctgacacgaatccgcgagttcaacacgaatcctaggtcaagctttccatcgaatgcatgaggagtgttggacagataccttcataatcatttaatttcttcattccctcagacatcactaaccactaatgaggagcaaggtcgaaggaggggctgcagaactctagagttgacggcatggatgagctgcccgattatcgagtgtcgacgcgtcgatgaaacccaatgatattagatacaaggagggagctggggcgcgctagatcgaggttgagacgaggctgggtatgaagggcgccgatgtccatggccacgtagaggatgacagcgtcgggccagcatgctgacacaaggcgtgatggagcgaacgcaacctgggcgtggttgcgagaacgccgactgacggggaggaagctggacgtcagacaccagaggaggcgcaacaaatttttgctggacagaaacgagcgtcgcgcgctgggagaaactcggccaggcagagaacttgagggagagagaggagaaagccacggcgttgcgcagagagaaggacgccagagcgcgtggcagtcgcgcagggagcttaggcgagtcgagggggcgcagccatggagaggagttgcacgcgcagggagatctggctggggtagaggaaatccgagctcagcaaagagatgaagacgtgagggagagctgagggagaaagaagacgtctgggcgcaagagcacgcgcggtcgagcaggggccggacgcgccatagaagggagctccacgagctggggcacggcgatgggaactgggggaaaaagatggaggtctagccggacgccaggaagacgaccgagcaaggcaccgaggaggaagtctagggcacggcgattttggctgatgcgtcaactgttgtcctctgttcccaccggaggaagcaccggatgctgggcgcgaacagggaggaatccgcgcactggagctcaggggaagagaaaccgcaacgcagggaggaagggcggccaggctcgagggagtggcgccatggagaggagcttgggggtcgcggcgcgtagcagagaggctcggcacatagggagatggaacgagcggctcatcaccggcggctggacgagcggaggaacaacgcgacagagaggctcgaccatgggggctagggagggagaagacgagctacaggagggagatggcaacgactttagaggaggagtggctgggcaccgatttcagcagaagagcacggcgaggaaaaaatcctggcgacagcatcgatcctcatccaggtgcttgagcggcggtgaaaaaaatccagggagggcggcaggacggggataggaaggagacggctaggagattgagatgaaggggatattttcttttttttatttctctctttttttaacagaaaccgaagatattttggatcccgatatttagcgatgtttacgatgtagacagtaattgtgacacggttttgatttgacgaatacttggaagtcggatgaatgcgtactgttaattcacctttttaaatcaag

SEQ ID NO: 58222 - DNA, 978 bp, Zea Mays
cacacatgacagtttatcacaggttatactccatatattgctatatggaggccagctcatcattacgcgccgagccacgcataggcgccgttgccacactttaaccatagggcaactcattatggtaactcaccttcttacctgagcttaggtgcgtcgttataagtacattacacttctcagtattcccatgtctgtatacccataaatatccatggggtaagatcaaggtcgagacgaggctaggtatgaagggcgtcgatgtccatggccacgtagaggatgacatcgtcgggccagcatgccgacacaaggcgtgatggagcgaacgcaacctgggcgtggttgcgagaacgccgactgacggggaggaagctgggcgtcagacaccagaggaggcgcgacaaatttttgctggacagaaaggagcgtcgcgcgctgggagaaactcggccaggcagagaacttgagggagagagaggagaaagccacggcgttgcgcagagagaaggacgccagagcgcgcgacagtcgcgcagggagctcaggcgagtcgagggggcgcagccatggagaggagacgagcgcgcagggagatccggctggggtagaggaaatccgagctcagcaaagagatgaagacgcgagggagagctgagggagaaagaagatgtctgggcgcaagagcacgcgcggtcgagcaggggttggacgcgccatggaagggagctccacgagctggggtgcggcgatgggaactgggggaaaaagatggagctctagccggacgccaggaagacgaccgagcagggcaccgaggaggaagtccagggcgcggcgattttggctgccgcgtcaactgttgtcctctgttcccaccggaggaagcaccggatgctgggcgcgaacagggaggaatccgcgcactggagctcaggggaagagaaaccgcagcgcagagaggaagggcggccaggc

SEQ ID NO: 58223 - DNA, 1227 bp, Zea Mays
atcttccttatcatatctgcatcgccccatttcctatcctcccagccgatcccctctccctcacggcgccctctcccatgcccgtcggccctccccgccatggacgccgctcttccttcctacagatgttgacaattggaaatccatgtagcaaataaatgattttggaactgggggcagacattggaggtggatttccctcaattggagatattgacaaattggaaaaaaaatgtgacttgacctgtgctgcaacaaccttaaactaggaggggattctaattcttcatctctaccaacaatcctctcctgttactttttaaaccaataactttttcatgtttttgtgcagatgcacacatccttgagccaaaatagaaaaaaatcatagaagagttctttggctgtcacgtgattcaagagtattaatgatatacaaaagtttgctttatggcaagttagtgtagctatttccactgcaaactatcaaatcattacaaactgctgggaacatgctccatcttatcgaagcatgtatcttgagaaagttgatcgatacatctgcttatttatggcctggttatgttgtaccatctgggactttaaaagatacagctttgccccaagaatccccttggttaaactttatgaaagtgtctcgactttcaggaccccttattgatgctctggtcgcatctcctgcttcaaggtgtttcaagctctgcaaggtgaggtctgttcagtttggccagaaaggcatctcctacctgaacacctacgacggccgcacaatccgctaccccgacctgctcatcaaggccaacgacaccatcaagatcgatctagagaccaacaagatcatggacttcttcaagtttgacgtcagcaacgtgttcatggtaaccggcgggaggaacaccaggcgtgtaggagtgatcaagaactgggagaagcacaaggccagcttcgaggtcatcgacgtgctgcttggagctttttgcatgctatgtctagttttctcctatttgttgtacaagaaaacataaaatggaattcaaatttggtggtcgcaaaagtgtggagacttgaattcatataaagttaggcttaacattagtgcaaaaagttgtattttagtttagatttagagtacacttatgtatgccttgtttgacaatacttatttatgatatattgaatggtacctattgtaattgtctattattg

SEQ ID NO: 58224 - DNA, 1253 bp, Zea Mays
cttccttatcatatctgcatcgccccatttcctatcctcccagccgatcccctctccctcacggcgccctctcccatgcccgtcggccctccccgccatggacgccgctcttccttcctacagatgttgacaattggaaatccatgtagcaaataaatgattttggaactgggggcaggtcagagtctagagcatgttcattccacacattggaggtggatttccctcaattggagatattgacaaattggaaaaaaaatgtgacttgacctgtgctgcaacaaccttaaactaggaggggattctaattcttcatctctaccaacaatcctctcctgttactttttaaaccaataactttttcatgtttttgtgcagatgcacacatccttgagccaaaatagaaaaaaatcatagaagagttctttggctgtcacgtgattcaagagtattaatgatatacaaaagtttgctttatggcaagttagtgtagctatttccactgcaaactatcaaatcattacaaactgctgggaacatgctccatcttatcgaagcatgtatcttgagaaagttgatcgatacatctgcttatttatggcctggttatgttgtaccatctgggactttaaaagatacagctttgccccaagaatccccttggttaaactttatgaaagtgtctcgactttcaggaccccttattgatgctctggtcgcatctcctgcttcaaggtgtttcaagctctgcaaggtgaggtctgttcagtttggccagaaaggcatctcctacctgaacacctacgacggccgcacaatccgctaccccgacctgctcatcaaggccaacgacaccatcaagatcgatctagagaccaacaagatcatggacttcttcaagtttgacgtcagcaacgtgttcatggtaaccggcgggaggaacaccaggcgtgtaggagtgatcaagaactgggagaagcacaaggccagcttcgaggtcatcgacgtgctgcttggagctttttgcatgctatgtctagttttctcctatttgttgtacaagaaaacataaaatggaattcaaatttggtggtcgcaaaagtgtggagacttgaattcatataaagttaggcttaacattagtgcaaaaagttgtattttagtttagatttagagtacacttatgtatgccttgtttgacaatacttatttatgatatattgaatggtacctattgtaattgtctattattg

SEQ ID NO: 58225 - DNA, 1499 bp, Zea Mays
ctctccctcacggcgccctctcccatgcccgtcggccctccccgccatggacgccgctcttccttcctacagtacgtcagcgacctcgtctccctctcttcccgtggacgcctgctgcaggagctgttcctcccctgcgctcgcctaagatggccggactcgcccatgatggctttcccctgtcgatgctgttctctagccgccatggcagtgcctccctgcagtgcagcagtccggtgactgggccctccccttcccacgtcatgctggtgccatgtcttctccctcaccggccaacctcgccagccaccaggaaggtgtctccctctcggtagctcccatggccaccatcatgtcatgtctgagcagatgttgacaattggaaatccatgtagcaaataaatgattttggaactgggggcaggtcagagtctagagcatgttcattccacacattggaggtggatttccctcaattggagatattgacaaattggaaaaaaaatgtgacttgacctgtgctgcaacaaccttaaactaggaggggattctaattcttcatctctaccaacaatcctctcctgttactttttaaaccaataactttttcatgtttttgtgcagatgcacacatccttgagccaaaatagaaaaaaatcatagaagagttctttggctgtcacgtgattcaagagtattaatgatatacaaaagtttgctttatggcaagttagtgtagctatttccactgcaaactatcaaatcattacaaactgctgggaacatgctccatcttatcgaagcatgtatcttgagaaagttgatcgatacatctgcttatttatggcctggttatgttgtaccatctgggactttaaaagatacagctttgccccaagaatccccttggttaaactttatgaaagtgtctcgactttcaggaccccttattgatgctctggtcgcatctcctgcttcaaggtgtttcaagctctgcaaggtgaggtctgttcagtttggccagaaaggcatctcctacctgaacacctacgacggccgcacaatccgctaccccgacctgctcatcaaggccaacgacaccatcaagatcgatctagagaccaacaagatcatggacttcttcaagtttgacgtcagcaacgtgttcatggtaaccggcgggaggaacaccaggcgtgtaggagtgatcaagaactgggagaagcacaaggccagcttcgaggtcatcgacgtgctgcttggagctttttgcatgctatgtctagttttctcctatttgttgtacaagaaaacataaaatggaattcaaatttggtggtcgcaaaagtgtggagacttgaattcatataaagttaggcttaacattagtgcaaaaagttgtattttagtttagatttagagtacacttatgtatgccttgtttgacaatacttatttatgatatattgaatggtacctattgtaattgtctattattg

SEQ ID NO: 58226 - DNA, 650 bp, Zea Mays
caaacgacgatcagaataatccagagaatcatatccgtaacaaactcacctcggttgttgcgactcgctgacgctccgacgaactcacgtcccggcggtggcgcgccggcggccacgggttgtctcacatcagccctagctgcgcttgccctggttccagcagctcgacgccagcccctctcaatcttccatcgctgccgctcagcttgtcccagccccaacgccgaccccctgttccctctagcttcgacgtccgtcgagccctgcccctaccccatggtcggcctacctcgccggtgaggccctggcgctacctctcaactcgccctcaagcctagagtctcgttgttcccctcctcacgttgatgctgcagcggggctacgcctctcccttttgcagtacctcaccactatttcgtttgttgtcggagcgaaatccgtggaatctgggtgaagaagaaacagaacacgtccgtcgcttactagctactaggtgaaaggattgaatcggctgtcgttgtcgtttagtgccgatcgagtcaactttagtcgtggatgttgacaattggaaatccatgtagcaaataaatgattttggaactgggggcagtaaagcaaggtttgtgacctggatttattgggtgttgtag

SEQ ID NO: 58227 - DNA, 1657 bp, Zea Mays
caaacgacgatcagaataatccagagaatcatatccgtaacaaactcacctcggttgttgcgactcgctgacgctccgacgaactcacgtcccggcggtggcgcgccggcggccacgggttgtctcacatcagccctagctgcgcttgccctggttccagcagctcgacgccagcccctctcaatcttccatcgctgccgctcagcttgtcccagccccaacgccgaccccctgttccctctagcttcgacgtccgtcgagccctgcccctaccccatggtcggcctacctcgccggtgaggccctggcgctacctctcaactcgccctcaagcctagagtctcgttgttcccctcctcacgttgatgctgcagcggggctacgcctctcccttttgcagtacctcaccactatttcgtttgttgtcggagcgaaatccgtggaatctgggtgaagaagaaacagaacacgtccgtcgcttactagctactaggtgaaaggattgaatcggctgtcgttgtcgtttagtgccgatcgagtcaactttagtcgtggatgttgacaattggaaatccatgtagcaaataaatgattttggaactgggggcagacattggaggtggatttccctcaattggagatattgacaaattggaaaaaaaatgtgacttgacctgtgctgcaacaaccttaaactaggaggggattctaattcttcatctctaccaacaatcctctcctgttactttttaaaccaataactttttcatgtttttgtgcagatgcacacatccttgagccaaaatagaaaaaaatcatagaagagttctttggctgtcacgtgattcaagagtattaatgatatacaaaagtttgctttatggcaagttagtgtagctatttccactgcaaactatcaaatcattacaaactgctgggaacatgctccatcttatcgaagcatgtatcttgagaaagttgatcgatacatctgcttatttatggcctggttatgttgtaccatctgggactttaaaagatacagctttgccccaagaatccccttggttaaactttatgaaagtgtctcgactttcaggaccccttattgatgctctggtcgcatctcctgcttcaaggtgtttcaagctctgcaaggtgaggtctgttcagtttggccagaaaggcatctcctacctgaacacctacgacggccgcacaatccgctaccccgacctgctcatcaaggccaacgacaccatcaagatcgatctagagaccaacaagatcatggacttcttcaagtttgacgtcagcaacgtgttcatggtaaccggcgggaggaacaccaggcgtgtaggagtgatcaagaactgggagaagcacaaggccagcttcgaggtcatcgacgtgctgcttggagctttttgcatgctatgtctagttttctcctatttgttgtacaagaaaacataaaatggaattcaaatttggtggtcgcaaaagtgtggagacttgaattcatataaagttaggcttaacattagtgcaaaaagttgtattttagtttagatttagagtacacttatgtatgccttgtttgacaatacttatttatgatatattgaatggtacctattgtaattgtctattattg

SEQ ID NO: 58228 - DNA, 441 bp, Zea Mays
ctcacgtcccggcggtggcgcgccggcggccacgggttgtctcacatcagccctagctgcgcttgccctggttccagcagctcgacgccagcccctctcaatcttccatcgctgccgctcagcttgtcccagccccaacgccgaccccctgttccctctagcttcgacgtccgtcgagccctgcccctaccccatggtcggcctacctcgccggtgaggccctggcgctacctctcaactcgccctcaagcctagagtctcgttgttcccctcctcacgttgatgctgcagcggggctacgcctctcccttttgcagtacctcaccactatttcgtttgttgtcggatgttgacaattggaaatccatgtagcaaataaatgattttggaactgggggcagtaaagcaaggtttgtgacctggatttattgggtgttgtag

SEQ ID NO: 58229 - DNA, 1544 bp, Zea Mays
ctcacgtcccggcggtggcgcgccggcggccacgggttgtctcacatcagccctagctgcgcttgccctggttccagcagctcgacgccagcccctctcaatcttccatcgctgccgctcagcttgtcccagccccaacgccgaccccctgttccctctagcttcgacgtccgtcgagccctgcccctaccccatggtcggcctacctcgccggtgaggccctggcgctacctctcaactcgccctcaagcctagagtctcgttgttcccctcctcacgttgatgctgcagcggggctacgcctctcccttttgcagtacctcaccactatttcgtttgttgtcggatgttgacaattggaaatccatgtagcaaataaatgattttggaactgggggcaggtcagagtctagagcatgttcattccacacattggaggtggatttccctcaattggagatattgacaaattggaaaaaaaatgtgacttgacctgtgctgcaacaaccttaaactaggaggggattctaattcttcatctctaccaacaatcctctcctgttactttttaaaccaataactttttcatgtttttgtgcagatgcacacatccttgagccaaaatagaaaaaaatcatagaagagttctttggctgtcacgtgattcaagagtattaatgatatacaaaagtttgctttatggcaagttaggtaaccacaaattttgggcaatgacagggacgtgcagtggtggtctcttaaaagaattttgtgtccagtgtagctatttccactgcaaactatcaaatcattacaaactgctgggaacatgctccatcttatcgaagcatgtatcttgagaaagttgatcgatacatctgcttatttatggcctggttatgttgtaccatctgggactttaaaagatacagctttgccccaagaatccccttggttaaactttatgaaagtgtctcgactttcaggaccccttattgatgctctggtcgcatctcctgcttcaaggtgtttcaagctctgcaaggtgaggtctgttcagtttggccagaaaggcatctcctacctgaacacctacgacggccgcacaatccgctaccccgacctgctcatcaaggccaacgacaccatcaagatcgatctagagaccaacaagatcatggacttcttcaagtttgacgtcagcaacgtgttcatggtaaccggcgggaggaacaccaggcgtgtaggagtgatcaagaactgggagaagcacaaggccagcttcgaggtcatcgacgtgctgcttggagctttttgcatgctatgtctagttttctcctatttgttgtacaagaaaacataaaatggaattcaaatttggtggtcgcaaaagtgtggagacttgaattcatataaagttaggcttaacattagtgcaaaaagttgtattttagtttagatttagagtacacttatgtatgccttgtttgacaatacttatttatgatatattgaatggtacctattgtaattgtctattattg

SEQ ID NO: 58230 - DNA, 1516 bp, Zea Mays
ctcacgtcccggcggtggcgcgccggcggccacgggttgtctcacatcagccctagctgcgcttgccctggttccagcagctcgacgccagcccctctcaatcttccatcgctgccgctcagcttgtcccagccccaacgccgaccccctgttccctctagcttcgacgtccgtcgagccctgcccctaccccatggtcggcctacctcgccggtgaggccctggcgctacctctcaactcgccctcaagcctagagtctcgttgttcccctcctcacgttgatgctgcagcggggctacgcctctcccttttgcagtacctcaccactatttcgtttgttgtcggatgttgacaattggaaatccatgtagcaaataaatgattttggaactgggggcagacattggaggtggatttccctcaattggagatattgacaaattggaaaaaaaatgtgacttgacctgtgctgcaacaaccttaaactaggaggggattctaattcttcatctctaccaacaatcctctcctgttactttttaaaccaataactttttcatgtttttgtgcagatgcacacatccttgagccaaaatagaaaaaaatcatagaagagttctttggctgtcacgtgattcaagagtattaatgatatacaaaagtttgctttatggcaagttaggtaaccacaaattttgggcaatgacagggacgtgcagtggtggtctcttaaaagaattttgtgtccagtgtagctatttccactgcaaactatcaaatcattacaaactgctgggaacatgctccatcttatcgaagcatgtatcttgagaaagttgatcgatacatctgcttatttatggcctggttatgttgtaccatctgggactttaaaagatacagctttgccccaagaatccccttggttaaactttatgaaagtgtctcgactttcaggaccccttattgatgctctggtcgcatctcctgcttcaaggtgtttcaagctctgcaaggtgaggtctgttcagtttggccagaaaggcatctcctacctgaacacctacgacggccgcacaatccgctaccccgacctgctcatcaaggccaacgacaccatcaagatcgatctagagaccaacaagatcatggacttcttcaagtttgacgtcagcaacgtgttcatggtaaccggcgggaggaacaccaggcgtgtaggagtgatcaagaactgggagaagcacaaggccagcttcgaggtcatcgacgtgctgcttggagctttttgcatgctatgtctagttttctcctatttgttgtacaagaaaacataaaatggaattcaaatttggtggtcgcaaaagtgtggagacttgaattcatataaagttaggcttaacattagtgcaaaaagttgtattttagtttagatttagagtacacttatgtatgccttgtttgacaatacttatttatgatatattgaatggtacctattgtaattgtctattattg

SEQ ID NO: 58231 - DNA, 1296 bp, Zea Mays
cttttgcagtacctcaccactatttcgtttgttgtcggagcgaaatccgtggaatctgggtgaagaagaaacagaacacgtccgtcgcttactagctactaggtgaaaggattgaatcggctgtcgttgtcgtttagtgccgatcgagtcaactttagtcgtggtgatgttgacaattggaaatccatgtagcaaataaatgattttggaactgggggcaggtcagagtctagagcatgttcattccacacattggaggtggatttccctcaattggagatattgacaaattggaaaaaaaatgtgacttgacctgtgctgcaacaaccttaaactaggaggggattctaattcttcatctctaccaacaatcctctcctgttactttttaaaccaataactttttcatgtttttgtgcagatgcacacatccttgagccaaaatagaaaaaaatcatagaagagttctttggctgtcacgtgattcaagagtattaatgatatacaaaagtttgctttatggcaagttagtgtagctatttccactgcaaactatcaaatcattacaaactgctgggaacatgctccatcttatcgaagcatgtatcttgagaaagttgatcgatacatctgcttatttatggcctggttatgttgtaccatctgggactttaaaagatacagctttgccccaagaatccccttggttaaactttatgaaagtgtctcgactttcaggaccccttattgatgctctggtcgcatctcctgcttcaaggtgtttcaagctctgcaaggtgaggtctgttcagtttggccagaaaggcatctcctacctgaacacctacgacggccgcacaatccgctaccccgacctgctcatcaaggccaacgacaccatcaagatcgatctagagaccaacaagatcatggacttcttcaagtttgacgtcagcaacgtgttcatggtaaccggcgggaggaacaccaggcgtgtaggagtgatcaagaactgggagaagcacaaggccagcttcgaggtcatcgacgtgctgcttggagctttttgcatgctatgtctagttttctcctatttgttgtacaagaaaacataaaatggaattcaaatttggtggtcgcaaaagtgtggagacttgaattcatataaagttaggcttaacattagtgcaaaaagttgtattttagtttagatttagagtacacttatgtatgccttgtttgacaatacttatttatgatatattgaatggtacctattgtaattgtctattattg

SEQ ID NO: 58232 - DNA, 916 bp, Zea Mays
gtcagagtctagagcatgttcattccacgctgtcacgtgattcaagagtattaatgatatacaaaagtttgctttatggcaagttaggtaaccacaaattttgggcaatgacagggacgtgcagtggtggtctcttaaaagaattttgtgtccagtgtagctatttccactgcaaactatcaaatcattacaaactgctgggaacatgctccatcttatcgaagcatgtatcttgagaaagttgatcgatacatctgcttatttatggcctggttatgttgtaccatctgggactttaaaagatacagctttgccccaagaatccccttggttaaactttatgaaagtgtctcgactttcaggaccccttattgatgctctggtcgcatctcctgcttcaagttcaagctctgcaaggtgaggtctgttcagtttggccagaaaggcatctcctacctgaacacctacgacggccgcacaatccgctaccccgacctgctcatcaaggccaacgacaccatcaagatcgatctagagaccaacaagatcatggacttcttcaagtttgacgtcagcaacgtgttcatggtaaccggcgggaggaacaccaggcgtgtaggagtgatcaagaactgggagaagcacaaggccagcttcgaggtcatcgacgtgctgcttggagctttttgcatgctatgtctagttttctcctatttgttgtacaagaaaacataaaatggaattcaaatttggtggtcgcaaaagtgtggagacttgaattcatataaagttaggcttaacattagtgcaaaaagttgtattttagtttagatttagagtacacttatgtatgccttgtttgacaatacttatttatgatatattgaatggtacctattgtaattgtctattattg

SEQ ID NO: 58233 - DNA, 120 bp, Zea Mays
tcctcaaaatgtctaacagacttgttttcttcaggccagggacccaggggctacacatcttataactaaaaaacacatgagcagtttatgaggctgtcaggttttcatttcaatgcaaat

SEQ ID NO: 58234 - DNA, 1116 bp, Zea Mays
tctttttttttttttttgcaaagcacctctcttgttccttcgtcctcgtgtctcgctcctcgcccattccgcgctctaaacaataggcctgccatcgctcgcggaagtctccattcctgcgcgcgaatctccctcccctcccaagcgatccccattgtcgaggcccgattcggatcacctaggttttctcttcgcgaccgggcaggcggtggcgaggatgcggcgctaggctcggctctgtggtgatgaacatcgtgcggggagtcgccgaccttctccgcaaggcgccgccacctccccccgcaccggacgctggtgcggcgcctaccgcctccttctccgccggtgacttcgacgacgcgcccaccccgcgcgtcgtcttcagtggtagtctggaggagggagctctgaatgcactctggaagaattacgagaatgcgcttgataaggtcgagaaggaaaaatctcttcaaatttttgtcttgcaatttgtagagacattcagagattgggatccaaacccaattgagcaattggttgatcaagaattgggaaacaatgaaacagttgtaggatgctcttgcgggcatccttctgaggtcattcttattttgattcaggagatttctctaattacatcaacttttactgaaaagtattcagctactatggtggtgtacagaagattacttctctactaaaagctgctgttgctcagctcaaaaacttgaactgtttgctggctgcagaagaccaatctgcagatgaagcagtgaaaaattctagggtgatgctaaatatacttgtatgcataatcaccataatttcaaacttcatgaagttggacataactgttggaaggattccccatattaccgataccacaaagcataccccatcatgcaaccatttggctgcagtcacgtctagctctcctgatagaaccatttctgatacacttcgacattggcagcagaaagcaactgttcttgtgatggaagccagatgtgtcaactggttagtagaactattacacaccgttcaaaggttgaatttgaaagagcaatgcattgacctctcactccattttattactttgtgcattctgcgatcgac

SEQ ID NO: 58235 - DNA, 2939 bp, Zea Mays
tctttttttttttttttgcaaagcacctctcttgttccttcgtcctcgtgtctcgctcctcgcccattccgcgctctaaacaataggcctgccatcgctcgcggaagtctccattcctgcgcgcgaatctccctcccctcccaagcgatccccattgtcgaggcccgattcggatcacctaggttttctcttcgcgaccgggcaggcggtggcgaggatgcggcgctaggctcggctctgtggtgatgaacatcgtgcggggagtcgccgaccttctccgcaaggcgccgccacctccccccgcaccggacgctggtgcggcgcctaccgcctccttctccgccggtgacttcgacgacgcgcccaccccgcgcgtcgtcttcagtggtagtctggaggagggagctctgaatgcactctggaagaattacgagaatgcgcttgataaggtcgagaaggaaaaatctcttcaaatttttgtcttgcaatttgtagagacattcagagattgggatccaaacccaattgagcaattggttgatcaagaattgggaaacaatgaaacagttgtaggatgctcttgcgggcatccttctgaggtcattcttattttgattcaggagatttctctaattacatcaacttttactgaaagtggcaacagtcctgtatctcctacaaatcattattcagggcaacaaaataacctgggtttaagctcacaaatattgcaagttctggagtgtttggaaattctgactcgctccttgcataactgtagagtattcagctactatggtggtgtacagaagattacttctctactaaaagctgctgttgctcagctcaaaaacttgaactgtttgctggctgcagaagaccaatctgcagatgaagcagtgaaaaattctagggtgatgctaaatatacttgtatgcataatcaccataatttcaaacttcatgaagttggacataactgttggaaggattccccatattaccgataccacaaagcataccccatcatgcaaccatttggctgcagtcacgtctagctctcctgatagaaccatttctgatacacttcgacattggcagcagaaagcaactgttcttgtgatggaagccagatgtgtcaactggttagtagaactattacacaccgttcaaaggttgaatttgaaagagcaatgcattgacctctcactccattttattactttgtgcattctgcgatcgactgtttctggtactcgtgctcagaatcatctcagaagcattggtgggctggaaattctattggatggacttggacttccttctagtaaattttcagttccgaggcaatcttctatctcaaaaaatgaaagggatgaaatacttctgctccagatacagtatttgcaaactctgagtgaggcagtatttggcaacgtcaacaatttgcaaattttatttgaaaatggacgggtacacaaatttgcaaactgcatttgttggcctgcatttatgattcagatgttccattggcaaaatgacagtaccaaagcttcacttacactagattctgtctctggtccaacttattctcttgatagaactgaatggattgactactctataaaattgagcaatgccttttgttcttttgttcttccttcggaggatatcggatactgttccgatgaaatagctgtcagccaaattgtattatccatcccactggcatacctggagcaatctgtgagatggatcataaggattcttatgactgtctttctatgtatcagagcgtgtaccaaggaaactgagctgccacaccacatcaagatttttgcaaagaccctacaatattatgtgattcgtatgttcaaaagagttcttatttcaacaccagctctactcccagcttttcgagaggaaggtgtatgggacctgttattctcagggaattttttctactttggttcatctatagaagacacttgttttcatactgttacggatattcaaaatggtaatgttagcagtaaccgaatatctattcattctgaaagcttgtatcgtaccgatgttaaaattcttcaagtggaagctatttccttcttggagtttgctgcaacactccatgaaaacacatataacatgccagaatgctcagcactgctagatgcacttgagcattgcatttctgatcctttgctagtcagcactcttctcaaaagcttccgtgttattctacaactcgcgacagaacatactctagcttcatttgaatcattggatgtaattacaagagtccttaaggctgcttgccgtcaggcacaagagctacggaacttcagcaattttctttgttctaatgtcagcatcagtcaagatagttctcaatttaaaaatattgaaggcagaactgaggacactcttatatgtacagagttagctttgagcctctttatggaatatgtcactatatcgatagatggaaggattctcgttttacacaatgctgattgtattgattgtttatttgacttgttccatgaacagaacattcgagaacatgtgctggagcaagttcttgccttatttaggttgccttcatcgtcagcagaagatcatacagcaaagttgcagttatgttcaaagtatttagagaacttagcacgggcaaatgaaaaagaaaaggtcaacacagagttattaattgatcttctggtcaacatgagagagatcataatgatggatcacatgtactatcaaaatctattccgcgacgaagggtgctttctgcatattatttcattattgaatggaaatttcaataaggtgactgatgagcggcttgtccttaacgtccttcagaccttaactttattacttgaagggaatgatgcatctaagggtgcctttagattactagttggtgcaggttaa

SEQ ID NO: 58236 - DNA, 2567 bp, Zea Mays
tctttttttttttttttgcaaagcacctctcttgttccttcgtcctcgtgtctcgctcctcgcccattccgcgctctaaacaataggcctgccatcgctcgcggaagtctccattcctgcgcgcgaatctccctcccctcccaagcgatccccattgtcgaggcccgattcggatcacctaggttttctcttcgcgaccgggcaggcggtggcgaggatgcggcgctaggctcggctctgtggtgatgaacatcgtgcggggagtcgccgaccttctccgcaaggcgccgccacctccccccgcaccggacgctggtgcggcgcctaccgcctccttctccgccggtgacttcgacgacgcgcccaccccgcgcgtcgtcttcagtggtagtctggaggagggagctctgaatgcactctggaagaattacgagaatgcgcttgataaggtcgagaaggaaaaatctcttcaaatttttgtcttgcaatttgtagagacattcagagattgggatccaaacccaattgagcaattggttgatcaagaattgggaaacaatgaaacagttgtaggatgctcttgcgggcatccttctgaggtcattcttattttgattcaggagatttctctaattacatcaacttttactgaaagtggcaacagtcctgtatctcctacaaatcattattcagggcaacaaaataacctgggtttaagctcacaaatattgcaagttctggagtgtttggaaattctgactcgctccttgcataactgtagagtattcagctactatggtggtgtacagaagattacttctctactaaaagctgctgttgctcagctcaaaaacttgaactgtttgctggctgcagaagaccaatctgcagatgaagcagtgaaaaattctagggtgatgctaaatatacttgtatgcataatcaccataatttcaaacttcatgaagttggacataactgttggaaggattccccatattaccgataccacaaagcataccccatcatgcaaccatttggctgcagtcacgtctagctctcctgatagaaccatttctgatacacttcgacattggcagcagaaagcaactgttcttgtgatggaagccagatgtgtcaactggttaatgttccattggcaaaatgacagtaccaaagcttcacttacactagattctgtctctggtccaacttattctcttgatagaactgaatggattgactactctataaaattgagcaatgccttttgttcttttgttcttccttcggaggatatcggatactgttccgatgaaatagctgtcagccaaattgtattatccatcccactggcatacctggagcaatctgtgagatggatcataaggattcttatgactgtctttctatgtatcagagcgtgtaccaaggaaactgagctgccacaccacatcaagatttttgcaaagaccctacaatattatgtgattcgtatgttcaaaagagttcttatttcaacaccagctctactcccagcttttcgagaggaaggtgtatgggacctgttattctcagggaattttttctactttggttcatctatagaagacacttgttttcatactgttacggatattcaaaatggtaatgttagcagtaaccgaatatctattcattctgaaagcttgtatcgtaccgatgttaaaattcttcaagtggaagctatttccttcttggagtttgctgcaacactccatgaaaacacatataacatgccagaatgctcagcactgctagatgcacttgagcattgcatttctgatcctttgctagtcagcactcttctcaaaagcttccgtgttattctacaactcgcgacagaacatactctagcttcatttgaatcattggatgtaattacaagagtccttaaggctgcttgccgtcaggcacaagagctacggaacttcagcaattttctttgttctaatgtcagcatcagtcaagatagttctcaatttaaaaatattgaaggcagaactgaggacactcttatatgtacagagttagctttgagcctctttatggaatatgtcactatatcgatagatggaaggattctcgttttacacaatgctgattgtattgattgtttatttgacttgttccatgaacagaacattcgagaacatgtgctggagcaagttcttgccttatttaggttgccttcatcgtcagcagaagatcatacagcaaagttgcagttatgttcaaagtatttagagaacttagcacgggcaaatgaaaaagaaaaggtcaacacagagttattaattgatcttctggtcaacatgagagagatcataatgatggatcacatgtactatcaaaatctattccgcgacgaagggtgctttctgcatattatttcattattgaatggaaatttcaataaggtgactgatgagcggcttgtccttaacgtccttcagaccttaactttattacttgaagggaatgatgcatctaagggtgcctttagattactagttggtgcaggttaa

SEQ ID NO: 58237 - DNA, 5877 bp, Zea Mays
tctttttttttttttttgcaaagcacctctcttgttccttcgtcctcgtgtctcgctcctcgcccattccgcgctctaaacaataggcctgccatcgctcgcggaagtctccattcctgcgcgcgaatctccctcccctcccaagcgatccccattgtcgaggcccgattcggatcacctaggttttctcttcgcgaccgggcaggcggtggcgaggatgcggcgctaggctcggctctgtggtgatgaacatcgtgcggggagtcgccgaccttctccgcaaggcgccgccacctccccccgcaccggacgctggtgcggcgcctaccgcctccttctccgccggtgacttcgacgacgcgcccaccccgcgcgtcgtcttcagtggtagtctggaggagggagctctgaatgcactctggaagaattacgagaatgcgcttgataaggtcgagaaggaaaaatctcttcaaatttttgtcttgcaatttgtagagacattcagagattgggatccaaacccaattgagcaattggttgatcaagaattgggaaacaatgaaacagttgtaggatgctcttgcgggcatccttctgaggtcattcttattttgattcaggagatttctctaattacatcaacttttactgaaagtggcaacagtcctgtatctcctacaaatcattattcagggcaacaaaataacctgggtttaagctcacaaatattgcaagttctggagtgtttggaaattctgactcgctccttgcataactgtagagtattcagctactatggtggtgtacagaagattacttctctactaaaagctgctgttgctcagctcaaaaacttgaactgtttgctggctgcagaagaccaatctgcagatgaagcagtgaaaaattctagggtgatgctaaatatacttgtatgcataatcaccataatttcaaacttcatgaagttggacataactgttggaaggattccccatattaccgataccacaaagcataccccatcatgcaaccatttggctgcagtcacgtctagctctcctgatagaaccatttctgatacacttcgacattggcagcagaaagcaactgttcttgtgatggaagccagatgtgtcaactggttagtagaactattacacaccgttcaaaggttgaatttgaaagagcaatgcattgacctctcactccattttattactttgtgcattctgcgatcgactgtttctggtactcgtgctcagaatcatctcagaagcattggtgggctggaaattctattggatggacttggacttccttctagtaaattttcagttccgaggcaatcttctatctcaaaaaatgaaagggatgaaatacttctgctccagatacagtatttgcaaactctgagtgaggcagtatttggcaacgtcaacaatttgcaaattttatttgaaaatggacgggtacacaaatttgcaaactgcatttgttggcctgcatttatgattcagatgttccattggcaaaatgacagtaccaaagcttcacttacactagattctgtctctggtccaacttattctcttgatagaactgaatggattgactactctataaaattgagcaatgccttttgttcttttgttcttccttcggaggatatcggatactgttccgatgaaatagctgtcagccaaattgtattatccatcccactggcatacctggagcaatctgtgagatggatcataaggattcttatgactgtctttctatgtatcagagcgtgtaccaaggaaactgagctgccacaccacatcaagatttttgcaaagaccctacaatattatgtgattcgtatgttcaaaagagttcttatttcaacaccagctctactcccagcttttcgagaggaaggtgtatgggacctgttattctcagggaattttttctactttggttcatctatagaagacacttgttttcatactgttacggatattcaaaatggtaatgttagcagtaaccgaatatctattcattctgaaagcttgtatcgtaccgatgttaaaattcttcaagtggaagctatttccttcttggagtttgctgcaacactccatgaaaacacatataacatgccagaatgctcagcactgctagatgcacttgagcattgcatttctgatcctttgctagtcagcactcttctcaaaagcttccgtgttattctacaactcgcgacagaacatactctagcttcatttgaatcattggatgtaattacaagagtccttaaggctgcttgccgtcaggcacaagagctacggaacttcagcaattttctttgttctaatgtcagcatcagtcaagatagttctcaatttaaaaatattgaaggcagaactgaggacactcttatatgtacagagttagctttgagcctctttatggaatatgtcactatatcgatagatggaaggattctcgttttacacaatgctgattgtattgattgtttatttgacttgttccatgaacagaacattcgagaacatgtgctggagcaagttcttgccttatttaggttgccttcatcgtcagcagaagatcatacagcaaagttgcagttatgttcaaagtatttagagaacttagcacgggcaaatgaaaaagaaaaggtcaacacagagttattaattgatcttctggtcaacatgagagagatcataatgatggatcacatgtactatcaaaatctattccgcgacgaagggtgctttctgcatattatttcattattgaatggaaatttcaataaggtgactgatgagcggcttgtccttaacgtccttcagaccttaactttattacttgaagggaatgatgcatctaagaatgaagatgctgttgtattacttctaaatattttgcagaagcacgtcacttcagcactatgggcttgtaatcttacagcagttgctcaaacaatccattacaaatagaacatcttgtttcagagccggcttgctaagttttcttcttgattggttttcggtagaggaaagggatgatacagttattgcaatcacagagttaatacaaatacttggtgcacacagtatatgtggcaaggacatcaggaaaatctttgcccttttgcgctgtgagaagattggtgccaaacacaagcacacatctttgcttctgacaagtctcagtcacatgctgaaggaaaaggggccagaagctttctttgagttcagtggccatgattctggtatagatataaaatcaccctttctatggccttacaatagagggatatctttttcttgctggttaagggttgaaaacttcccagacagtggtatgatgggccttttctccttttttaaagaagacgggaaggggtgctcagctgttcttaacagaagtgctttagtatatgagtctatctatcaaaaacatcagtgtgttctgttaccactcaagctcccaccaaagcaatggagattcctttctattactcatacaattgggagggctttctccggaggaagccagttgaggtgttatgtagatggggagctagtatcatccgagaagtgtgggtatccaaaattcaacgaagcaatgacttactgcaccattggcacaaaattgatacctgttggtgatggacctatctcaattggtttcgaaaaaacttctgccttcacaggtcaaatgggcccagtctatgtattttctgatgcactttcttcagagcaagtaaagggcatatattttctgggaccaagttacatgtactctttccatggcgatgattcactctacaggggaattgttgatgctagagatggcctttcatcaaagataatttttggtttcaatgcacaggctagtgaaggtcgtagtttgttcagtgtgtcatcagcactcgataatgccgacaaaaatacatttcaagcaacaattatgggggggacaaagttatgctcacgacacttgcctcaggatattatttactgtgttggtggtgtctccgtatttttcccactcttcactcaattttttgatgctgcaagtgatattgagaaatgttgccatacatctgttgtcaatgataaattggtggctgaggtcattgagctagttgctactgttctggatggaaatgtgtcaaatcagcaacagatgtatcttctttctgggttatctattctaggcttcttgcttcaatcagctaccccacagctcttaaccaccaaaactctttctgcactgaagtatatgtttgacattctgaggaactgcagcatgtcaaaagtcctcctcaaagatgctatctcacaaatttatttgaatccacaaatatgggtatatgcaagctatgaagtacaaagagatctctatatgtttgtgataaactattttgaaacagatggaaggcttttaccacttctatgtggacttccttgggttattgatattgtgtgccgatattactgggaaaaggcagattctaggcatgttgttgcttccaagcctttgtttcattcagttaccaaacaagttattggagagagacctgaggtagttgaaattcgcaagcttcgtcttctcctcctgagtttagcagaaatgagcttaaagataaaagtttctcctgatgacataagagcgcttgtagcttttattgagaggagtcaagacatagcatgtatcagcgatgtactggacatgatcatccgtgctctttcacagggagaagttttttcatcatttgttgggaacgtaaattaccttggtggttgttgcattttcattaatcttctcaagagggaatttgagccagtccgtttgttggggcttcagctccttggaaaacttttgactgggattccatctgagaagaaagaaacgaaactatttgccctacccttagggcagtctagacccatctctgaaaacttaacaaaagaaataacagcggcacctcagtttttcttgaatacaatgtctgaaaggctattcaaatttccactatcagataacttatgtgcagcacttttcagtgttcttagtggaaccagtgcacaacaggttccccaggaaaattctgagcctgatccatcaagggatagaaattgcaatattttaagcttgccacccttttcccttcctcagattttgatatgcatctttagatttatgcattcttgtaaagattcctcagcacgcacaagaatcttaaatcttcttcttggtttgctggattcaaactcttcaaacatcgaggcattaatggagcacagttggaactcttggcttgaaacatccacaaaacttgaggtattcaaggactacaaatcagtttctaaaggcgaccctgacgatgtgaaggcagatgaaataagtcttgttaggaacttgtattctttggtcctttcatactacctgcgctttgttagaggtggctggcatcaacttgatgatactgctaattattttctcttaaaaactgaccagggacaactatcatgttctgatttgcttagggacatacttgatgatattgctgggagcctgcttcacaaatctgtggaagataatattttccttttacagccttgctgtgataatgttttacattttttgaaccttatacaggagctgcttatcagtcaaatgggaattaggctattgtttctctctcccagtatttcggaggaatcttcacatgataacatatggaaagaagatattaagtcaacagtaaatgatattttaaataccgagagccatggtcaatttacaaggagagctgcgcatcatttcattaataggagaaagaaatgaaat

SEQ ID NO: 58238 - DNA, 7329 bp, Zea Mays
aagtataagttagatgagaaaacaactataaagaatgaagatgctgttgtattacttctaaatattttgcagaagagcagcacgtcacttcagcactatgggcttgtaatcttacagcagttgctcaaacaatccattacaaatagaacatcttgtttcagagccggcttgctaagttttcttcttgattggttttcggtagaggaaagggatgatacagttattgcaatcacagagttaatacaaatacttggtgcacacagtatatgtggcaaggacatcaggaaaatctttgcccttttgcgctgtgagaagattggtgccaaacacaagcacacatctttgcttctgacaagtctcagtcacatgctgaaggaaaaggggccagaagctttctttgagttcagtggccatgattctggtatagatataaaatcaccctttctatggccttacaatagagggatatctttttcttgctggttaagggttgaaaacttcccagacagtggtatgatgggccttttctccttttttaaagaagacgggaaggggtgctcagctgttcttaacagaagtgctttagtatatgagggataacaaacccatgctaaactctggtctttccctgttggcagtctatctatcaaaaacatcagtgtgttctgttaccactcaagctcccaccaaagcaatggagattcctttctattactcatacaattgggagggctttctccggaggaagccagttgaggtgttatgtagatggggagctagtatcatccgagaagtgtgggtatccaaaattcaacgaagcaatgacttactgcaccattggcacaaaattgatacctgttggtgatggacctatctcaattggtttcgaaaaaacttctgccttcacaggtcaaatgggcccagtctatgtattttctgatgcactttcttcagagcaagtaaagggcatatattttctgggaccaagttacatgtactctttccatggcgatgattcactctacaggggaattgttgatgctagagatggcctttcatcaaagataatttttggtttcaatgcacaggctagtgaaggtcgtagtttgttcagtgtgtcatcagcactcgataatgccgacaaaaatacatttcaagcaacaattatgggggggacaaagttatgctcacgacacttgcctcaggatattatttactgtgttggtggtgtctccgtatttttcccactcttcactcaattttttgatgctgcaagtgatattgagaaatgttgccatacatctgttgtcaatgataaattggtggctgaggtcattgagctagttgctactgttctggatggaaatgtgtcaaatcagcaacagatgtatcttctttctgggttatctattctaggcttcttgcttcaatcagctaccccacagctcttaaccaccaaaactctttctgcactgaagtatatgtttgacattctgaggaactgcagtaatctctctctccctccctcccctctctcttttagttcgcatgcatgcaataagatggacattacttatacttttctgcatatccaggcatgtcaaaagtcctcctcaaagatgctatctcacaaatttatttgaatccacaaatatgggtatatgcaagctatgaagtacaaagagatctctatatgtttgtgataaactattttgaaacagatggaaggcttttaccacttctatgtggacttccttgggttattgatattgtgtgccgatattactgggaaaaggcagattctaggcatgttgttgcttccaagcctttgtttcattcagttaccaaacaagttattggagagagacctgaggtagttgaaattcgcaagcttcgtcttctcctcctgagtttagcagaaatgagcttaaagataaaagtttctcctgatgacataagagcgcttgtagcttttattgagaggagtcaagacatagcatgtatcagcgatgtactggacatgatcatccgtgctctttcacagggagaagttttttcatcatttgttgggaacgtaaattaccttggtggttgttgcattttcattaatcttctcaagagggaatttgagccagtccgtttgttggggcttcagctccttggaaaacttttgactgggattccatctgagaagaaagaaacgaaactatttgccctacccttagggcagtctagacccatctctgaaaacttaacaaaagaaataacagcggcacctcagtttttcttgaatacaatgtctgaaaggctattcaaatttccactatcagataacttatgtgcagcacttttcagtgttcttagtggaaccagtgcacaacaggttccccaggaaaattctgagcctgatccatcaagggatagaaattgcaatattttaagcttgccacccttttcccttcctcagattttgatatgcatctttagatttatgcattcttgtaaagattcctcagcacgcacaagaatcttaaatcttcttcttggtttgctggattcaaactcttcaaacatcgaggcattaatggagcacagttggaactcttggcttgaaacatccacaaaacttgaggtattcaaggactacaaatcagtttctaaaggcgaccctgacgatgtgaaggcagatgaaataagtcttgttaggaacttgtattctttggtcctttcatactacctgcgctttgttagaggtggctggcatcaacttgatgatactgctaattattttctcttaaaaactgaccagggacaactatcatgttctgatttgcttagggacatacttgatgatattgctgggagcctgcttcacaaatctgtggaagataatattttccttttacagccttgctgtgataatgttttacattttttgaaccttatacaggagctgcttatcagtcaaatgggaattaggctattgtttctctctcccagtatttcggaggaatcttcacatgataacatatggaaagaagatattaagtcaacagtaaatgatattttaaataccgagagccatggtcaatttacaagattttctgatgtaaatgaagtcagtgatgattggtggagtttctttgacaaggtgtggagtattatacgtaatttgaacggaaaaggaccaagcaaatttataccaaaggatccaaatgttgaggttgcatctttggggcaaagggcgcgtggactggtggagtctatgaatgtccctgctgccgaaaaggtagctgttgtatctggaggcggaggtattggtactgcattaggtataaaagtgaacagatttgctgagaaagcgacaacgtcgagggaagagataatcccaagaattttcttccaccttgtgattctgtacctctgcaaagctggattggagaatgcatccaagtgtgttatacagttcatgtcgttgcttccgattcttcttatttcagaagatgaccaaagcaaaaataagttgcactttttgatatggtctctactaattgtaagatctcagtatgggcaacttgacgatagcgctcgtttccatgttttctcgcacttgattcttgaaactattatatatgggaagtccatgttggtcactaatatcttagagagagatgattcggtggacgtcaacaacaaggagactggattcatccttagctttatacagaagaatcgtgttcttgctgcggctgctaatgaggttaagcacatgaaggctgttcaggctgatcgtttaaagaagctgcaggatcttcgcatgaagcttaacgagtgttctgctacggagataaagctagcgcaggccattgaagatgagatacatttaactattactgctgtgctttcagcggatgacaatagaaagacagcttgtcaacttgctttccgcgaggatcagcaaattatcagggataagtggatacatatttcccgtgctctgatggatgagagaggaccatggtctgctaacccttttccaaatgatgttgtgactcactggaaacttgacaagacagaggatagatggaggcggcggttcaagttcaaacgtaattacaaatttgatgaacgattatgtcagccttcacagtcaaggaatgaaagtacagcaactttagctgaccagctgtacattagtgccaaaattactcagaaaatgaagcaattccttgttaaaggagtgcggggaatcacagaggatagtagttacgaacaatttgaagacactaatgacgcgagtgaatcttcccagagtaatccttcagagagccaaaaccttaataatgctgcagatacctctgatcatcatgcttctgcacattataagaaagagccatcatctactaatggagataatgattatacaaaggtgctatgttcagttcgttgtgtttttgttaccccaaagcgaaaattagcaggacaactggatatcacacgaactgtcatgcatttttcttttgaatttttggttgaaggaactggaggatcatctgtttttagcaagtttaaagacaaaaaagattcagactgcaagaacgagctgggaggtgtggacagacttgacggatgccgagacagtatgattgaaaccaatggtgttttgatgcaaaaccagtctaacaagatcaaacgtcacaaaaggtggaacataactaagataaaaggagttcattggacacgctacctactgcaatatactgcaatggagatcttctttgatgattcaactgcacctatatttttaaacttttcttcccaaaaggatactaaaaatgctgggactttgttagtttctcttaggaatgaagctttgttccctaaaggaagtaccaaagacaaaaataatatcatttcattcgtggacaggcgagttggacttgaaatggctgagaatgccagggaaagatggaaaaggagggaaatcagtaactttgagtatcttgtgattttaaatacccttgctggaagatcttacaatgacttaactcagtatcctatatttccatgggtattggctgattacacctctgaaaagcttgatttcaacaagtcatcgactttcagggatctttcaaaaccagttggtgcgttggatgaaaaccgcttcaaggtttttgaagatagatatcttagtttctgtgaccctgatataccaagtttttattacggatctcactactctagcatgggaatcgttcttcattacatgcttaggcttgagccatttacaactctgcatctaaattttcagggtggcaagtttgaccatgcagatcgtttgttccaaagcattgagagcgcttacataaatagcttatcaaatacaagatggggaacctataggcgatgttgctctccctccatgggcaaagggatcgcctgaagaattcatccacatcaacagagaagcccttgaaagtgaatatgtgagctctaatctgcataactggattgacctcatatttggttacaagcagcgtggacaaccagctgttgaggcagcaaacatattttactacgtgacatatgaaggtgcagttgatctggaaaatatggatgacatgttacataaatctgctattgaggatcagatagcaaattttggacagacaccaatccagattttccggacgaagcatccaagaagagggcctcccatcccaattgctcatccactgtattttgcaccacagtcgctaacattaacatcaagtgtttgtagtacggccagccacatgtgtgctatactatttataagtttgttggagaacactgttgtattgatgaatgagggactcatattgtcagtaaagctgtggttgacaacacacctgcagtcaggtggaaatttcacatattccggaccacaggaacattcctttggaattggttcagatgttatctctcctcgtaaaattggcactttccttgctgaaaacgttaagtttggaagacaattcttagcaacgatgcaaaatagtcgtgataattatttgattttatgtggaaactgggagaacagttttcaaataatttctcttagtgatggaagaattatgcagagcatcaggcaacacaaggatgttgttagctgtgttgcagtttcgtctgacgggaacgtggttgcaactggtagttatgacacaactgttatgatctggcatgcatttcgtggaagaccaattgataagaaaatcaggggtgccaattttgaactttcagaaaaggaacaagttatagtggaaaggcctgttcatatcttatgtgggcatgatgacatcataacatgcttatttgttagcacggaacttgacattgtaatcagtggttcaaaagatgggacttgtatttttcatacactgcgtgaagggagatatgttcggtccatccagcatccttctggtgttggtttatcaaaattggtagcatcgcagcatgggagggtggtattgtattctgagaatgacctctctttgcacatgtactccatcaatggacggcatattgcttcttcagctacccttggacgtctcaattgcatagaacttagttgttctggcgatttcattgtttgcgctggtgagcttggacagatagtcttacgctcaatgcattctcttggtattgtttggaggtacgatggaaatggcaagacaattacttccctagctgtgacccctgaggagtgcatcctagcaggaaccaagaatggcagcctcttggtgttttcaacagaaacttctcttcttcgaagggggagcatgcaacgaaataaaataaaaccctccacatctggttaagtcattggctgcaagatatccaacgaatgtaaaacaaatgactgcttcatgctgaggtcattaccagcttatagaactgttctcacgaccatgtagtctgtacataatgaaacacacttttgtcatttgttttcactaccaaaagtgaagctggcattcaggaatgagggttgtcaagatattcagctggtgataatccttgagcacccaatctgacgaaggaacactggttagccctagatccaagcatcttcacttagccttcacttggtaggcattgacatctatcacaatgttattgtagcatttgacttcgttggtgttctgtgcgacagtttgtgtttgtgtagtatttatattagattccagtgcttttgtaaatgtgccatttttgtgatctaaagtgttagaaagcatcttcatatatcatatgccctcatctatctattgataatggcgttctgta

SEQ ID NO: 58239 - DNA, 3047 bp, Zea Mays
gtataagttagatgagaaaacaactataaagaatgaagatgctgttgtattacttctaaatattttgcagaagagcagcacgtcacttcagcactatgggcttgtaatcttacagcagttgctcaaacaatccattacaaatagaacatcttgtttcagagccggcttgctaagttttcttcttgattggttttcggtagaggaaagggatgatacagttattgcaatcacagagttaatacaaatacttggtgcacacagtatatgtggcaaggacatcaggaaaatctttgcccttttgcgctgtgagaagattggtgccaaacacaagcacacatctttgcttctgacaagtctcagtcacatgctgaaggaaaaggggccagaagctttctttgagttcagtggccatgattctggtatagatataaaatcaccctttctatggccttacaatagagggatatctttttcttgctggttaagggttgaaaacttcccagacagtggtatgatgggccttttctccttttttaaagaagacgggaaggggtgctcagctgttcttaacagaagtgctttagtatatgagggataacaaacccatgctaaactctggtctttccctgttggcagtctatctatcaaaaacatcagtgtgttctgttaccactcaagctcccaccaaagcaatggagattcctttctattactcatacaattgggagggctttctccggaggaagccagttgaggtgttatgtagatggggagctagtatcatccgagaagtgtgggtatccaaaattcaacgaagcaatgacttactgcaccattggcacaaaattgatacctgttggtgatggacctatctcaattggtttcgaaaaaacttctgccttcacaggtcaaatgggcccagtctatgtattttctgatgcactttcttcagagcaagtaaagggcatatattttctgggaccaagttacatgtactctttccatggcgatgattcactctacaggggaattgttgatgctagagatggcctttcatcaaagataatttttggtttcaatgcacaggctagtgaaggtcgtagtttgttcagtgtgtcatcagcactcgataatgccgacaaaaatacatttcaagcaacaattatgggggggacaaagttatgctcacgacacttgcctcaggatattatttactgtgttggtggtgtctccgtatttttcccactcttcactcaattttttgatgctgcaagtgatattgagaaatgttgccatacatctgttgtcaatgataaattggtggctgaggtcattgagctagttgctactgttctggatggaaatgtgtcaaatcagcaacagatgtatcttctttctgggttatctattctaggcttcttgcttcaatcagctaccccacagctcttaaccaccaaaactctttctgcactgaagtatatgtttgacattctgaggaactgcagcatgtcaaaagtcctcctcaaagatgctatctcacaaatttatttgaatccacaaatatgggtatatgcaagctatgaagtacaaagagatctctatatgtttgtgataaactattttgaaacagatggaaggcttttaccacttctatgtggacttccttgggttattgatattgtgtgccgatattactgggaaaaggcagattctaggcatgttgttgcttccaagcctttgtttcattcagttaccaaacaagttattggagagagacctgaggtagttgaaattcgcaagcttcgtcttctcctcctgagtttagcagaaatgagcttaaagataaaagtttctcctgatgacataagagcgcttgtagcttttattgagaggagtcaagacatagcatgtatcagcgatgtactggacatgatcatccgtgctctttcacagggagaagttttttcatcatttgttgggaacgtaaattaccttggtggttgttgcattttcattaatcttctcaagagggaatttgagccagtccgtttgttggggcttcagctccttggaaaacttttgactgggattccatctgagaagaaagaaacgaaactatttgccctacccttagggcagtctagacccatctctgaaaacttaacaaaagaaataacagcggcacctcagtttttcttgaatacaatgtctgaaaggctattcaaatttccactatcagataacttatgtgcagcacttttcagtgttcttagtggaaccagtgcacaacaggttccccaggaaaattctgagcctgatccatcaagggatagaaattgcaatattttaagcttgccacccttttcccttcctcagattttgatatgcatctttagatttatgcattcttgtaaagattcctcagcacgcacaagaatcttaaatcttcttcttggtttgctggattcaaactcttcaaacatcgaggcattaatggagcacagttggaactcttggcttgaaacatccacaaaacttgaggtattcaaggactacaaatcagtttctaaaggcgaccctgacgatgtgaaggcagatgaaataagtcttgttaggaacttgtattctttggtcctttcatactacctgcgctttgttagaggtggctggcatcaacttgatgatactgctaattattttctcttaaaaactgaccagggacaactatcatgttctgatttgcttagggacatacttgatgatattgctgggagcctgcttcacaaatctgtggaagataatattttccttttacagccttgctgtgataatgttttacattttttgaaccttatacaggagctgcttatcagtcaaatgggaattaggctattgtttctctctcccagtatttcggaggaatcttcacatgataacatatggaaagaagatattaagtcaacagtaaatgatattttaaataccgagagccatggtcaatttacaaggctgttgggtcatggctggggcaaagcaccttggcagcc

SEQ ID NO: 58240 - DNA, 6138 bp, Zea Mays
atgggggggacaaagttatgctcacgacacttgcctcaggatattatttactgtgttggtggtgtctccgtatttttcccactcttcactcaattttttgatgctgcaagtgatattgagaaatgttgccatacatctgttgtcaatgataaattggtggctgaggtcattgagctagttgctactgttctggatggaaatgtgtcaaatcagcaacagatgtatcttctttctgggttatctattctaggcttcttgcttcaatcagctaccccacagctcttaaccaccaaaactctttctgcactgaagtatatgtttgacattctgaggaactgcagcatgtcaaaagtcctcctcaaagatgctatctcacaaatttatttgaatccacaaatatgggtatatgcaagctatgaagtacaaagagatctctatatgtttgtgataaactattttgaaacagatggaaggcttttaccacttctatgtggacttccttgggttattgatattgtgtgccgatattactgggaaaaggcagattctaggcatgttgttgcttccaagcctttgtttcattcagttaccaaacaagttattggagagagacctgaggtagttgaaattcgcaagcttcgtcttctcctcctgagtttagcagaaatgagcttaaagataaaagtttctcctgatgacataagagcgcttgtagcttttattgagaggagtcaagacatagcatgtatcagcgatgtactggacatgatcatccgtgctctttcacagggagaagttttttcatcatttgttgggaacgtaaattaccttggtggttgttgcattttcattaatcttctcaagagggaatttgagccagtccgtttgttggggcttcagctccttggaaaacttttgactgggattccatctgagaagaaagaaacgaaactatttgccctacccttagggcagtctagacccatctctgaaaacttaacaaaagaaataacagcggcacctcagtttttcttgaatacaatgtctgaaaggctattcaaatttccactatcagataacttatgtgcagcacttttcagtgttcttagtggaaccagtgcacaacaggttccccaggaaaattctgagcctgatccatcaagggatagaaattgcaatattttaagcttgccacccttttcccttcctcagattttgatatgcatctttagatttatgcattcttgtaaagattcctcagcacgcacaagaatcttaaatcttcttcttggtttgctggattcaaactcttcaaacatcgaggcattaatggagcacagttggaactcttggcttgaaacatccacaaaacttgaggtattcaaggactacaaatcagtttctaaaggcgaccctgacgatgtgaaggcagatgaaataagtcttgttaggaacttgtattctttggtcctttcatactacctgcgctttgttagaggtggctggcatcaacttgatgatactgctaattattttctcttaaaaactgaccagggacaactatcatgttctgatttgcttagggacatacttgatgatattgctgggagcctgcttcacaaatctgtggaagataatattttccttttacagccttgctgtgataatgttttacattttttgaaccttatacaggagctgcttatcagtcaaatgggaattaggctattgtttctctctcccagtatttcggaggaatcttcacatgataacatatggaaagaagatattaagtcaacagtaaatgatattttaaataccgagagccatggtcaatttacaagattttctgatgtaaatgaagtcagtgatgattggtggagtttctttgacaaggtgtggagtattatacgtaatttgaacggaaaaggaccaagcaaatttataccaaaggatccaaatgttgaggttgcatctttggggcaaagggcgcgtggactggtggagtctatgaatgtccctgctgccgaaaaggtagctgttgtatctggaggcggaggtattggtactgcattaggtataaaagtgaacagatttgctgagaaagcgacaacgtcgagggaagagataatcccaagaattttcttccaccttgtgattctgtacctctgcaaagctggattggagaatgcatccaagtgtgttatacagttcatgtcgttgcttccgattcttcttatttcagaagatgaccaaagcaaaaataagttgcactttttgatatggtctctactaattgtaagatctcagtatgggcaacttgacgatagcgctcgtttccatgttttctcgcacttgattcttgaaactattatatatgggaagtccatgttggtcactaatatcttagagagagatgattcggtggacgtcaacaacaaggagactggattcatccttagctttatacagaagaatcgtgttcttgctgcggctgctaatgaggttaagcacatgaaggctgttcaggctgatcgtttaaagaagctgcaggatcttcgcatgaagcttaacgagtgttctgctacggagataaagctagcgcaggccattgaagatgagatacatttaactattactgctgtgctttcagcggatgacaatagaaagacagcttgtcaacttgctttccgcgaggatcagcaaattatcagggataagtggatacatatttcccgtgctctgatggatgagagaggaccatggtctgctaacccttttccaaatgatgttgtgactcactggaaacttgacaagacagaggatagatggaggcggcggttcaagttcaaacgtaattacaaatttgatgaacgattatgtcagccttcacagtcaaggaatgaaagtacagcaactttagctgaccagctgtacattagtgccaaaattactcagaaaatgaagcaattccttgttaaaggagtgcggggaatcacagaggatagtagttacgaacaatttgaagacactaatgacgcgagtgaatcttcccagagtaatccttcagagagccaaaaccttaataatgctgcagatacctctgatcatcatgcttctgcacattataagaaagagccatcatctactaatggagataatgattatacaaaggtgctatgttcagttcgttgtgtttttgttaccccaaagcgaaaattagcaggacaactggatatcacacgaactgtcatgcatttttcttttgaatttttggttgaaggaactggaggatcatctgtttttagcaagtttaaagacaaaaaagattcagactgcaagaacgagctgggaggtgtggacagacttgacggatgccgagacagtatgattgaaaccaatggtgttttgatgcaaaaccagtctaacaagatcaaacgtcacaaaaggtggaacataactaagataaaaggagttcattggacacgctacctactgcaatatactgcaatggagatcttctttgatgattcaactgcacctatatttttaaacttttcttcccaaaaggatactaaaaatgctgggactttgttagtttctcttaggaatgaagctttgttccctaaaggaagtaccaaagacaaaaataatatcatttcattcgtggacaggcgagttggacttgaaatggctgagaatgccagggaaagatggaaaaggagggaaatcagtaactttgagtatcttgtgattttaaatacccttgctggaagatcttacaatgacttaactcagtatcctatatttccatgggtattggctgattacacctctgaaaagcttgatttcaacaagtcatcgactttcagggatctttcaaaaccagttggtgcgttggatgaaaaccgcttcaaggtttttgaagatagatatcttagtttctgtgaccctgatataccaagtttttattacggatctcactactctagcatgggaatcgttcttcattacatgcttaggcttgagccatttacaactctgcatctaaattttcagatcgtttgttccaaagcattgagagcgcttacataaatagcttatcaaatacaagtgacgtcaaagagcttattccagaattcttttacatgcctgagtttcttgaaaattcaaattcatatcatcttggtgtcaagcaggatggggaacctataggcgatgttgctctccctccatgggcaaagggatcgcctgaagaattcatccacatcaacagagaagcccttgaaagtgaatatgtgagctctaatctgcataactggattgacctcatatttggttacaagcagcgtggacaaccagctgttgaggcagcaaacatattttactacgtgacatatgaaggtgcagttgatctggaaaatatggatgacatgttacataaatctgctattgaggatcagatagcaaattttggacagacaccaatccagattttccggacgaagcatccaagaagagggcctcccatcccaattgctcatccactgtattttgcaccacagtcgctaacattaacatcaagtgtttgtagtacggccagccacatgtgtgctatactatttataagtttgttggagaacactgttgtattgatgaatgagggactcatattgtcagtaaagctgtggttgacaacacacctgcagtcaggtggaaatttcacatattccggaccacaggaacattcctttggaattggttcagatgttatctctcctcgtaaaattggcactttccttgctgaaaacgttaagtttggaagacaattcttagcaacgatgcaaaatagtcgtgataattatttgattttatgtggaaactgggagaacagttttcaaataatttctcttagtgatggaagaattatgcagagcatcaggcaacacaaggatgttgttagctgtgttgcagtttcgtctgacgggaacgtggttgcaactggtagttatgacacaactgttatgatctggcatgcatttcgtggaagaccaattgataagaaaatcaggggtgccaattttgaactttcagaaaaggaacaagttatagtggaaaggcctgttcatatcttatgtgggcatgatgacatcataacatgcttatttgttagcacggaacttgacattgtaatcagtggttcaaaagatgggacttgtatttttcatacactgcgtgaagggagatatgttcggtccatccagcatccttctggtgttggtttatcaaaattggtagcatcgcagcatgggagggtggtattgtattctgagaatgacctctctttgcacatgtactccatcaatggacggcatattgcttcttcagctacccttggacgtctcaattgcatagaacttagttgttctggcgatttcattgtttgcgctggtgagcttggacagatagtcttacgctcaatgcattctcttggtattgtttggaggtacgatggaaatggcaagacaattacttccctagctgtgacccctgaggagtgcatcctagcaggaaccaagaatggcagcctcttggtgttttcaacagaaacttctcttcttcgaagggggagcatgcaacgaaataaaataaaaccctccacatctggttaagtcattggctgcaagatatccaacgaatgtaaaacaaatgactgcttcatgctgaggtcattaccagcttatagaactgttctcacgaccatgtagtctgtacataatgaaacacacttttgtcatttgttttcactaccaaaagtgaagctggcattcaggaatgagggttgtcaagatattcagctggtgataatccttgagcacccaatctgacgaaggaacactggttagccctagatccaagcatcttcacttagccttcacttggtaggcattgacatctatcacaatgttattgtagcatttgacttcgttggtgttctgtgcgacagtttgtgtttgtgtagtatttatattagattccagtgcttttgtaaatgtgccatttttgtgatctaaagtgttagaaagcatcttcatatatcatatgccctcatctatctattgataatggcgttctgta

SEQ ID NO: 58241 - DNA, 4354 bp, Zea Mays
ctgcaactgggctcttgtaagcttccttgaggacaaagattttctgatgtaaatgaagtcagtgatgattggtggagtttctttgacaaggtgtggagtattatacgtaatttgaacggaaaaggaccaagcaaatttataccaaaggatccaaatgttgaggttgcatctttggggcaaagggcgcgtggactggtggagtctatgaatgtccctgctgccgaaaaggtagctgttgtatctggaggcggaggtattggtactgcattaggtataaaagtgaacagatttgctgagaaagcgacaacgtcgagggaagagataatcccaagaattttcttccaccttgtgattctgtacctctgcaaagctggattggagaatgcatccaagtgtgttatacagttcatgtcgttgcttccgattcttcttatttcagaagatgaccaaagcaaaaataagttgcactttttgatatggtctctactaattgtaagatctcagtatgggcaacttgacgatagcgctcgtttccatgttttctcgcacttgattcttgaaactattatatatgggaagtccatgttggtcactaatatcttagagagagatgattcggtggacgtcaacaacaaggagactggattcatccttagctttatacagaagaatcgtgttcttgctgcggctgctaatgaggttaagcacatgaaggctgttcaggctgatcgtttaaagaagctgcaggatcttcgcatgaagcttaacgagtgttctgctacggagataaagctagcgcaggccattgaagatgagatacatttaactattactgctgtgctttcagcggatgacaatagaaagacagcttgtcaacttgctttccgcgaggatcagcaaattatcagggataagtggatacatatttcccgtgctctgatggatgagagaggaccatggtctgctaacccttttccaaatgatgttgtgactcactggaaacttgacaagacagaggatagatggaggcggcggttcaagttcaaacgtaattacaaatttgatgaacgattatgtcagccttcacagtcaaggaatgaaagtacagcaactttagctgaccagctgtacattagtgccaaaattactcagaaaatgaagcaattccttgttaaaggagtgcggggaatcacagaggatagtagttacgaacaatttgaagacactaatgacgcgagtgaatcttcccagagtaatccttcagagagccaaaaccttaataatgctgcagatacctctgatcatcatgcttctgcacattataagaaagagccatcatctactaatggagataatgattatacaaaggtgctatgttcagttcgttgtgtttttgttaccccaaagcgaaaattagcaggacaactggatatcacacgaactgtcatgcatttttcttttgaatttttggttgaaggaactggaggatcatctgtttttagcaagtttaaagacaaaaaagattcagactgcaagaacgagctgggaggtgtggacagacttgacggatgccgagacagtatgattgaaaccaatggtgttttgatgcaaaaccagtctaacaagatcaaacgtcacaaaaggtggaacataactaagataaaaggagttcattggacacgctacctactgcaatatactgcaatggagatcttctttgatgattcaactgcacctatatttttaaacttttcttcccaaaaggatactaaaaatgctgggactttgttagtttctcttaggaatgaagctttgttccctaaaggaagtaccaaagacaaaaataatatcatttcattcgtggacaggcgagttggacttgaaatggctgagaatgccagggaaagatggaaaaggagggaaatcagtaactttgagtatcttgtgattttaaatacccttgctggaagatcttacaatgacttaactcagtatcctatatttccatgggtattggctgattacacctctgaaaagcttgatttcaacaagtcatcgactttcagggatctttcaaaaccagttggtgcgttggatgaaaaccgcttcaaggtttttgaagatagatatcttagtttctgtgaccctgatataccaagtttttattacggatctcactactctagcatgggaatcgttcttcattacatgcttaggcttgagccatttacaactctgcatctaaattttcagggtggcaagtttgaccatgcagatcgtttgttccaaagcattgagagcgcttacataaatagcttatcaaatacaagtgacgtcaaagagcttattccagaattcttttacatgcctgagtttcttgaaaattcaaattcatatcatcttggtgtcaagcaggatggggaacctataggcgatgttgctctccctccatgggcaaagggatcgcctgaagaattcatccacatcaacagagaagcccttgaaagtgaatatgtgagctctaatctgcataactggattgacctcatatttggttacaagcagcgtggacaaccagctgttgaggcagcaaacatattttactacgtgacatatgaaggtgcagttgatctggaaaatatggatgacatgttacataaatctgctattgaggatcagatagcaaattttggacagacaccaatccagattttccggacgaagcatccaagaagagggcctcccatcccaattgctcatccactgtattttgcaccacagtcgctaacattaacatcaagtgtttgtagtacggccagccacatgtgtgctatactatttataagtttgttggagaacactgttgtattgatgaatgagggactcatattgtcagtaaagctgtggttgacaacacacctgcagtcaggtggaaatttcacatattccggaccacaggaacattcctttggaattggttcagatgttatctctcctcgtaaaattggcactttccttgctgaaaacgttaagtttggaagacaattcttagcaacgatgcaaaatagtcgtgataattatttgattttatgtggaaactgggagaacagttttcaaataatttctcttagtgatggaagaattatgcagagcatcaggcaacacaaggatgttgttagctgtgttgcagtttcgtctgacgggaacgtggttgcaactggtagttatgacacaactgttatgatctggcatgcatttcgtggaagaccaattgataagaaaatcaggggtgccaattttgaactttcagaaaaggaacaagttatagtggaaaggcctgttcatatcttatgtgggcatgatgacatcataacatgcttatttgttagcacggaacttgacattgtaatcagtggttcaaaagatgggacttgtatttttcatacactgcgtgaagggagatatgttcggtccatccagcatccttctggtgttggtttatcaaaattggtagcatcgcagcatgggagggtggtattgtattctgagaatgacctctctttgcacatgtactccatcaatggacggcatattgcttcttcagctacccttggacgtctcaattgcatagaacttagttgttctggcgatttcattgtttgcgctggtgagcttggacagatagtcttacgctcaatgcattctcttggtattgtttggaggtacgatggaaatggcaagacaattacttccctagctgtgacccctgaggagtgcatcctagcaggaaccaagaatggcagcctcttggtgttttcaacagaaacttctcttcttcgaagggggagcatgcaacgaaataaaataaaaccctccacatctggttaagtcattggctgcaagatatccaacgaatgtaaaacaaatgactgcttcatgctgaggtcattaccagcttatagaactgttctcacgaccatgtagtctgtacataatgaaacacacttttgtcatttgttttcactaccaaaagtgaagctggcattcaggaatgagggttgtcaagatattcagctggtgataatccttgagcacccaatctgacgaaggaacactggttagccctagatccaagcatcttcacttagccttcacttggtaggcattgacatctatcacaatgttattgtagcatttgacttcgttggtgttctgtgcgacagtttgtgtttgtgtagtatttatattagattccagtgcttttgtaaatgtgccatttttgtgatctaaagtgttagaaagcatcttcatatatcatatgccctcatctatctattgataatggcgttctgta

SEQ ID NO: 58242 - DNA, 3001 bp, Zea Mays
ggaaaaaacgtgcccttatccttcaagtttagagagactaataggctgtttggttggaggaatcatcacatttcaatttcacatgagatgtgcttcatgagtccgtttctcagttttggtggcaggattctttgttattattagcttgtgaggaatgaggtgaccactcatcaaacttttccacttcatgaaccaaacaaaaaaaaagtgaggaatgagtagagagtagataatgaactaactcattcctcttaccaaacaccccaagttaataatacccttcttgattctcaattttatccgcttagaatttatttttgtgccatccactttctgatttttttttgttggcatatgcatgtcaccagttcattctcccatgatatctcgttccataagaaacttgcagattgcagtattgagttatcaaaacaaaacaaatacttctgccgttacagatgtggaggagcacaagtgtctgaactcggagttgtggcatgcctgtgccggcccgcttgtctccttgccagcggtgggtagccgggttgtgtacttccctcagggccacagcgagcaggtagcagcatcaacaaacaaggaaatggagtctcagatccccagttatcctaatctgccgccacagcttatatgccaactgcataatgtgacgatgcaagctgatgcagagacagaagaggtatatgcacagatgacattacaaccactcaacccgcaagaactgaaggatccatatttacctgcagaattaggtttggtcagtaaacagccaacaaactatttctgcaaaacattaacagcaagtgataccagtacccatggtgggttttctgttccccgtcgagcagctgagaaagtgttccctccactggatttcacccagcagcctccatgccaggagttgatggcaacagatcttcatggcaatgagtggaaattccgtcacatatttcgtggtcagccaaagcggcatcttctaactacaggctggagtgtctttgtaagtgcaaagagactcgttgctggtgactctgtcctttttatctggacaataaccagcttctgcttggaattcgtcgggcaaatcggccacaaacagtcatgccatcttcagtcttatcaagtgatagcatgcatattggtcttcttgctgcagctgctcatgctgcttcgacaaatagccggtttacaattttctacaacccaagggcaagcccttcagagtttgtcataccgcttgcaaagtatgttaaggctgtgtatcatacccgtatatctgtggggatgcgcttcaggatgctttttgagacagaagagtctagtgttaggagatacatggggactattaccggaatcagtgatcttgattctgttcggtggccaaattcacactggcgttctgttaaggttggctgggatgaatcaactgctggcgatagacagccaagggtgtcactatgggagattgagcccctgacaactttcccaacgtatacatctccttttccgctcaggctcaagcgtccatggccaacaggcttgccttctctgcatggtgggaaggatgatgacctggctaactctctcatgtggcttcgagataccacaaatcctggtttccagtcgttaaattttggtggacttggtatgaactcttggatgcagccaaggctggatacttccttacttggtctgcagcctgacatgtatcaggcgatggccacaggtgctttccaggatccaacaaagcaggcatcacccacaatgctgcagttccagcagccacagaacatagctggccgggctgcgccactttcaagtcagattttgcagcaagcacatcctcaatttcagcagcagccgtacatccaaaacatctctgagagcacaatccaagcgcagggtcagtctgagttcctcaaacagcagatccaacgcagccagtcattcaatgagcagaagccccagctgcaaccccagcaagaatcacagcagcagcagcaatcacagtgtctgcaagcccctcagcatcaacaaatacaacagaacatagccaactaccagtctgtatccaatgcattatcggcgttttctcagctgtcgtcagcctctcagtctacacctatggcactgcaaactatattaccgttctcacaggcacagagctttacagacacgagtgcaagctcattgtctccatccaacaccaacacaatgcaaaatacgcttcggccattctcatcagaagcagtttctcacctcagtatgccgaggcccactgcgatacctgttcccgacgcatggtcatcgaagcgagctgcggtggagtctttgcttccttctcggccccaagattcgtctcaaatgcaacagttggactctacaccagctagtatacctcatagctctgcgttggcaccacttcctgggagaggatgcttggtggatcaagacgcgaaccctgatcctcaaaaccatctcttgtttggtgtcagtatagattcgcagtcactgctaatggagggaggcatccatggtctccaaaatggcaatgattcgaccgctataccttattccacctccaatttcctgagcccttcccagaacgattttcctttggatcatactctgaattcttcaggctgcttagatgattcagggtacgtcccgccatgttcggataattctgaccaagtgaaccgaccaccagcaacctttgtgaaggtttacaaatctggaacctacggaaggtcgcttgatatcaccaggtttagtagctatcacgagctccgtagggaactagggcgcctatttggccttgagggccagttggaagaccctctgagatcaggctggcagcttgtattcgtcgaccgcgaggaggacgtccttctcgtgggcgacgacccttggcagtaagttaccatgaccgtccatcagtcttggtgatacatcctcaacaaatttcatgtgtttcttcccc

SEQ ID NO: 58243 - DNA, 3005 bp, Zea Mays
ggaaaaaacgtgcccttatccttcaagtttagagagactaataggctgtttggttggaggaatcatcacatttcaatttcacatgagatgtgcttcatgagtccgtttctcagttttggtggcaggattctttgttattattagcttgtgaggaatgaggtgaccactcatcaaacttttccacttcatgaaccaaacaaaaaaaaagtgaggaatgagtagagagtagataatgaactaactcattcctcttaccaaacaccccaagttaataatacccttcttgattctcaattttatccgcttagaatttatttttgtgccatccactttctgatttttttttgttggcatatgcatgtcaccagttcattctcccatgatatctcgttccataagaaacttgcagattgcagtattgagttatcaaaacaaaacaaatacttctgccgttacagatgtggaggagcacaagtgtctgaactcggagttgtggcatgcctgtgccggcccgcttgtctccttgccagcggtgggtagccgggttgtgtacttccctcagggccacagcgagcaggtagcagcatcaacaaacaaggaaatggagtctcagatccccagttatcctaatctgccgccacagcttatatgccaactgcataatgtgacgatgcaagctgatgcagagacagaagaggtatatgcacagatgacattacaaccactcaacccgcaagaactgaaggatccatatttacctgcagaattaggtttggtcagtaaacagccaacaaactatttctgcaaaacattaacagcaagtgataccagtacccatggtgggttttctgttccccgtcgagcagctgagaaagtgttccctccactggatttcacccagcagcctccatgccaggagttgatggcaacagatcttcatggcaatgagtggaaattccgtcacatatttcgtggtcagccaaagcggcatcttctaactacaggctggagtgtctttgtaagtgcaaagagactcgttgctggtgactctgtcctttttatctggaatgacaataaccagcttctgcttggaattcgtcgggcaaatcggccacaaacagtcatgccatcttcagtcttatcaagtgatagcatgcatattggtcttcttgctgcagctgctcatgctgcttcgacaaatagccggtttacaattttctacaacccaagggcaagcccttcagagtttgtcataccgcttgcaaagtatgttaaggctgtgtatcatacccgtatatctgtggggatgcgcttcaggatgctttttgagacagaagagtctagtgttaggagatacatggggactattaccggaatcagtgatcttgattctgttcggtggccaaattcacactggcgttctgttaaggttggctgggatgaatcaactgctggcgatagacagccaagggtgtcactatgggagattgagcccctgacaactttcccaacgtatacatctccttttccgctcaggctcaagcgtccatggccaacaggcttgccttctctgcatggtgggaaggatgatgacctggctaactctctcatgtggcttcgagataccacaaatcctggtttccagtcgttaaattttggtggacttggtatgaactcttggatgcagccaaggctggatacttccttacttggtctgcagcctgacatgtatcaggcgatggccacaggtgctttccaggatccaacaaagcaggcatcacccacaatgctgcagttccagcagccacagaacatagctggccgggctgcgccactttcaagtcagattttgcagcaagcacatcctcaatttcagcagcagccgtacatccaaaacatctctgagagcacaatccaagcgcagggtcagtctgagttcctcaaacagcagatccaacgcagccagtcattcaatgagcagaagccccagctgcaaccccagcaagaatcacagcagcagcagcaatcacagtgtctgcaagcccctcagcatcaacaaatacaacagaacatagccaactaccagtctgtatccaatgcattatcggcgttttctcagctgtcgtcagcctctcagtctacacctatggcactgcaaactatattaccgttctcacaggcacagagctttacagacacgagtgcaagctcattgtctccatccaacaccaacacaatgcaaaatacgcttcggccattctcatcagaagcagtttctcacctcagtatgccgaggcccactgcgatacctgttcccgacgcatggtcatcgaagcgagctgcggtggagtctttgcttccttctcggccccaagattcgtctcaaatgcaacagttggactctacaccagctagtatacctcatagctctgcgttggcaccacttcctgggagaggatgcttggtggatcaagacgcgaaccctgatcctcaaaaccatctcttgtttggtgtcagtatagattcgcagtcactgctaatggagggaggcatccatggtctccaaaatggcaatgattcgaccgctataccttattccacctccaatttcctgagcccttcccagaacgattttcctttggatcatactctgaattcttcaggctgcttagatgattcagggtacgtcccgccatgttcggataattctgaccaagtgaaccgaccaccagcaacctttgtgaaggtttacaaatctggaacctacggaaggtcgcttgatatcaccaggtttagtagctatcacgagctccgtagggaactagggcgcctatttggccttgagggccagttggaagaccctctgagatcaggctggcagcttgtattcgtcgaccgcgaggaggacgtccttctcgtgggcgacgacccttggcagtaagttaccatgaccgtccatcagtcttggtgatacatcctcaacaaatttcatgtgtttcttcccc

SEQ ID NO: 58244 - DNA, 2674 bp, Zea Mays
actttctgatttttttttgttggcatatgcatgtcaccagttcattctcccatgatatctcgttccataagaaacttgcagattgcagtattgagttatcaaaacaaaacaaatacttctgccgttacagatgtggaggagcacaagtgtctgaactcggagttgtggcatgcctgtgccggcccgcttgtctccttgccagcggtgggtagccgggttgtgtacttccctcagggccacagcgagcaggtagcagcatcaacaaacaaggaaatggagtctcagatccccagttatcctaatctgccgccacagcttatatgccaactgcataatgtgacgatgcaagctgatgcagagacagaagaggtatatgcacagatgacattacaaccactcaacccgcaagaactgaaggatccatatttacctgcagaattaggtttggtcagtaaacagccaacaaactatttctgcaaaacattaacagcaagtgataccagtacccatggtgggttttctgttccccgtcgagcagctgagaaagtgttccctccactggatttcacccagcagcctccatgccaggagttgatggcaacagatcttcatggcaatgagtggaaattccgtcacatatttcgtcagccaaagcggcatcttctaactacaggctggagtgtctttgtaagtgcaaagagactcgttgctggtgactctgtcctttttatctggaatgacaataaccagcttctgcttggaattcgtcgggcaaatcggccacaaacagtcatgccatcttcagtcttatcaagtgatagcatgcatattggtcttcttgctgcagctgctcatgctgcttcgacaaatagccggtttacaattttctacaacccaagggcaagcccttcagagtttgtcataccgcttgcaaagtatgttaaggctgtgtatcatacccgtatatctgtggggatgcgcttcaggatgctttttgagacagaagagtctagtgttaggagatacatggggactattaccggaatcagtgatcttgattctgttcggtggccaaattcacactggcgttctgttaaggttggctgggatgaatcaactgctggcgatagacagccaagggtgtcactatgggagattgagcccctgacaactttcccaacgtatacatctccttttccgctcaggctcaagcgtccatggccaacaggcttgccttctctgcatggtgggaaggatgatgacctggctaactctctcatgtggcttcgagataccacaaatcctggtttccagtcgttaaattttggtggacttggtatgaactcttggatgcagccaaggctggatacttccttacttggtctgcagcctgacatgtatcaggcgatggccacaggtgctttccaggatccaacaaagcaggcatcacccacaatgctgcagttccagcagccacagaacatagctggccgggctgcgccactttcaagtcagattttgcagcaagcacatcctcaatttcagcagcagccgtacatccaaaacatctctgagagcacaatccaagcgcagggtcagtctgagttcctcaaacagcagatccaacgcagccagtcattcaatgagcagaagccccagctgcaaccccagcaagaatcacagcagcagcagcaatcacagtgtctgcaagcccctcagcatcaacaaatacaacagaacatagccaactaccagtctgtatccaatgcattatcggcgttttctcagctgtcgtcagcctctcagtctacacctatggcactgcaaactatattaccgttctcacaggcacagagctttacagacacgagtgcaagctcattgtctccatccaacaccaacacaatgcaaaatacgcttcggccattctcatcagaagcagtttctcacctcagtatgccgaggcccactgcgatacctgttcccgacgcatggtcatcgaagcgagctgcggtggagtctttgcttccttctcggccccaagattcgtctcaaatgcaacagttggactctacaccagctagtatacctcatagctctgcgttggcaccacttcctgggagaggatgcttggtggatcaagacgcgaaccctgatcctcaaaaccatctcttgtttggtgtcagtatagattcgcagtcactgctaatggagggaggcatccatggtctccaaaatggcaatgattcgaccgctataccttattccacctccaatttcctgagcccttcccagaacgattttcctttggatcatactctgaattcttcaggctgcttagatgattcagggtacgtcccgccatgttcggataattctgaccaagtgaaccgaccaccagcaacctttgtgaaggtttacaaatctggaacctacggaaggtcgcttgatatcaccaggtttagtagctatcacgagctccgtagggaactagggcgcctatttggccttgagggccagttggaagaccctctgagatcaggctggcagcttgtattcgtcgaccgcgaggaggacgtccttctcgtgggcgacgacccttggcagtaagttaccatgaccgtccatcagtcttggtgatacatcctcaacaaatttcatgtgtttcttcccc

SEQ ID NO: 58245 - DNA, 2672 bp, Zea Mays
actttctgatttttttttgttggcatatgcatgtcaccagttcattctcccatgatatctcgttccataagaaacttgcagattgcagtattgagttatcaaaacaaaacaaatacttctgccgttacagatgtggaggagcacaagtgtctgaactcggagttgtggcatgcctgtgccggcccgcttgtctccttgccagcggtgggtagccgggttgtgtacttccctcagggccacagcgagcaggtagcagcatcaacaaacaaggaaatggagtctcagatccccagttatcctaatctgccgccacagcttatatgccaactgcataatgtgacgatgcaagctgatgcagagacagaagaggtatatgcacagatgacattacaaccactcaacccgcaagaactgaaggatccatatttacctgcagaattaggtttggtcagtaaacagccaacaaactatttctgcaaaacattaacagcaagtgataccagtacccatggtgggttttctgttccccgtcgagcagctgagaaagtgttccctccactggatttcacccagcagcctccatgccaggagttgatggcaacagatcttcatggcaatgagtggaaattccgtcacatatttcgtgccaaagcggcatcttctaactacaggctggagtgtctttgtaagtgcaaagagactcgttgctggtgactctgtcctttttatctggaatgacaataaccagcttctgcttggaattcgtcgggcaaatcggccacaaacagtcatgccatcttcagtcttatcaagtgatagcatgcatattggtcttcttgctgcagctgctcatgctgcttcgacaaatagccggtttacaattttctacaacccaagggcaagcccttcagagtttgtcataccgcttgcaaagtatgttaaggctgtgtatcatacccgtatatctgtggggatgcgcttcaggatgctttttgagacagaagagtctagtgttaggagatacatggggactattaccggaatcagtgatcttgattctgttcggtggccaaattcacactggcgttctgttaaggttggctgggatgaatcaactgctggcgatagacagccaagggtgtcactatgggagattgagcccctgacaactttcccaacgtatacatctccttttccgctcaggctcaagcgtccatggccaacaggcttgccttctctgcatggtgggaaggatgatgacctggctaactctctcatgtggcttcgagataccacaaatcctggtttccagtcgttaaattttggtggacttggtatgaactcttggatgcagccaaggctggatacttccttacttggtctgcagcctgacatgtatcaggcgatggccacaggtgctttccaggatccaacaaagcaggcatcacccacaatgctgcagttccagcagccacagaacatagctggccgggctgcgccactttcaagtcagattttgcagcaagcacatcctcaatttcagcagcagccgtacatccaaaacatctctgagagcacaatccaagcgcagggtcagtctgagttcctcaaacagcagatccaacgcagccagtcattcaatgagcagaagccccagctgcaaccccagcaagaatcacagcagcagcagcaatcacagtgtctgcaagcccctcagcatcaacaaatacaacagaacatagccaactaccagtctgtatccaatgcattatcggcgttttctcagctgtcgtcagcctctcagtctacacctatggcactgcaaactatattaccgttctcacaggcacagagctttacagacacgagtgcaagctcattgtctccatccaacaccaacacaatgcaaaatacgcttcggccattctcatcagaagcagtttctcacctcagtatgccgaggcccactgcgatacctgttcccgacgcatggtcatcgaagcgagctgcggtggagtctttgcttccttctcggccccaagattcgtctcaaatgcaacagttggactctacaccagctagtatacctcatagctctgcgttggcaccacttcctgggagaggatgcttggtggatcaagacgcgaaccctgatcctcaaaaccatctcttgtttggtgtcagtatagattcgcagtcactgctaatggagggaggcatccatggtctccaaaatggcaatgattcgaccgctataccttattccacctccaatttcctgagcccttcccagaacgattttcctttggatcatactctgaattcttcaggctgcttagatgattcagggtacgtcccgccatgttcggataattctgaccaagtgaaccgaccaccagcaacctttgtgaaggtttacaaatctggaacctacggaaggtcgcttgatatcaccaggtttagtagctatcacgagctccgtagggaactagggcgcctatttggccttgagggccagttggaagaccctctgagatcaggctggcagcttgtattcgtcgaccgcgaggaggacgtccttctcgtgggcgacgacccttggcagtaagttaccatgaccgtccatcagtcttggtgatacatcctcaacaaatttcatgtgtttcttcccc

SEQ ID NO: 58246 - DNA, 2614 bp, Zea Mays
ccagttcattctcccatgatatctcgttccataagaaacttgcagattgcagtattgagttatcaaaacaaaacaaatacttctgccgttacagatgtggaggagcacaagtgtctgaactcggagttgtggcatgcctgtgccggcccgcttgtctccttgccagcggtgggtagccgggttgtgtacttccctcagggccacagcgagcaggtagcagcatcaacaaacaaggaaatggagtctcagatccccagttatcctaatctgccgccacagcttatatgccaactgcataatgtgacgatgcaagctgatgcagagacagaagaggtatatgcacagatgacattacaaccactcaacccgcaagaactgaaggatccatatttacctgcagaattaggtttggtcagtaaacagccaacaaactatttctgcaaaacattaacagcaagtgataccagtacccatggtgggttttctgttccccgtcgagcagctgagaaagtgttccctccactggagttgatggcaacagatcttcatggcaatgagtggaaattccgtcacatatttcgtggtcagccaaagcggcatcttctaactacaggctggagtgtctttgtaagtgcaaagagactcgttgctggtgactctgtcctttttatctggaatgacaataaccagcttctgcttggaattcgtcgggcaaatcggccacaaacagtcatgccatcttcagtcttatcaagtgatagcatgcatattggtcttcttgctgcagctgctcatgctgcttcgacaaatagccggtttacaattttctacaacccaagggcaagcccttcagagtttgtcataccgcttgcaaagtatgttaaggctgtgtatcatacccgtatatctgtggggatgcgcttcaggatgctttttgagacagaagagtctagtgttaggagatacatggggactattaccggaatcagtgatcttgattctgttcggtggccaaattcacactggcgttctgttaaggttggctgggatgaatcaactgctggcgatagacagccaagggtgtcactatgggagattgagcccctgacaactttcccaacgtatacatctccttttccgctcaggctcaagcgtccatggccaacaggcttgccttctctgcatggtgggaaggatgatgacctggctaactctctcatgtggcttcgagataccacaaatcctggtttccagtcgttaaattttggtggacttggtatgaactcttggatgcagccaaggctggatacttccttacttggtctgcagcctgacatgtatcaggcgatggccacaggtgctttccaggatccaacaaagcaggcatcacccacaatgctgcagttccagcagccacagaacatagctggccgggctgcgccactttcaagtcagattttgcagcaagcacatcctcaatttcagcagcagccgtacatccaaaacatctctgagagcacaatccaagcgcagggtcagtctgagttcctcaaacagcagatccaacgcagccagtcattcaatgagcagaagccccagctgcaaccccagcaagaatcacagcagcagcagcaatcacagtgtctgcaagcccctcagcatcaacaaatacaacagaacatagccaactaccagtctgtatccaatgcattatcggcgttttctcagctgtcgtcagcctctcagtctacacctatggcactgcaaactatattaccgttctcacaggcacagagctttacagacacgagtgcaagctcattgtctccatccaacaccaacacaatgcaaaatacgcttcggccattctcatcagaagcagtttctcacctcagtatgccgaggcccactgcgatacctgttcccgacgcatggtcatcgaagcgagctgcggtggagtctttgcttccttctcggccccaagattcgtctcaaatgcaacagttggactctacaccagctagtatacctcatagctctgcgttggcaccacttcctgggagaggatgcttggtggatcaagacgcgaaccctgatcctcaaaaccatctcttgtttggtgtcagtatagattcgcagtcactgctaatggagggaggcatccatggtctccaaaatggcaatgattcgaccgctataccttattccacctccaatttcctgagcccttcccagaacgattttcctttggatcatactctgaattcttcaggctgcttagatgattcagggtacgtcccgccatgttcggataattctgaccaagtgaaccgaccaccagcaacctttgtgaaggtttacaaatctggaacctacggaaggtcgcttgatatcaccaggtttagtagctatcacgagctccgtagggaactagggcgcctatttggccttgagggccagttggaagaccctctgagatcaggctggcagcttgtattcgtcgaccgcgaggaggacgtccttctcgtgggcgacgacccttggcagtaagttaccatgaccgtccatcagtcttggtgatacatcctcaacaaatttcatgtgtttcttcccc

SEQ ID NO: 58247 - DNA, 2610 bp, Zea Mays
ccagttcattctcccatgatatctcgttccataagaaacttgcagattgcagtattgagttatcaaaacaaaacaaatacttctgccgttacagatgtggaggagcacaagtgtctgaactcggagttgtggcatgcctgtgccggcccgcttgtctccttgccagcggtgggtagccgggttgtgtacttccctcagggccacagcgagcaggtagcagcatcaacaaacaaggaaatggagtctcagatccccagttatcctaatctgccgccacagcttatatgccaactgcataatgtgacgatgcaagctgatgcagagacagaagaggtatatgcacagatgacattacaaccactcaacccgaattaggtttggtcagtaaacagccaacaaactatttctgcaaaacattaacagcaagtgataccagtacccatggtgggttttctgttccccgtcgagcagctgagaaagtgttccctccactggatttcacccagcagcctccatgccaggagttgatggcaacagatcttcatggcaatgagtggaaattccgtcacatatttcgtggtcagccaaagcggcatcttctaactacaggctggagtgtctttgtaagtgcaaagagactcgttgctggtgactctgtcctttttatctggaatgacaataaccagcttctgcttggaattcgtcgggcaaatcggccacaaacagtcatgccatcttcagtcttatcaagtgatagcatgcatattggtcttcttgctgcagctgctcatgctgcttcgacaaatagccggtttacaattttctacaacccaagggcaagcccttcagagtttgtcataccgcttgcaaagtatgttaaggctgtgtatcatacccgtatatctgtggggatgcgcttcaggatgctttttgagacagaagagtctagtgttaggagatacatggggactattaccggaatcagtgatcttgattctgttcggtggccaaattcacactggcgttctgttaaggttggctgggatgaatcaactgctggcgatagacagccaagggtgtcactatgggagattgagcccctgacaactttcccaacgtatacatctccttttccgctcaggctcaagcgtccatggccaacaggcttgccttctctgcatggtgggaaggatgatgacctggctaactctctcatgtggcttcgagataccacaaatcctggtttccagtcgttaaattttggtggacttggtatgaactcttggatgcagccaaggctggatacttccttacttggtctgcagcctgacatgtatcaggcgatggccacaggtgctttccaggatccaacaaagcaggcatcacccacaatgctgcagttccagcagccacagaacatagctggccgggctgcgccactttcaagtcagattttgcagcaagcacatcctcaatttcagcagcagccgtacatccaaaacatctctgagagcacaatccaagcgcagggtcagtctgagttcctcaaacagcagatccaacgcagccagtcattcaatgagcagaagccccagctgcaaccccagcaagaatcacagcagcagcagcaatcacagtgtctgcaagcccctcagcatcaacaaatacaacagaacatagccaactaccagtctgtatccaatgcattatcggcgttttctcagctgtcgtcagcctctcagtctacacctatggcactgcaaactatattaccgttctcacaggcacagagctttacagacacgagtgcaagctcattgtctccatccaacaccaacacaatgcaaaatacgcttcggccattctcatcagaagcagtttctcacctcagtatgccgaggcccactgcgatacctgttcccgacgcatggtcatcgaagcgagctgcggtggagtctttgcttccttctcggccccaagattcgtctcaaatgcaacagttggactctacaccagctagtatacctcatagctctgcgttggcaccacttcctgggagaggatgcttggtggatcaagacgcgaaccctgatcctcaaaaccatctcttgtttggtgtcagtatagattcgcagtcactgctaatggagggaggcatccatggtctccaaaatggcaatgattcgaccgctataccttattccacctccaatttcctgagcccttcccagaacgattttcctttggatcatactctgaattcttcaggctgcttagatgattcagggtacgtcccgccatgttcggataattctgaccaagtgaaccgaccaccagcaacctttgtgaaggtttacaaatctggaacctacggaaggtcgcttgatatcaccaggtttagtagctatcacgagctccgtagggaactagggcgcctatttggccttgagggccagttggaagaccctctgagatcaggctggcagcttgtattcgtcgaccgcgaggaggacgtccttctcgtgggcgacgacccttggcagtaagttaccatgaccgtccatcagtcttggtgatacatcctcaacaaatttcatgtgtttcttcccc

SEQ ID NO: 58248 - DNA, 2492 bp, Zea Mays
cttgtctccttgccagcggtgggtagccgggttgtgtacttccctcagggccacagcgagcagggtagcagcatcaacaaacaaggaaatggagtctcagatccccagttatcctaatctgccgccacagcttatatgccaactgcataatgtgacgatgcaagctgatgcagagacagaagaggtatatgcacagatgacattacaaccactcaacccgcaagaactgaaggatccatatttacctgcagaattaggtttggtcagtaaacagccaacaaactatttctgcaaaacattaacagcaagtgataccagtacccatggtgggttttctgttccccgtcgagcagctgagaaagtgttccctccactggatttcacccagcagcctccatgccaggagttgatggcaacagatcttcatggcaatgagtggaaattccgtcacatatttcgtggtcagccaaagcggcatcttctaactacaggctggagtgtctttgtaagtgcaaagagactcgttgctggtgactctgtcctttttatctggaatgacaataaccagcttctgcttggaattcgtcgggcaaatcggccacaaacagtcatgccatcttcagtcttatcaagtgatagcatgcatattggtcttcttgctgcagctgctcatgctgcttcgacaaatagccggtttacaattttctacaacccaagggcaagcccttcagagtttgtcataccgcttgcaaagtatgttaaggctgtgtatcatacccgtatatctgtggggatgcgcttcaggatgctttttgagacagaagagtctagtgttaggagatacatggggactattaccggaatcagtgatcttgattctgttcggtggccaaattcacactggcgttctgttaaggttggctgggatgaatcaactgctggcgatagacagccaagggtgtcactatgggagattgagcccctgacaactttcccaacgtatacatctccttttccgctcaggctcaagcgtccatggccaacaggcttgccttctctgcatggtgggaaggatgatgacctggctaactctctcatgtggcttcgagataccacaaatcctggtttccagtcgttaaattttggtggacttggtatgaactcttggatgcagccaaggctggatacttccttacttggtctgcagcctgacatgtatcaggcgatggccacaggtgctttccaggatccaacaaagcaggcatcacccacaatgctgcagttccagcagccacagaacatagctggccgggctgcgccactttcaagtcagattttgcagcaagcacatcctcaatttcagcagcagccgtacatccaaaacatctctgagagcacaatccaagcgcagggtcagtctgagttcctcaaacagcagatccaacgcagccagtcattcaatgagcagaagccccagctgcaaccccagcaagaatcacagcagcagcagcaatcacagtgtctgcaagcccctcagcatcaacaaatacaacagaacatagccaactaccagtctgtatccaatgcattatcggcgttttctcagctgtcgtcagcctctcagtctacacctatggcactgcaaactatattaccgttctcacaggcacagagctttacagacacgagtgcaagctcattgtctccatccaacaccaacacaatgcaaaatacgcttcggccattctcatcagaagcagtttctcacctcagtatgccgaggcccactgcgatacctgttcccgacgcatggtcatcgaagcgagctgcggtggagtctttgcttccttctcggccccaagattcgtctcaaatgcaacagttggactctacaccagctagtatacctcatagctctgcgttggcaccacttcctgggagaggatgcttggtggatcaagacgcgaaccctgatcctcaaaaccatctcttgtttggtgtcagtatagattcgcagtcactgctaatggagggaggcatccatggtctccaaaatggcaatgattcgaccgctataccttattccacctccaatttcctgagcccttcccagaacgattttcctttggatcatactctgaattcttcaggctgcttagatgattcagggtacgtcccgccatgttcggataattctgaccaagtgaaccgaccaccagcaacctttgtgaaggtttacaaatctggaacctacggaaggtcgcttgatatcaccaggtttagtagctatcacgagctccgtagggaactagggcgcctatttggccttgagggccagttggaagaccctctgagatcaggctggcagcttgtattcgtcgaccgcgaggaggacgtccttctcgtgggcgacgacccttggcagtaagttaccatgaccgtccatcagtcttggtgatacatcctcaacaaatttcatgtgtttcttcccc

SEQ ID NO: 58249 - DNA, 1436 bp, Zea Mays
aaaccggagcattccattgtaccccgcggtgacgcgtcccggccccggcggccggcgggtctgcctaccggtaccggccccgctcgctcgccgagtcaacggcttgactgcgcccgcccgccacgttcgtagtactatacaagtacatgcctttgccttccctttcctctcctctcctcctctcccacagtcccacccgtttcgcagtgcagaagccggcgaaacttccaagcccaaggaaggaaaaaaaaactgtcacctttaactcgatcccctcttccccgcccgagtcagagcggcggcgccggagccggagccgacagcttccggcaagcgggggctacttggtgcggcgggctatttccgcggttttgtgccacagcgggactgaactgcccgcccaggctgccctatcagggtcaccaagattgaacaagactgaactgccgcgcttcaggataggatacgagtgatggaaccactgcattgaattattatcacttgaattggtagttacaagtggaataccaacatctccaattaatggtcatcgataaggatactgaactgccatctcagttaaatgatatactgcacaacagtgggcagcgatagtttgagacacattagcaatgagttgtttttctcaccttttcaagagaaaaagggggccacaacaacaagacgatccatctgacaattatttcactggttctgagaatataacaagattcagctacagggaactggttagagccacatcaaattttgaccaaggcaataagattggtgagggcggctatggacctgtctacaagggaacactcaaggatgggacacttattgccgtgaaggttctgtctttacattctagacaaggggcaaaggagtttcttaatgagcttcttgcaatctctgatgtaacacatgagaatcttgtcaaactctatggctgctgtgtagaaggaaaccacaggatccttgtctacaattatcttgaaaataatagtcttgcacatacccttctagattcgcgacacagcaacatccagttcaactggagaactcgggtaaatatctgcatcggtgttgcccaaggattagctttcctccatggcagtgtcagccctcacattgttcaccgtgacatcaaggcgagcaatatacttcttgataaggatatgacgccaaaaatatctgattttggtctggcaaagcttctacctccggatgtatcacatgttagcacaagagtcgcagggaccctaggttacttggctcctgaatatgcaattcgaggacatgttacacggaaggcagatgtctacagctatggcgttctgcttatcgaaattgtgagcggaagatgcaacactgatacgaaattgccctatgatgaccagattctccttgagaaggcatctctacacactttg

SEQ ID NO: 58250 - DNA, 2114 bp, Zea Mays
aaaaaatctagatctggaataaaaactggtgctacagtgaaggctgttcgttttgacagcatctttgtggctcttgggttgcatttattctgagaactataatgctgttattggacaggatactgaactgccatctcagttaaatgatatactgcacaacagtgggcagcgatagtttgagacacattagcaatgagttgtttttctcaccttttcaagagaaaaagggggccacaacaacaagacgatccatctgacaattatttcactggttctgagaatataacaagattcagctacagggaactggttagagccacatcaaattttgaccaaggcaataagattggtgagggcggctatggacctgtctacaagggaacactcaaggatgggacacttattgccgtgaaggttctgtctttacattctagacaaggggcaaaggagtttcttaatgagcttcttgcaatctctgatgtaacacatgagaatcttgtcaaactctatggctgctgtgtagaaggaaaccacaggatccttgtctacaattatcttgaaaataatagtcttgcacatacccttctagattcgcgacacagcaacatccagttcaactggagaactcgggtaaatatctgcatcggtgttgcccaaggattagctttcctccatggcagtgtcagccctcacattgttcaccgtgacatcaaggcgagcaatatacttcttgataaggatatgacgccaaaaatatctgattttggtctggcaaagcttctacctccggatgtatcacatgttagcacaagagtcgcagggaccctaggttacttggctcctgaatatgcaattcgaggacatgttacacggaaggcagatgtctacagctatggcgttctgcttatcgaaattgtgagcggaagatgcaacactgatacgaaattgccctatgatgaccagattctccttgagaagacatggagatactatggtcgcgggaatctggagaagatcatagacagctcccttggcgacgacctggacgttgacgaagcctgcaggtttctgaagatcgggctcctctgcacccaagacggcacgaaacgccggccgggcatgtctgcggtggtggccatgctgagaggcgaggcggacgtggacacggagacgatcagcaagcccgacgtgatcagggatttcggagacctgaagctgcggagcagggccacgtcgtccacgctgctgacctcgatcatggcgcggtcgtccccgctgtcgtctgaggagacgacgcgcacctccatcaccttcaccgagatatcggagcgcgactgactgacgatcgccgttaattcgccgacaagaagtgggctgtgagcctgtgaccgtgtagctggaggagcggaaagtgtacgtagcataggccggggagaattctttttgctggttttatgtgatctgtgtgcgtatttctatattacaatcgcggtaggaaacggcgcttcaaagactatccacgtcagcttctaatttatcatccgttggatactacatcaacggcaaagcgcagcagccaaaaaaccaagtgctgaccatcagtctggagacttccacaagctccacgaaacaaaccttcggacccttcatcctcgccttttcacgcgctcagatccccgatgacgcgttacaatgcatccttgtgctcctcgcgtccctcgccgctgccgtcgccgcagcatcctcgcacactcactcgctctcgcgctctgcctcggcctgccaccaccaccaccatctcgcctgctactcgccaatggcccctgcctcgtcgccggttgcaggctcctccactcgctccgtcgcctccgccacatccggctagccgtcgccggggacacaaccaagcttggcctgggcgcgacaaccaggtccaaccgagccagcggccggggagatctgaaggggtgagggggtggggggacgcgagcgtgcactctcggctcccgccccgcgggggaagcggagacgggcggcgaaggcggaaggccacgaggtgttgggatttgggaggggtcaggtcaggagtggccgtcccgctcgtgaactcctgc

SEQ ID NO: 58251 - DNA, 2806 bp, Zea Mays
atggagtcgacgacggcccgggcgctgctctacttctgctgcctcgcgctgtacctctgccgccgcgctccgccctgcctgtgggcggaggccgccgccggcgggtacgctgcccgcgcggcggcggtggacgaaggaggcgcgcggctccgcgcccagctcgcggccatcgccgccgccggcgacgacgacgtccggaacctcgacgtgtatgctagccttgagacggacagccggttgcacgttcgcatcaccgacgcggatcaccggagatgggaggtccctcagagcgtcatcccccgcgaggcgccgcgggacgacgtgcccctggaagcgagcacgggagcctcgccgccgcacagccgcgtcctctccgcggcgacctccgacctggccttcaccctccacgcctccccgttccgcttcaccgtgtcccgccgctccagcggcgacgccctcttcgacacctccgcggcgctggtcttcaaggacaggtacctggagctgaccacggcgctgccgccggagggcggggcgtcgctgtacgggctaggcgagcacaccaagcgcacgttccggctgcagcgcaacgacacgttcacgatgtggaacgccgacatcccggccgccaacgcggacgtcaacctgtacggctcccacccgttctacctcgacgtgtacttcttcgccggcccctccccgctcgacgtcgtcgaccagtacacccagctcatcggccgtccggcccccatgccgtactggtctttcgggttccaccagtgcaggtacgggtacaagaacctggctgacctggagggcgtggtggccgggtacgccaaggccaggatcccgctagaggtgatgtggacggacatcgactacatggacgcgttcaaggacttcacgctggatccggtgaacttcccggccggcccgatgcggcagttcgtcgaccgcctccaccggaacggccagaaatacgtcgtcattatagacccagggatcagcgtgaacgagacatacgggacgtacgtgcgagggatgcagcaggacgtgttcctgaagcggaacggcaccaactacctcggcaaggtgtggcccgggtacgtctacttcccggacttcctcaacccgcgcgccgccgagttctgggcgcgcgagatcgccctgttccggcggacgctccccgtcgacggcctctggatcgacatgaacgaggtctccaacttcgtcgacccggcgcccctcaacgcgctggacgacccgccgtaccgcatcaacaactccggcgtgcaccgccccatcaacaacaagaccacgccggcgtccgcggtgcactacggcggcgtgcgcgactacgacgcacacaacctctacggcttcctggaggcgcgagccacgcacggcgcgctgctcgccgacaccggccgccggcccttcgtgctcagccggtccacgttcgtggggtccggccggtacaccgcgcactggaccggagacaacgccgccacgtgggacgacctccgctactccatcaacaccatgctcagcttcggcctcttcggcatccccatggtcggcgctgacatctgcggcttcggcggcaacacaaccgaggagctctgcagccgctggatccagcttggcgcgttctacccgttcgcaagggaccattcggcgatcggcacggtccggcgcgagctgtacctgtgggagctggtggcgcggtcggcgaggaaggcgctcgggctgcgctaccggctgcttccgtacatgtacacgctgatgtacgaggcgcacaccacgggagcgcccatcgcgcggccgctcttcttctcctaccccaaggacgaggccacgtatggcgtggaccggcagttcctgctggggcgcggcgtgctcgtgtcgccggtgctcgagcccggtgccaccaccgtcgaagcctacttcccggccgggcggtggttcagcctctttgaccacgaggtcgtcgtcgcctcggcgacgggcaagcacgtcaccctcccggggcccgcggacacggtcaacgtacacgtggccggcggcaacatcctgccgctacagctgccggagctgacgacgtcgcgcgcgcgccagaccgcgttccacctcctggtcgcgctcgccgaggacggatccgcatccggggagctgttcctcgacggcggcgacttgccggagatggccgggccgcggggcgagtggagtctggtgcggttcagctgcacgcaggggcgcgacggggttaagctcatgtcgcacgtggtgcacgacgcgtacgggccgagccggaagctggtcatcggcaaggtgatgttcctgggactgccctcgctggcgccaccgggagagttcgccgtgtatgtcaacggcgttaagatggccaactcgactggcgcgacgctagggtatcaaaggcgcggagcactcggcgccgctcaagtggaggggttgtcgctggtcgtcgtcgaggagttcgagctcaaggtggtcacgtcgtcataacgtgacactcaagctcgttctgaataaaatctgatcaaaagtctaaatttaaattggaaataaaggaattgtgagtgcaatatagcaaaaaatgtgcaatgagattcgtgtcctctacccggattgagccctaacgcgcataatgaacatccggcccaaatatggaggcctaaatcaatgattgcaaattgggcttgcaaaaggctttatggcttggcacgtcatcggaaggaaacagtttagtccacgatggagactttttaatgtgttaacccttctt

SEQ ID NO: 58252 - DNA, 886 bp, Zea Mays
gcacaatataatccaataagcggtaataatacaatactcctcctgccctccacaccccgcggctggactggacttggaggtctggactctggagagggcgccagacgcaagtggccaggccagtcgacccacaatcccactccccatttgattagaagctcctgtgcagctgcagcaccctgcataatctattttgttcttgccctagcccccacctagcgctcgcacgccatggcgtggccgtggtcaccgccgccgcggcaaaccgcgcgcttcgtcgtcgtcgtcgtcgtcgccgtcgttcttctcttcgctgctgccccgtggccccgtgcggccgcccaggccgggtaccacgtcgtgtcggtgtcagggacggggggccaactgtcggcgcggctggagctcaccggcgccggccagaaggcagagctcgggcccgacgttcgcaggctcagcctcaccgcgagaggagacagtgtggatgtcctgaaaacgacgaaacggtgttcatcggcacgtctgctagattcaccgggaacgagcatcctgtgacactgacacgcggggcatgtttgattacgtggcctgggctagacaggtttaggttaatctgatagccagggtagctgaaatctagctgtaacaacgcaatccagtctcgttttatatatgtgacatttactggattttgttcgttacagtagtacatgccgttttacgcgttgtgcaggcgggcaccatgcgtgcttgtaatcgctttaatgatttgtttctttttgtttgttgctattgaatagaaaaaatagctcgatggcctttttctagtatatatacattttttgaggagttgagaacagctggtagtagatggcttgatgattac

SEQ ID NO: 58253 - DNA, 4581 bp, Zea Mays
gcacaatataatccaataagcggtaataatacaatactcctcctgccctccacaccccgcggctggactggacttggaggtctggactctggagagggcgccagacgcaagtggccaggccagtcgacccacaatcccactccccatttgattagaagctcctgtgcagctgcagcaccctgcataatctattttgttcttgccctagcccccacctagcgctcgcacgccatggcgtggccgtggtcaccgccgccgcggcaaaccgcgcgcttcgtcgtcgtcgtcgtcgtcgccgtcgttcttctcttcgctgctgccccgtggccccgtgcggccgcccaggccgggtaccacgtcgtgtcggtgtcagggacggggggccaactgtcggcgcggctggagctcaccggcgccggccagaaggcagagctcgggcccgacgttcgcaggctcagcctcaccgcgagccttgagacggacagccggttgcacgttcgcatcaccgacgcggatcaccggagatgggaggtccctcagagcgtcatcccccgcgaggcgccgcgggacgacgtgcccctggaagcgagcacgggagcctcgccgccgcacagccgcgtcctctccgcggcgacctccgacctggccttcaccctccacgcctccccgttccgcttcaccgtgtcccgccgctccagcggcgacgccctcttcgacacctccgcggcgctggtcttcaaggacaggtacctggagctgaccacggcgctgccgccggagggcggggcgtcgctgtacgggctaggcgagcacaccaagcgcacgttccggctgcagcgcaacgacacgttcacgatgtggaacgccgacatcccggccgccaacgcggacgtcaacctgtacggctcccacccgttctacctcgacgtgcgccacgccggcgccgcgcacggcgtgctcctgctcaacagcaacggcatggacgtcgagtacggcggctcctacctcacctacaaggtcatcggcggcgtgctcgacctgtacttcttcgccggcccctccccgctcgacgtcgtcgaccagtacacccagctcatcggccgtccggcccccatgccgtactggtctttcgggttccaccagtgcaggtacgggtacaagaacctggctgacctggagggcgtggtggccgggtacgccaaggccaggatcccgctagaggtgatgtggacggacatcgactacatggacgcgttcaaggacttcacgctggatccggtgaacttcccggccggcccgatgcggcagttcgtcgaccgcctccaccggaacggccagaaatacgtcgtcattatagacccagggatcagcgtgaacgagacatacgggacgtacgtgcgagggatgcagcaggacgtgttcctgaagcggaacggcaccaactacctcggcaaggtgtggcccgggtacgtctacttcccggacttcctcaacccgcgcgccgccgagttctgggcgcgcgagatcgccctgttccggcggacgctccccgtcgacggcctctggatcgacatgaacgaggtctccaacttcgtcgacccggcgcccctcaacgcgctggacgacccgccgtaccgcatcaacaactccggcgtgcaccgccccatcaacaacaagaccacgccggcgtccgcggtgcactacggcggcgtgcgcgactacgacgcacacaacctctacggcttcctggaggcgcgagccacgcacggcgcgctgctcgccgacaccggccgccggcccttcgtgctcagccggtccacgttcgtggggtccggccggtacaccgcgcactggaccggagacaacgccgccacgtgggacgacctccgctactccatcaacaccatgctcagcttcggcctcttcggcatccccatggtcggcgctgacatctgcggcttcggcggcaacacaaccgaggagctctgcagccgctggatccaggtacaagctttccatgcactccaagaccagcatgccatgtccactgacatgtatgagctgagctttcgttgtttgctcgtgaagcttggcgcgttctacccgttcgcaagggaccattcggcgatcggcacggtccggcgcgagctgtacctgtgggagctggtggcgcggtcggcgaggaaggcgctcgggctgcgctaccggctgcttccgtacatgtacacgctgatgtacgaggcgcacaccacgggagcgcccatcgcgcggccgctcttcttctcctaccccaaggacgaggccacgtatggcgtggaccggcagttcctgctggggcgcggcgtgctcgtgtcgccggtgctcgagcccggtgccaccaccgtcgaagcctacttcccggccgggcggtggttcagcctctttgaccacgaggtcgtcgtcgcctcggcgacgggcaagcacgtcaccctcccggggcccgcggacacggtcaacgtacacgtggccggcggcaacatcctgccgctacagctgccggagctgacgacgtcgcgcgcgcgccagaccgcgttccacctcctggtcgcgctcgccgaggacggatccgcatccggggagctgttcctcgacggcggcgacttgccggagatggccgggccgcggggcgagtggagtctggtgcggttcagctgcacgcaggggcgcgacggggttaagctcatgtcgcacgtggtgcacgacgcgtacgggccgagccggaagctggtcatcggcaagaatcaactatcaaagaggacaaacaggttggttgatgagagcaaaggagccctccaagaagttgatcgatctgggcgtttgtttccttccgtttgatgtgaccatcagggagaccgtcgattgcttcagaagcaaagggctcatctagccatgtgaacatttccagatgtacgttttattctatagaactgctacagtaatacttggctcatattaaaccgcctaaacgcactggaaaaaactaaactatatgataatgatataggtaccagggttactattgcttactagaatgaggcgagagctgcttagctcctttgacattccttctacttagtggcaattggtttggttacttaaacctatgctccatatgatccacgctgattgaattttggtttgttaatatgttttgggcaagcagtgctatgagatggagatgatggttaggcatgatctttctataggttaaaagaacagattatccaacagctgatggaacctgcattagagatattatgttgatgtcacagatttagttgatgctcatgtgaaagcgctcaacaaggcagacactagaaaagtcagtatttacaacgttggaacaggaagagatagagaggcccgcaaatagttaatctgggacaacatatctctgtactggccatagaggacaacaaaaaaaatcaaaagttgaagaatcaccaacggtgcctcctttgcaccctccagctcaagaacctgggcccgagccagttcaacaagtcatgcccacagctgaagtgctgaaccaacagatttactgggaatcaatgaatcagcccgaggcacatctgaaatagatcaaaacaaggtagtcgccttggtcgtggttccacatgataatccgccaaaagcacttgcttctaccagtcctggaagcgtggcgactagctggagcaaatcagattctgtgcgatgaaaagcaagtgaaagaggtatatcttttttacattaaaatatcaaagtactttgcagattttatttcagctctgttgcatgatgcactcgcgctactgtctactgcaagtaccatcaccataaactctgaacgctctatgttcggtttcatctttttctttaactagattcgctttcatgtttcttataggctattgttcaggtactaatttgccatagtgttggtctatgactgaatggtacaaaatacatgcaatgaatggatgatactttccagttaaatcatgtaattggaatacagtggtgccgtcagcggtgcggattgggggcttctagagaaagggtctagcgtcgtgccctgcttgacgaacagtgtgttgatatgtgccatcatcgcactgggaacgaacgtgatggctagcacggggagcatcttgagcatctgctttgtctccaccactcaccatgctctgagcctgtgttggtatgcagacttttccctttgtttcagaagaagatgcagttgcattgcacattgttggaacccacgatcaccacaaaattgagggaatatgtcattactcatttgcataactcattagtcattaccttgtcaaggtttatgctttccatcacgaacggttggagttgcaacataacgatactttggtataccaaataaagttactctgttcaccaaatgtagggttagtttttttgttgtgctaaagactgaacataatttgggtgtgttaatattttatttattgtctgcacatggtttgcgttcttatgatgatggctcatggatcctgtaaaatacgtgttaggattgggagatcc

SEQ ID NO: 58254 - DNA, 2911 bp, Zea Mays
ccatttcatttccgatttctgtttaaaagagcccccgcagtgtcctgcactgtcttgttctaggcctagctagctagccctccagctcgcacacatgccatggcgctgtcgtggtcgcccgccgtcgtcgtcttcctcctcctcctgttgctcctccctgccccatggccccgcgcggccgcccaggccggccggtaccacgccgtgtcggtgtccagggcaggaggccagctgtccgcgcggctggagctcgccggcgccggcgccggcggccaaaagccggagctcgggcccgatgtccagaggctcagcctgaccgcgagccttgagacggacagccggttgcacgttcgcatcaccgacgcggatcaccggagatgggaggtccctcagagcgtcatcccccgcgaggcgccgcgggacgacgtgcccctggaagcgagcacgggagcctcgccgccgcacagccgcgtcctctccgcggcgacctccgacctggccttcaccctccacgcctccccgttccgcttcaccgtgtcccgccgctccagcggcgacgccctcttcgacacctccgcggcgctggtcttcaaggacaggtacctggagctgaccacggcgctgccgccggagggcggggcgtcgctgtacgggctaggcgagcacaccaagcgcacgttccggctgcagcgcaacgacacgttcacgatgtggaacgccgacatcccggccgccaacgcggacgtcaacctgtacggctcccacccgttctacctcgacgtgtacttcttcgccggcccctccccgctcgacgtcgtcgaccagtacacccagctcatcggccgtccggcccccatgccgtactggtctttcgggttccaccagtgcaggtacgggtacaagaacctggctgacctggagggcgtggtggccgggtacgccaaggccaggatcccgctagaggtgatgtggacggacatcgactacatggacgcgttcaaggacttcacgctggatccggtgaacttcccggccggcccgatgcggcagttcgtcgaccgcctccaccggaacggccagaaatacgtcgtcattatagacccagggatcagcgtgaacgagacatacgggacgtacgtgcgagggatgcagcaggacgtgttcctgaagcggaacggcaccaactacctcggcaaggtgtggcccgggtacgtctacttcccggacttcctcaacccgcgcgccgccgagttctgggcgcgcgagatcgccctgttccggcggacgctccccgtcgacggcctctggatcgacatgaacgaggtctccaacttcgtcgacccggcgcccctcaacgcgctggacgacccgccgtaccgcatcaacaactccggcgtgcaccgccccatcaacaacaagaccacgccggcgtccgcggtgcactacggcggcgtgcgcgactacgacgcacacaacctctacggcttcctggaggcgcgagccacgcacggcgcgctgctcgccgacaccggccgccggcccttcgtgctcagccggtccacgttcgtggggtccggccggtacaccgcgcactggaccggagacaacgccgccacgtgggacgacctccgctactccatcaacaccatgctcagcttcggcctcttcggcatccccatggtcggcgctgacatctgcggcttcggcggcaacacaaccgaggagctctgcagccgctggatccagcttggcgcgttctacccgttcgcaagggaccattcggcgatcggcacggtccggcgcgagctgtacctgtgggagctggtggcgcggtcggcgaggaaggcgctcgggctgcgctaccggctgcttccgtacatgtacacgctgatgtacgaggcgcacaccacgggagcgcccatcgcgcggccgctcttcttctcctaccccaaggacgaggccacgtatggcgtggaccggcagttcctgctggggcgcggcgtgctcgtgtcgccggtgctcgagcccggtgccaccaccgtcgaagcctacttcccggccgggcggtggttcagcctctttgaccacgaggtcgtcgtcgcctcggcgacgggcaagcacgtcaccctcccggggcccgcggacacggtcaacgtacacgtggccggcggcaacatcctgccgctacagctgccggagctgacgacgtcgcgcgcgcgccagaccgcgttccacctcctggtcgcgctcgccgaggacggatccgcatccggggagctgttcctcgacggcggcgacttgccggagatggccgggccgcggggcgagtggagtctggtgcggttcagctgcacgcaggggcgcgacggggttaagctcatgtcgcacgtggtgcacgacgcgtacgggccgagccggaagctggtcatcggcaaggtgatgttcctgggactgccctcgctggcgccaccgggagagttcgccgtgtatgtcaacggcgttaagatggccaactcgactggcgcgacgctagggtatcaaaggcgcggagcactcggcgccgctcaagtggaggggttgtcgctggtcgtcgtcgaggagttcgagctcaaggtggtcacgtcgtcataacgtgacactcaagctcgttctgaataaaatctgatcaaaagtctaaatttaaattggaaataaaggaattgtgagtgcaatatagcaaaaaatgtgcaatgagattcgtgtcctctacccggattgagccctaacgcgcataatgaacatccggcccaaatatggaggcctaaatcaatgattgcaaattgggcttgcaaaaggctttatggcttggcacgtcatcggaaggaaacagtttagtccacgatggagactttttaatgtgttaacccttctt

SEQ ID NO: 58255 - DNA, 2261 bp, Zea Mays
agttccgcgagctcgggatctctgctccccatcccgcgcgtccatcttggtcaagaaaccctaaccagcacatccatcccacaggcctgccgacggcgcgtcgcccctaaaccctagaccccctgcggaaatctctagagcctgggccagctctgtgcgccagctcttgctccatctctccgcggcggcagcgcaacaaccgcacccatgaaagtcgccatcctcaccccccgcgagcctgccccatcctgcttagtgtcgtcccccgccaccgcgcagccgcaacccatctggataaggatgcatccgcttctcccatagccgccactacccctgcctgccctcggctacgaacacgaagatcccctggatggaggtggagctctcagaggcttatgatctagaactctatctcatactacggattccacagggtgaggagagatacgagcagggtcccaccggcgatgcgggtcccatcttcggcattgggagcaatccgcctactcggacacgaaggttctctgaggcggtgtagctatagatcatgcgggcaacggggaaggacgatagctacgcagcccacatcacgaaggcatataagtgggagttcgccgaaagggaaggtttgcagctggttgtgctgaatccagggactactctgggtccatttttcatgtcatcagtcaataccagcctgaataatctgttgcaacacctaagagaatcaactatcaaagaggacaaacaggttggttgatgagagcaaaggagccctccaagaagttgatcgatctgggcgtttgtttccttccgtttgatgtgaccatcagggagaccgtcgattgcttcagaagcaaagggctcatctagccatgtgaacatttccagatgtaccagggttactattgcttactagaatgaggcgagagctgcttagctcctttgacattccttctacttagtggcaattggtttggttacttaaacctatgctccatatgatccacgctgattgaattttggtttgttaatatgttttgggcaagcagtgctatgagatggagatgatggttaggcatgatctttctataggttaaaagaacagattatccaacagctgatggaacctgcattagagatattatgttgatgtcacagatttagttgatgctcatgtgaaagcgctcaacaaggcagacactagaaaagtcagtatttacaacgttggaacaggaagaggtttggtaacacgagaattgtttatttatttgtataactattatttattcatgtggatagttgtaccctgcacaggttttaatcaatactttacttaatttacatggtaacaagatagagaggcccgcaaatagttaatctgggacaacatatctctgtactggccatagaggacaacaaaaaaaatcaaaagttgaagaatcaccaacggtgcctcctttgcaccctccagctcaagaacctgggcccgagccagttcaacaagtcatgcccacagctgaagtgctgaaccaacagatttactgggaatcaatgaatcagcccgaggcacatctgaaatagatcaaaacaaggtagtcgccttggtcgtggttccacatgataatccgccaaaagcacttgcttctaccagtcctggaagcgtggcgactagctggagcaaatcagattctgtgcgatgaaaagcaagtgaaagagtggtgccgtcagcggtgcggattgggggcttctagagaaagggtctagcgtcgtgccctgcttgacgaacagtgtgttgatatgtgccatcatcgcactgggaacgaacgtgatggctagcacggggagcatcttgagcatctgctttgtctccaccactcaccatgctctgagcctgtgttggtatgcagacttttccctttgtttcagaagaagatgcagttgcattgcacattgttggaacccacgatcaccacaaaattgagggaatatgtcattactcatttgcataactcattagtcattaccttgtcaaggtttatgctttccatcacgaacggttggagttgcaacataacgatactttggtataccaaataaagttactctgttcaccaaatgtagggttagtttttttgttgtgctaaagactgaacataatttgggtgtgttaatattttatttattgtctgcacatggtttgcgttcttatgatgatggctcatggatcctgtaaaatacgtgttaggattgggagatcc

SEQ ID NO: 58256 - DNA, 2330 bp, Zea Mays
agttccgcgagctcgggatctctgctccccatcccgcgcgtccatcttggtcaagaaaccctaaccagcacatccatcccacaggcctgccgacggcgcgtcgcccctaaaccctagaccccctgcggaaatctctagagcctgggccagctctgtgcgccagctcttgctccatctctccgcggcggcagcgcaacaaccgcacccatgaaagtcgccatcctcaccccccgcgagcctgccccatcctgcttagtgtcgtcccccgccaccgcgcagccgcaacccatctggataaggatgcatccgcttctcccatagccgccactacccctgcctgccctcggctacgaacacgaagatcccctggatggaggtggagctctcagaggcttatgatctagaactctatctcatactacggattccacagggtgaggagagatacgagcagggtcccaccggcgatgcgggtcccatcttcggcattgggagcaatccgcctactcggacacgaaggttctctgaggcggtgtagctatagatcatgcgggcaacggggaaggacgatagctacgcagcccacatcacgaaggcatataagtgggagttcgccgaaagggaaggtttgcagctggttgtgctgaatccagggactactctgggtccatttttcatgtcatcagtcaataccagcctgaataatctgttgcaacacctaagaggttgaaaattaaccaggccaacggcttgagtcggaccctgtcaacacagggtggtcgatgttagagacatggcacaatctcgatcgtgacgtatgagaacccatctacacagggttgtgcttggcgtccatggaatgtttgtttgacttcaccgatagaattgctgatatgtaccatgatttcccagttcatagaatcaactatcaaagaggacaaacaggttggttgatgagagcaaaggagccctccaagaagttgatcgatctgggcgtttgtttccttccgtttgatgtgaccatcagggagaccgtcgattgcttcagaagcaaagggctcatctagccatgtgaacatttccagatggttactattgcttactagaatgaggcgagagctgcttagctcctttgacattccttctacttagtggcaattggtttggttacttaaacctatgctccatatgatccacgctgattgaattttggtttgttaatatgttttgggcaagcagtgctatgagatggagatgatggttaggcatgatctttctataggttaaaagaacagattatccaacagctgatggaacctgcattagagatattatgttgatgtcacagatttagttgatgctcatgtgaaagcgctcaacaaggcagacactagaaaagtcagtatttacaacgttggaacaggaagagagaggcccgcaaatagttaatctgggacaacatatctctgtactggccatagaggacaacaaaaaaaatcaaaagttgaagaatcaccaacggtgcctcctttgcaccctccagctcaagaacctgggcccgagccagttcaacaagtcatgcccacagctgaagtgctgaaccaacagatttactgggaatcaatgaatcagcccgaggcacatctgaaatagatcaaaacaaggtagtcgccttggtcgtggttccacatgataatccgccaaaagcacttgcttctaccagtcctggaagcgtggcgactagctggagcaaatcagattctgtgcgatgaaaagcaagtgaaagagtggtgccgtcagcggtgcggattgggggcttctagagaaagggtctagcgtcgtgccctgcttgacgaacagtgtgttgatatgtgccatcatcgcactgggaacgaacgtgatggctagcacggggagcatcttgagcatctgctttgtctccaccactcaccatgctctgagcctgtgttggtatgcagacttttccctttgtttcagaagaagatgcagttgcattgcacattgttggaacccacgatcaccacaaaattgagggaatatgtcattactcatttgcataactcattagtcattaccttgtcaaggtttatgctttccatcacgaacggttggagttgcaacataacgatactttggtataccaaataaagttactctgttcaccaaatgtagggttagtttttttgttgtgctaaagactgaacataatttgggtgtgttaatattttatttattgtctgcacatggtttgcgttcttatgatgatggctcatggatcctgtaaaatacgtgttaggattgggagatcc

SEQ ID NO: 58257 - DNA, 2459 bp, Zea Mays
agttccgcgagctcgggatctctgctccccatcccgcgcgtccatcttggtcaagaaaccctaaccagcacatccatcccacaggcctgccgacggcgcgtcgcccctaaaccctagaccccctgcggaaatctctagagcctgggccagctctgtgcgccagctcttgctccatctctccgcggcggcagcgcaacaaccgcacccatgaaagtcgccatcctcaccccccgcgagcctgccccatcctgcttagtgtcgtcccccgccaccgcgcagccgcaacccatctggataaggatgcatccgcttctcccatagccgccactacccctgcctgccctcggctacgaacacgaagatcccctggatggaggtggagctctcagaggcttatgatctagaactctatctcatactacggattccacagggtgaggagagatacgagcagggtcccaccggcgatgcgggtcccatcttcggcattgggagcaatccgcctactcggacacgaaggttctctgaggcggtgtagctatagatcatgcgggcaacggggaaggacgatagctacgcagcccacatcacgaaggcatataagtgggagttcgccgaaagggaaggtttgcagctggttgtgctgaatccagggactactctgggtccatttttcatgtcatcagtcaataccagcctgaataatctgttgcaacacctaagaggttgaaaattaaccaggccaacggcttgagtcggaccctgtcaacacagggtggtcgatgttagagacatggcacaatctcgatcgtgacgtatgagaacccatctacacagggttgtgcttggcgtccatggaatgtttgtttgacttcaccgatagaattgctgatatgtaccatgatttcccagttcatagaatcaactatcaaagaggacaaacaggttggttgatgagagcaaaggagccctccaagaagttgatcgatctgggcgtttgtttccttccgtttgatgtgaccatcagggagaccgtcgattgcttcagaagcaaagggctcatctagccatgtgaacatttccagatgtacgttttattctatagaactgctacagtaatacttggctcatattaaaccgcctaaacgcactggaaaaaactaaactatatgataatgatataggtaccagggttactattgcttactagaatgaggcgagagctgcttagctcctttgacattccttctacttagtggcaattggtttggttacttaaacctatgctccatatgatccacgctgattgaattttggtttgttaatatgttttgggcaagcagtgctatgagatggagatgatggttaggcatgatctttctataggttaaaagaacagattatccaacagctgatggaacctgcattagagatattatgttgatgtcacagatttagttgatgctcatgtgaaagcgctcaacaaggcagacactagaaaagtcagtatttacaacgttggaacaggaagagagaggcccgcaaatagttaatctgggacaacatatctctgtactggccatagaggacaacaaaaaaaatcaaaagttgaagaatcaccaacggtgcctcctttgcaccctccagctcaagaacctgggcccgagccagttcaacaagtcatgcccacagctgaagtgctgaaccaacagatttactgggaatcaatgaatcagcccgaggcacatctgaaatagatcaaaacaaggtagtcgccttggtcgtggttccacatgataatccgccaaaagcacttgcttctaccagtcctggaagcgtggcgactagctggagcaaatcagattctgtgcgatgaaaagcaagtgaaagaggttaaatcatgtaattggaatacagtggtgccgtcagcggtgcggattgggggcttctagagaaagggtctagcgtcgtgccctgcttgacgaacagtgtgttgatatgtgccatcatcgcactgggaacgaacgtgatggctagcacggggagcatcttgagcatctgctttgtctccaccactcaccatgctctgagcctgtgttggtatgcagacttttccctttgtttcagaagaagatgcagttgcattgcacattgttggaacccacgatcaccacaaaattgagggaatatgtcattactcatttgcataactcattagtcattaccttgtcaaggtttatgctttccatcacgaacggttggagttgcaacataacgatactttggtataccaaataaagttactctgttcaccaaatgtagggttagtttttttgttgtgctaaagactgaacataatttgggtgtgttaatattttatttattgtctgcacatggtttgcgttcttatgatgatggctcatggatcctgtaaaatacgtgttaggattgggagatcc

SEQ ID NO: 58258 - DNA, 2216 bp, Zea Mays
agttccgcgagctcgggatctctgctccccatcccgcgcgtccatcttggtcaagaaaccctaaccagcacatccatcccacaggcctgccgacggcgcgtcgcccctaaaccctagaccccctgcggaaatctctagagcctgggccagctctgtgcgccagctcttgctccatctctccgcggcggcagcgcaacaaccgcacccatgaaagtcgccatcctcaccccccgcgagcctgccccatcctgcttagtgtcgtcccccgccaccgcgcagccgcaacccatctggataaggatgcatccgcttctcccatagccgccactacccctgcctgccctcggctacgaacacgaagatcccctggatggaggtggagctctcagaggcttatgatctagaactctatctcatactacggattccacagggtgaggagagatacgagcagggtcccaccggcgatgcgggtcccatcttcggcattgggagcaatccgcctactcggacacgaaggttctctgaggcggtgtagctatagatcatgcgggcaacggggaaggacgatagctacgcagcccacatcacgaaggcatataagtgggagttcgccgaaagggaaggtttgcagctggttgtgctgaatccagggactactctgggtccatttttcatgtcatcagtcaataccagcctgaataatctgttgcaacacctaagaggttgaaaattaaccaggccaacggcttgagtcggaccctgtcaacacagggtggtcgatgttagagacatggcacaatctcgatcgtgacgtatgagaacccatctacacagggttgtgcttggcgtccatggaatgtttgtttgacttcaccgatagaattgctgatatgtaccatgatttcccagttcatagaatcaactatcaaagaggacaaacaggttggttgatgagagcaaaggagccctccaagaagttgatcgatctgggcgtttgtttccttccgtttgatgtgaccatcagggagaccgtcgattgcttcagaagcaaagggctcatctagccatgtgaacatttccagatgtaccagggttactattgcttactagaatgaggcgagagctgcttagctcctttgacattccttctacttagtggcaattggttaaaagaacagattatccaacagctgatggaacctgcattagagatattatgttgatgtcacagatttagttgatgctcatgtgaaagcgctcaacaaggcagacactagaaaagtcagtatttacaacgttggaacaggaagagagaggcccgcaaatagttaatctgggacaacatatctctgtactggccatagaggacaacaaaaaaaatcaaaagttgaagaatcaccaacggtgcctcctttgcaccctccagctcaagaacctgggcccgagccagttcaacaagtcatgcccacagctgaagtgctgaaccaacagatttactgggaatcaatgaatcagcccgaggcacatctgaaatagatcaaaacaaggtagtcgccttggtcgtggttccacatgataatccgccaaaagcacttgcttctaccagtcctggaagcgtggcgactagctggagcaaatcagattctgtgcgatgaaaagcaagtgaaagagtggtgccgtcagcggtgcggattgggggcttctagagaaagggtctagcgtcgtgccctgcttgacgaacagtgtgttgatatgtgccatcatcgcactgggaacgaacgtgatggctagcacggggagcatcttgagcatctgctttgtctccaccactcaccatgctctgagcctgtgttggtatgcagacttttccctttgtttcagaagaagatgcagttgcattgcacattgttggaacccacgatcaccacaaaattgagggaatatgtcattactcatttgcataactcattagtcattaccttgtcaaggtttatgctttccatcacgaacggttggagttgcaacataacgatactttggtataccaaataaagttactctgttcaccaaatgtagggttagtttttttgttgtgctaaagactgaacataatttgggtgtgttaatattttatttattgtctgcacatggtttgcgttcttatgatgatggctcatggatcctgtaaaatacgtgttaggattgggagatcc

SEQ ID NO: 58259 - DNA, 2537 bp, Zea Mays
agttccgcgagctcgggatctctgctccccatcccgcgcgtccatcttggtcaagaaaccctaaccagcacatccatcccacaggcctgccgacggcgcgtcgcccctaaaccctagaccccctgcggaaatctctagagcctgggccagctctgtgcgccagctcttgctccatctctccgcggcggcagcgcaacaaccgcacccatgaaagtcgccatcctcaccccccgcgagcctgccccatcctgcttagtgtcgtcccccgccaccgcgcagccgcaacccatctggataaggatgcatccgcttctcccatagccgccactacccctgcctgccctcggctacgaacacgaagatcccctggatggaggtggagctctcagaggcttatgatctagaactctatctcatactacggattccacagggtgaggagagatacgagcagggtcccaccggcgatgcgggtcccatcttcggcattgggagcaatccgcctactcggacacgaaggttctctgaggcggtgtagctatagatcatgcgggcaacggggaaggacgatagctacgcagcccacatcacgaaggcatataagtgggagttcgccgaaagggaaggtttgcagctggttgtgctgaatccagggactactctgggtccatttttcatgtcatcagtcaataccagcctgaataatctgttgcaacacctaagaggttgaaaattaaccaggccaacggcttgagtcggaccctgtcaacacagggtggtcgatgttagagacatggcacaatctcgatcgtgacgtatgagaacccatctacacagggttgtgcttggcgtccatggaatgtttgtttgacttcaccgatagaattgctgatatgtaccatgatttcccagttcatagaatcaactatcaaagaggacaaacaggttggttgatgagagcaaaggagccctccaagaagttgatcgatctgggcgtttgtttccttccgtttgatgtgaccatcagggagaccgtcgattgcttcagaagcaaagggctcatctagccatgtgaacatttccagatgtacgttttattctatagaactgctacagtaatacttggctcatattaaaccgcctaaacgcactggaaaaaactaaactatatgataatgatataggtaccagggttactattgcttactagaatgaggcgagagctgcttagctcctttgacattccttctacttagtggcaattggtttggttacttaaacctatgctccatatgatccacgctgattgaattttggtttgttaatatgttttgggcaagcagtgctatgagatggagatgatggttaggcatgatctttctataggttaaaagaacagattatccaacagctgatggaacctgcattagagatattatgttgatgtcacagatttagttgatgctcatgtgaaagcgctcaacaaggcagacactagaaaagtcagtatttacaacgttggaacaggaagagatagagaggcccgcaaatagttaatctgggacaacatatctctgtactggccatagaggacaacaaaaaaaatcaaaagttgaagaatcaccaacggtgcctcctttgcaccctccagctcaagaacctgggcccgagccagttcaacaagtcatgcccacagctgaagtgctgaaccaacagatttactgggaatcaatgaatcagcccgaggcacatctgaaatagatcaaaacaaggtagtcgccttggtcgtggttccacatgataatccgccaaaagcacttgcttctaccagtcctggaagcgtggcgactagctggagcaaatcagattctgtgcgatgaaaagcaagtgaaagaggtactaatttgccatagtgttggtctatgactgaatggtacaaaatacatgcaatgaatggatgatactttccagttaaatcatgtaattggaatacagtggtgccgtcagcggtgcggattgggggcttctagagaaagggtctagcgtcgtgccctgcttgacgaacagtgtgttgatatgtgccatcatcgcactgggaacgaacgtgatggctagcacggggagcatcttgagcatctgctttgtctccaccactcaccatgctctgagcctgtgttggtatgcagacttttccctttgtttcagaagaagatgcagttgcattgcacattgttggaacccacgatcaccacaaaattgagggaatatgtcattactcatttgcataactcattagtcattaccttgtcaaggtttatgctttccatcacgaacggttggagttgcaacataacgatactttggtataccaaataaagttactctgttcaccaaatgtagggttagtttttttgttgtgctaaagactgaacataatttgggtgtgttaatattttatttattgtctgcacatggtttgcgttcttatgatgatggctcatggatcctgtaaaatacgtgttaggattgggagatcc

SEQ ID NO: 58260 - DNA, 2340 bp, Zea Mays
agttccgcgagctcgggatctctgctccccatcccgcgcgtccatcttggtcaagaaaccctaaccagcacatccatcccacaggcctgccgacggcgcgtcgcccctaaaccctagaccccctgcggaaatctctagagcctgggccagctctgtgcgccagctcttgctccatctctccgcggcggcagcgcaacaaccgcacccatgaaagtcgccatcctcaccccccgcgagcctgccccatcctgcttagtgtcgtcccccgccaccgcgcagccgcaacccatctggataaggatgcatccgcttctcccatagccgccactacccctgcctgccctcggctacgaacacgaagatcccctggatggaggtggagctctcagaggcttatgatctagaactctatctcatactacggattccacagggtgaggagagatacgagcagggtcccaccggcgatgcgggtcccatcttcggcattgggagcaatccgcctactcggacacgaaggttctctgaggcggtgtagctatagatcatgcgggcaacggggaaggacgatagctacgcagcccacatcacgaaggcatataagtgggagttcgccgaaagggaaggtttgcagctggttgtgctgaatccagggactactctgggtccatttttcatgtcatcagtcaataccagcctgaataatctgttgcaacacctaagaggttgaaaattaaccaggccaacggcttgagtcggaccctgtcaacacagggtggtcgatgttagagacatggcacaatctcgatcgtgacgtatgagaacccatctacacagggttgtgcttggcgtccatggaatgtttgtttgacttcaccgatagaattgctgatatgtaccatgatttcccagttcatagaatcaactatcaaagaggacaaacaggttggttgatgagagcaaaggagccctccaagaagttgatcgatctgggcgtttgtttccttccgtttgatgtgaccatcagggagaccgtcgattgcttcagaagcaaagggctcatctagccatgtgaacatttccagatgtaccagggttactattgcttactagaatgaggcgagagctgcttagctcctttgacattccttctacttagtggcaattggtttggttacttaaacctatgctccatatgatccacgctgattgaattttggtttgttaatatgttttgggcaagcagtgctatgagatggagatgatggttaggcatgatctttctataggttaaaagaacagattatccaacagctgatggaacctgcattagagatattatgttgatgtcacagatttagttgatgctcatgtgaaagcgctcaacaaggcagacactagaaaagtcagtatttacaacgttggaacaggaagagagaggcccgcaaatagttaatctgggacaacatatctctgtactggccatagaggacaacaaaaaaaatcaaaagttgaagaatcaccaacggtgcctcctttgcaccctccagctcaagaacctgggcccgagccagttcaacaagtcatgcccacagctgaagtgctgaaccaacagatttactgtagggaatcaatgaatcagcccgaggcacatctgaaatagatcaaaacaaggtagtcgccttggtcgtggttccacatgataatccgccaaaagcacttgcttctaccagtcctggaagcgtggcgactagctggagcaaatcagattctgtgcgatgaaaagcaagtgaaagagtggtgccgtcagcggtgcggattgggggcttctagagaaagggtctagcgtcgtgccctgcttgacgaacagtgtgttgatatgtgccatcatcgcactgggaacgaacgtgatggctagcacggggagcatcttgagcatctgctttgtctccaccactcaccatgctctgagcctgtgttggtatgcagacttttccctttgtttcagaagaagatgcagttgcattgcacattgttggaacccacgatcaccacaaaattgagggaatatgtcattactcatttgcataactcattagtcattaccttgtcaaggtttatgctttccatcacgaacggttggagttgcaacataacgatactttggtataccaaataaagttactctgttcaccaaatgtagggttagtttttttgttgtgctaaagactgaacataatttgggtgtgttaatattttatttattgtctgcacatggtttgcgttcttatgatgatggctcatggatcctgtaaaatacgtgttaggattgggagatcc

SEQ ID NO: 58261 - DNA, 2427 bp, Zea Mays
agttccgcgagctcgggatctctgctccccatcccgcgcgtccatcttggtcaagaaaccctaaccagcacatccatcccacaggcctgccgacggcgcgtcgcccctaaaccctagaccccctgcggaaatctctagagcctgggccagctctgtgcgccagctcttgctccatctctccgcggcggcagcgcaacaaccgcacccatgaaagtcgccatcctcaccccccgcgagcctgccccatcctgcttagtgtcgtcccccgccaccgcgcagccgcaacccatctggataaggatgcatccgcttctcccatagccgccactacccctgcctgccctcggctacgaacacgaagatcccctggatggaggtggagctctcagaggcttatgatctagaactctatctcatactacggattccacagggtgaggagagatacgagcagggtcccaccggcgatgcgggtcccatcttcggcattgggagcaatccgcctactcggacacgaaggttctctgaggcggtgtagctatagatcatgcgggcaacggggaaggacgatagctacgcagcccacatcacgaaggcatataagtgggagttcgccgaaagggaaggtttgcagctggttgtgctgaatccagggactactctgggtccatttttcatgtcatcagtcaataccagcctgaataatctgttgcaacacctaagaggttggttatccattatcattcactgcatcacaactgaatcgcaaatgggttttcatgcaataaacaaacttatagcgcaagtcgttcttgaaggttgaaaattaaccaggccaacggcttgagtcggaccctgtcaacacagggtggtcgatgttagagacatggcacaatctcgatcgtgacgtatgagaacccatctacacagggttgtgcttggcgtccatggaatgtttgtttgacttcaccgatagaattgctgatatgtaccatgatttcccagttcataggtcatacattttctaagaacatgcatcaggtttgtgtaagcagggctagctgttcattttggtaatgacatttttacttttttcacatcagaatcaactatcaaagaggacaaacaggttggttgatgagagcaaaggagccctccaagaagttgatcgatctgggcgtttgtttccttccgtttgatgtgaccatcagggagaccgtcgattgcttcagaagcaaagggctcatctagccatgtgaacatttccagatgtaccagggttactattgcttactagaatgaggcgagagctgcttagctcctttgacattccttctacttagtggcaattggttaaaagaacagattatccaacagctgatggaacctgcattagagatattatgttgatgtcacagatttagttgatgctcatgtgaaagcgctcaacaaggcagacactagaaaagtcagtatttacaacgttggaacaggaagagagaggcccgcaaatagttaatctgggacaacatatctctgtactggccatagaggacaacaaaaaaaatcaaaagttgaagaatcaccaacggtgcctcctttgcaccctccagctcaagaacctgggcccgagccagttcaacaagtcatgcccacagctgaagtgctgaaccaacagatttactgtagggaatcaatgaatcagcccgaggcacatctgaaatagatcaaaacaaggtagtcgccttggtcgtggttccacatgataatccgccaaaagcacttgcttctaccagtcctggaagcgtggcgactagctggagcaaatcagattctgtgcgatgaaaagcaagtgaaagagttaaatcatgtaattggaatacagtggtgccgtcagcggtgcggattgggggcttctagagaaagggtctagcgtcgtgccctgcttgacgaacagtgtgttgatatgtgccatcatcgcactgggaacgaacgtgatggctagcacggggagcatcttgagcatctgctttgtctccaccactcaccatgctctgagcctgtgttggtatgcagacttttccctttgtttcagaagaagatgcagttgcattgcacattgttggaacccacgatcaccacaaaattgagggaatatgtcattactcatttgcataactcattagtcattaccttgtcaaggtttatgctttccatcacgaacggttggagttgcaacataacgatactttggtataccaaataaagttactctgttcaccaaatgtagggttagtttttttgttgtgctaaagactgaacataatttgggtgtgttaatattttatttattgtctgcacatggtttgcgttcttatgatgatggctcatggatcctgtaaaatacgtgttaggattgggagatcc

SEQ ID NO: 58262 - DNA, 2331 bp, Zea Mays
agttccgcgagctcgggatctctgctccccatcccgcgcgtccatcttggtcaagaaaccctaaccagcacatccatcccacaggcctgccgacggcgcgtcgcccctaaaccctagaccccctgcggaaatctctagagcctgggccagctctgtgcgccagctcttgctccatctctccgcggcggcagcgcaacaaccgcacccatgaaagtcgccatcctcaccccccgcgagcctgccccatcctgcttagtgtcgtcccccgccaccgcgcagccgcaacccatctggataaggatgcatccgcttctcccatagccgccactacccctgcctgccctcggctacgaacacgaagatcccctggatggaggtggagctctcagaggcttatgatctagaactctatctcatactacggattccacagggtgaggagagatacgagcagggtcccaccggcgatgcgggtcccatcttcggcattgggagcaatccgcctactcggacacgaaggttctctgaggcggtgtagctatagatcatgcgggcaacggggaaggacgatagctacgcagcccacatcacgaaggcatataagtgggagttcgccgaaagggaaggtttgcagctggttgtgctgaatccagggactactctgggtccatttttcatgtcatcagtcaataccagcctgaataatctgttgcaacacctaagaggttgaaaattaaccaggccaacggcttgagtcggaccctgtcaacacagggtggtcgatgttagagacatggcacaatctcgatcgtgacgtatgagaacccatctacacagggttgtgcttggcgtccatggaatgtttgtttgacttcaccgatagaattgctgatatgtaccatgatttcccagttcatagaatcaactatcaaagaggacaaacaggttggttgatgagagcaaaggagccctccaagaagttgatcgatctgggcgtttgtttccttccgtttgatgtgaccatcagggagaccgtcgattgcttcagaagcaaagggctcatctagccatgtgaacatttccagatgtaccagggttactattgcttactagaatgaggcgagagctgcttagctcctttgacattccttctacttagtggcaattggttaaaagaacagattatccaacagctgatggaacctgcattagagatattatgttgatgtcacagatttagttgatgctcatgtgaaagcgctcaacaaggcagacactagaaaagtcagtatttacaacgttggaacaggaagagatagagaggcccgcaaatagttaatctgggacaacatatctctgtactggccatagaggacaacaaaaaaaatcaaaagttgaagaatcaccaacggtgcctcctttgcaccctccagctcaagaacctgggcccgagccagttcaacaagtcatgcccacagctgaagtgctgaaccaacagatttactgggaatcaatgaatcagcccgaggcacatctgaaatagatcaaaacaaggtagtcgccttggtcgtggttccacatgataatccgccaaaagcacttgcttctaccagtcctggaagcgtggcgactagctggagcaaatcagattctgtgcgatgaaaagcaagtgaaagaggctattgttcaggtactaatttgccatagtgttggtctatgactgaatggtacaaaatacatgcaatgaatggatgatactttccagttaaatcatgtaattggaatacagtggtgccgtcagcggtgcggattgggggcttctagagaaagggtctagcgtcgtgccctgcttgacgaacagtgtgttgatatgtgccatcatcgcactgggaacgaacgtgatggctagcacggggagcatcttgagcatctgctttgtctccaccactcaccatgctctgagcctgtgttggtatgcagacttttccctttgtttcagaagaagatgcagttgcattgcacattgttggaacccacgatcaccacaaaattgagggaatatgtcattactcatttgcataactcattagtcattaccttgtcaaggtttatgctttccatcacgaacggttggagttgcaacataacgatactttggtataccaaataaagttactctgttcaccaaatgtagggttagtttttttgttgtgctaaagactgaacataatttgggtgtgttaatattttatttattgtctgcacatggtttgcgttcttatgatgatggctcatggatcctgtaaaatacgtgttaggattgggagatcc

SEQ ID NO: 58263 - DNA, 2445 bp, Zea Mays
agttccgcgagctcgggatctctgctccccatcccgcgcgtccatcttggtcaagaaaccctaaccagcacatccatcccacaggcctgccgacggcgcgtcgcccctaaaccctagaccccctgcggaaatctctagagcctgggccagctctgtgcgccagctcttgctccatctctccgcggcggcagcgcaacaaccgcacccatgaaagtcgccatcctcaccccccgcgagcctgccccatcctgcttagtgtcgtcccccgccaccgcgcagccgcaacccatctggataaggatgcatccgcttctcccatagccgccactacccctgcctgccctcggctacgaacacgaagatcccctggatggaggtggagctctcagaggcttatgatctagaactctatctcatactacggattccacagggtgaggagagatacgagcagggtcccaccggcgatgcgggtcccatcttcggcattgggagcaatccgcctactcggacacgaaggttctctgaggcggtgtagctatagatcatgcgggcaacggggaaggacgatagctacgcagcccacatcacgaaggcatataagtgggagttcgccgaaagggaaggtttgcagctggttgtgctgaatccagggactactctgggtccatttttcatgtcatcagtcaataccagcctgaataatctgttgcaacacctaagaggttgaaaattaaccaggccaacggcttgagtcggaccctgtcaacacagggtggtcgatgttagagacatggcacaatctcgatcgtgacgtatgagaacccatctacacagggttgtgcttggcgtccatggaatgtttgtttgacttcaccgatagaattgctgatatgtaccatgatttcccagttcatagaatcaactatcaaagaggacaaacaggttggttgatgagagcaaaggagccctccaagaagttgatcgatctgggcgtttgtttccttccgtttgatgtgaccatcagggagaccgtcgattgcttcagaagcaaagggctcatctagccatgtgaacatttccagatggttactattgcttactagaatgaggcgagagctgcttagctcctttgacattccttctacttagtggcaattggtttggttacttaaacctatgctccatatgatccacgctgattgaattttggtttgttaatatgttttgggcaagcagtgctatgagatggagatgatggttaggcatgatctttctataggttaaaagaacagattatccaacagctgatggaacctgcattagagatattatgttgatgtcacagatttagttgatgctcatgtgaaagcgctcaacaaggcagacactagaaaagtcagtatttacaacgttggaacaggaagagatagagaggcccgcaaatagttaatctgggacaacatatctctgtactggccatagaggacaacaaaaaaaatcaaaagttgaagaatcaccaacggtgcctcctttgcaccctccagctcaagaacctgggcccgagccagttcaacaagtcatgcccacagctgaagtgctgaaccaacagatttactgggaatcaatgaatcagcccgaggcacatctgaaatagatcaaaacaaggtagtcgccttggtcgtggttccacatgataatccgccaaaagcacttgcttctaccagtcctggaagcgtggcgactagctggagcaaatcagattctgtgcgatgaaaagcaagtgaaagaggctattgttcaggtactaatttgccatagtgttggtctatgactgaatggtacaaaatacatgcaatgaatggatgatactttccagttaaatcatgtaattggaatacagtggtgccgtcagcggtgcggattgggggcttctagagaaagggtctagcgtcgtgccctgcttgacgaacagtgtgttgatatgtgccatcatcgcactgggaacgaacgtgatggctagcacggggagcatcttgagcatctgctttgtctccaccactcaccatgctctgagcctgtgttggtatgcagacttttccctttgtttcagaagaagatgcagttgcattgcacattgttggaacccacgatcaccacaaaattgagggaatatgtcattactcatttgcataactcattagtcattaccttgtcaaggtttatgctttccatcacgaacggttggagttgcaacataacgatactttggtataccaaataaagttactctgttcaccaaatgtagggttagtttttttgttgtgctaaagactgaacataatttgggtgtgttaatattttatttattgtctgcacatggtttgcgttcttatgatgatggctcatggatcctgtaaaatacgtgttaggattgggagatcc

SEQ ID NO: 58264 - DNA, 2318 bp, Zea Mays
agttccgcgagctcgggatctctgctccccatcccgcgcgtccatcttggtcaagaaaccctaaccagcacatccatcccacaggcctgccgacggcgcgtcgcccctaaaccctagaccccctgcggaaatctctagagcctgggccagctctgtgcgccagctcttgctccatctctccgcggcggcagcgcaacaaccgcacccatgaaagtcgccatcctcaccccccgcgagcctgccccatcctgcttagtgtcgtcccccgccaccgcgcagccgcaacccatctggataaggatgcatccgcttctcccatagccgccactacccctgcctgccctcggctacgaacacgaagatcccctggatggaggtggagctctcagaggcttatgatctagaactctatctcatactacggattccacagggtgaggagagatacgagcagggtcccaccggcgatgcgggtcccatcttcggcattgggagcaatccgcctactcggacacgaaggttctctgaggcggtgtagctatagatcatgcgggcaacggggaaggacgatagctacgcagcccacatcacgaaggcatataagtgggagttcgccgaaagggaaggtttgcagctggttgtgctgaatccagggactactctgggtccatttttcatgtcatcagtcaataccagcctgaataatctgttgcaacacctaagaggttgaaaattaaccaggccaacggcttgagtcggaccctgtcaacacagggtggtcgatgttagagacatggcacaatctcgatcgtgacgtatgagaacccatctacacagggttgtgcttggcgtccatggaatgtttgtttgacttcaccgatagaattgctgatatgtaccatgatttcccagttcatagaatcaactatcaaagaggacaaacaggttggttgatgagagcaaaggagccctccaagaagttgatcgatctgggcgtttgtttccttccgtttgatgtgaccatcagggagaccgtcgattgcttcagaagcaaagggctcatctagccatgtgaacatttccagatgtaccagggttactattgcttactagaatgaggcgagagctgcttagctcctttgacattccttctacttagtggcaattggttaaaagaacagattatccaacagctgatggaacctgcattagagatattatgttgatgtcacagatttagttgatgctcatgtgaaagcgctcaacaaggcagacactagaaaagtcagtatttacaacgttggaacaggaagagagaggcccgcaaatagttaatctgggacaacatatctctgtactggccatagaggacaacaaaaaaaatcaaaagttgaagaatcaccaacggtgcctcctttgcaccctccagctcaagaacctgggcccgagccagttcaacaagtcatgcccacagctgaagtgctgaaccaacagatttactgtagggaatcaatgaatcagcccgaggcacatctgaaatagatcaaaacaaggtagtcgccttggtcgtggttccacatgataatccgccaaaagcacttgcttctaccagtcctggaagcgtggcgactagctggagcaaatcagattctgtgcgatgaaaagcaagtgaaagaggtactaatttgccatagtgttggtctatgactgaatggtacaaaatacatgcaatgaatggatgatactttccagttaaatcatgtaattggaatacagtggtgccgtcagcggtgcggattgggggcttctagagaaagggtctagcgtcgtgccctgcttgacgaacagtgtgttgatatgtgccatcatcgcactgggaacgaacgtgatggctagcacggggagcatcttgagcatctgctttgtctccaccactcaccatgctctgagcctgtgttggtatgcagacttttccctttgtttcagaagaagatgcagttgcattgcacattgttggaacccacgatcaccacaaaattgagggaatatgtcattactcatttgcataactcattagtcattaccttgtcaaggtttatgctttccatcacgaacggttggagttgcaacataacgatactttggtataccaaataaagttactctgttcaccaaatgtagggttagtttttttgttgtgctaaagactgaacataatttgggtgtgttaatattttatttattgtctgcacatggtttgcgttcttatgatgatggctcatggatcctgtaaaatacgtgttaggattgggagatcc

SEQ ID NO: 58265 - DNA, 2240 bp, Zea Mays
agttccgcgagctcgggatctctgctccccatcccgcgcgtccatcttggtcaagaaaccctaaccagcacatccatcccacaggcctgccgacggcgcgtcgcccctaaaccctagaccccctgcggaaatctctagagcctgggccagctctgtgcgccagctcttgctccatctctccgcggcggcagcgcaacaaccgcacccatgaaagtcgccatcctcaccccccgcgagcctgccccatcctgcttagtgtcgtcccccgccaccgcgcagccgcaacccatctggataaggatgcatccgcttctcccatagccgccactacccctgcctgccctcggctacgaacacgaagatcccctggatggaggtggagctctcagaggcttatgatctagaactctatctcatactacggattccacagggtgaggagagatacgagcagggtcccaccggcgatgcgggtcccatcttcggcattgggagcaatccgcctactcggacacgaaggttctctgaggcggtgtagctatagatcatgcgggcaacggggaaggacgatagctacgcagcccacatcacgaaggcatataagtgggagttcgccgaaagggaaggtttgcagctggttgtgctgaatccagggactactctgggtccatttttcatgtcatcagtcaataccagcctgaataatctgttgcaacacctaagaggttgaaaattaaccaggccaacggcttgagtcggaccctgtcaacacagggtggtcgatgttagagacatggcacaatctcgatcgtgacgtatgagaacccatctacacagggttgtgcttggcgtccatggaatgtttgtttgacttcaccgatagaattgctgatatgtaccatgatttcccagttcatagaatcaactatcaaagaggacaaacaggttggttgatgagagcaaaggagccctccaagaagttgatcgatctgggcgtttgtttccttccgtttgatgtgaccatcagggagaccgtcgattgcttcagaagcaaagggctcatctagccatgtgaacatttccagatgtaccagggttactattgcttactagaatgaggcgagagctgcttagctcctttgacattccttctacttagtggcaattggttaaaagaacagattatccaacagctgatggaacctgcattagagatattatgttgatgtcacagatttagttgatgctcatgtgaaagcgctcaacaaggcagacactagaaaagtcagtatttacaacgttggaacaggaagagagaggcccgcaaatagttaatctgggacaacatatctctgtactggccatagaggacaacaaaaaaaatcaaaagttgaagaatcaccaacggtgcctcctttgcaccctccagctcaagaacctgggcccgagccagttcaacaagtcatgcccacagctgaagtgctgaaccaacagatttactgggaatcaatgaatcagcccgaggcacatctgaaatagatcaaaacaaggtagtcgccttggtcgtggttccacatgataatccgccaaaagcacttgcttctaccagtcctggaagcgtggcgactagctggagcaaatcagattctgtgcgatgaaaagcaagtgaaagagttaaatcatgtaattggaatacagtggtgccgtcagcggtgcggattgggggcttctagagaaagggtctagcgtcgtgccctgcttgacgaacagtgtgttgatatgtgccatcatcgcactgggaacgaacgtgatggctagcacggggagcatcttgagcatctgctttgtctccaccactcaccatgctctgagcctgtgttggtatgcagacttttccctttgtttcagaagaagatgcagttgcattgcacattgttggaacccacgatcaccacaaaattgagggaatatgtcattactcatttgcataactcattagtcattaccttgtcaaggtttatgctttccatcacgaacggttggagttgcaacataacgatactttggtataccaaataaagttactctgttcaccaaatgtagggttagtttttttgttgtgctaaagactgaacataatttgggtgtgttaatattttatttattgtctgcacatggtttgcgttcttatgatgatggctcatggatcctgtaaaatacgtgttaggattgggagatcc

SEQ ID NO: 58266 - DNA, 2344 bp, Zea Mays
agttccgcgagctcgggatctctgctccccatcccgcgcgtccatcttggtcaagaaaccctaaccagcacatccatcccacaggcctgccgacggcgcgtcgcccctaaaccctagaccccctgcggaaatctctagagcctgggccagctctgtgcgccagctcttgctccatctctccgcggcggcagcgcaacaaccgcacccatgaaagtcgccatcctcaccccccgcgagcctgccccatcctgcttagtgtcgtcccccgccaccgcgcagccgcaacccatctggataaggatgcatccgcttctcccatagccgccactacccctgcctgccctcggctacgaacacgaagatcccctggatggaggtggagctctcagaggcttatgatctagaactctatctcatactacggattccacagggtgaggagagatacgagcagggtcccaccggcgatgcgggtcccatcttcggcattgggagcaatccgcctactcggacacgaaggttctctgaggcggtgtagctatagatcatgcgggcaacggggaaggacgatagctacgcagcccacatcacgaaggcatataagtgggagttcgccgaaagggaaggtttgcagctggttgtgctgaatccagggactactctgggtccatttttcatgtcatcagtcaataccagcctgaataatctgttgcaacacctaagaggttgaaaattaaccaggccaacggcttgagtcggaccctgtcaacacagggtggtcgatgttagagacatggcacaatctcgatcgtgacgtatgagaacccatctacacagggttgtgcttggcgtccatggaatgtttgtttgacttcaccgatagaattgctgatatgtaccatgatttcccagttcatagaatcaactatcaaagaggacaaacaggttggttgatgagagcaaaggagccctccaagaagttgatcgatctgggcgtttgtttccttccgtttgatgtgaccatcagggagaccgtcgattgcttcagaagcaaagggctcatctagccatgtgaacatttccagatgtaccagggttactattgcttactagaatgaggcgagagctgcttagctcctttgacattccttctacttagtggcaattggtttggttacttaaacctatgctccatatgatccacgctgattgaattttggtttgttaatatgttttgggcaagcagtgctatgagatggagatgatggttaggcatgatctttctataggttaaaagaacagattatccaacagctgatggaacctgcattagagatattatgttgatgtcacagatttagttgatgctcatgtgaaagcgctcaacaaggcagacactagaaaagtcagtatttacaacgttggaacaggaagagatagagaggcccgcaaatagttaatctgggacaacatatctctgtactggccatagaggacaacaaaaaaaatcaaaagttgaagaatcaccaacggtgcctcctttgcaccctccagctcaagaacctgggcccgagccagttcaacaagtcatgcccacagctgaagtgctgaaccaacagatttactgtagggaatcaatgaatcagcccgaggcacatctgaaatagatcaaaacaaggtagtcgccttggtcgtggttccacatgataatccgccaaaagcacttgcttctaccagtcctggaagcgtggcgactagctggagcaaatcagattctgtgcgatgaaaagcaagtgaaagagtggtgccgtcagcggtgcggattgggggcttctagagaaagggtctagcgtcgtgccctgcttgacgaacagtgtgttgatatgtgccatcatcgcactgggaacgaacgtgatggctagcacggggagcatcttgagcatctgctttgtctccaccactcaccatgctctgagcctgtgttggtatgcagacttttccctttgtttcagaagaagatgcagttgcattgcacattgttggaacccacgatcaccacaaaattgagggaatatgtcattactcatttgcataactcattagtcattaccttgtcaaggtttatgctttccatcacgaacggttggagttgcaacataacgatactttggtataccaaataaagttactctgttcaccaaatgtagggttagtttttttgttgtgctaaagactgaacataatttgggtgtgttaatattttatttattgtctgcacatggtttgcgttcttatgatgatggctcatggatcctgtaaaatacgtgttaggattgggagatcc

SEQ ID NO: 58267 - DNA, 2298 bp, Zea Mays
agttccgcgagctcgggatctctgctccccatcccgcgcgtccatcttggtcaagaaaccctaaccagcacatccatcccacaggcctgccgacggcgcgtcgcccctaaaccctagaccccctgcggaaatctctagagcctgggccagctctgtgcgccagctcttgctccatctctccgcggcggcagcgcaacaaccgcacccatgaaagtcgccatcctcaccccccgcgagcctgccccatcctgcttagtgtcgtcccccgccaccgcgcagccgcaacccatctggataaggatgcatccgcttctcccatagccgccactacccctgcctgccctcggctacgaacacgaagatcccctggatggaggtggagctctcagaggcttatgatctagaactctatctcatactacggattccacagggtgaggagagatacgagcagggtcccaccggcgatgcgggtcccatcttcggcattgggagcaatccgcctactcggacacgaaggttctctgaggcggtgtagctatagatcatgcgggcaacggggaaggacgatagctacgcagcccacatcacgaaggcatataagtgggagttcgccgaaagggaagaatcaactatcaaagaggacaaacaggttggttgatgagagcaaaggagccctccaagaagttgatcgatctgggcgtttgtttccttccgtttgatgtgaccatcagggagaccgtcgattgcttcagaagcaaagggctcatctagccatgtgaacatttccagatgtacgttttattctatagaactgctacagtaatacttggctcatattaaaccgcctaaacgcactggaaaaaactaaactatatgataatgatataggtaccagggttactattgcttactagaatgaggcgagagctgcttagctcctttgacattccttctacttagtggcaattggtttggttacttaaacctatgctccatatgatccacgctgattgaattttggtttgttaatatgttttgggcaagcagtgctatgagatggagatgatggttaggcatgatctttctataggttaaaagaacagattatccaacagctgatggaacctgcattagagatattatgttgatgtcacagatttagttgatgctcatgtgaaagcgctcaacaaggcagacactagaaaagtcagtatttacaacgttggaacaggaagaggttttaatcaatactttacttaatttacatggtaacaagatagagaggcccgcaaatagttaatctgggacaacatatctctgtactggccatagaggacaacaaaaaaaatcaaaagttgaagaatcaccaacggtgcctcctttgcaccctccagctcaagaacctgggcccgagccagttcaacaagtcatgcccacagctgaagtgctgaaccaacagatttactgtagggaatcaatgaatcagcccgaggcacatctgaaatagatcaaaacaaggtagtcgccttggtcgtggttccacatgataatccgccaaaagcacttgcttctaccagtcctggaagcgtggcgactagctggagcaaatcagattctgtgcgatgaaaagcaagtgaaagaggctattgttcaggtactaatttgccatagtgttggtctatgactgaatggtacaaaatacatgcaatgaatggatgatactttccagttaaatcatgtaattggaatacagtggtgccgtcagcggtgcggattgggggcttctagagaaagggtctagcgtcgtgccctgcttgacgaacagtgtgttgatatgtgccatcatcgcactgggaacgaacgtgatggctagcacggggagcatcttgagcatctgctttgtctccaccactcaccatgctctgagcctgtgttggtatgcagacttttccctttgtttcagaagaagatgcagttgcattgcacattgttggaacccacgatcaccacaaaattgagggaatatgtcattactcatttgcataactcattagtcattaccttgtcaaggtttatgctttccatcacgaacggttggagttgcaacataacgatactttggtataccaaataaagttactctgttcaccaaatgtagggttagtttttttgttgtgctaaagactgaacataatttgggtgtgttaatattttatttattgtctgcacatggtttgcgttcttatgatgatggctcatggatcctgtaaaatacgtgttaggattgggagatcc

SEQ ID NO: 58268 - DNA, 2259 bp, Zea Mays
agttccgcgagctcgggatctctgctccccatcccgcgcgtccatcttggtcaagaaaccctaaccagcacatccatcccacaggcctgccgacggcgcgtcgcccctaaaccctagaccccctgcggaaatctctagagcctgggccagctctgtgcgccagctcttgctccatctctccgcggcggcagcgcaacaaccgcacccatgaaagtcgccatcctcaccccccgcgagcctgccccatcctgcttagtgtcgtcccccgccaccgcgcagccgcaacccatctggataaggatgcatccgcttctcccatagccgccactacccctgcctgccctcggctacgaacacgaagatcccctggatggaggtggagctctcagaggcttatgatctagaactctatctcatactacggattccacagggtgaggagagatacgagcagggtcccaccggcgatgcgggtcccatcttcggcattgggagcaatccgcctactcggacacgaaggttctctgaggcggtgtagctatagatcatgcgggcaacggggaaggacgatagctacgcagcccacatcacgaaggcatataagtgggagttcgccgaaagggaagaatcaactatcaaagaggacaaacaggttggttgatgagagcaaaggagccctccaagaagttgatcgatctgggcgtttgtttccttccgtttgatgtgaccatcagggagaccgtcgattgcttcagaagcaaagggctcatctagccatgtgaacatttccagatgtacgttttattctatagaactgctacagtaatacttggctcatattaaaccgcctaaacgcactggaaaaaactaaactatatgataatgatataggtaccagggttactattgcttactagaatgaggcgagagctgcttagctcctttgacattccttctacttagtggcaattggtttggttacttaaacctatgctccatatgatccacgctgattgaattttggtttgttaatatgttttgggcaagcagtgctatgagatggagatgatggttaggcatgatctttctataggttaaaagaacagattatccaacagctgatggaacctgcattagagatattatgttgatgtcacagatttagttgatgctcatgtgaaagcgctcaacaaggcagacactagaaaagtcagtatttacaacgttggaacaggaagagatagagaggcccgcaaatagttaatctgggacaacatatctctgtactggccatagaggacaacaaaaaaaatcaaaagttgaagaatcaccaacggtgcctcctttgcaccctccagctcaagaacctgggcccgagccagttcaacaagtcatgcccacagctgaagtgctgaaccaacagatttactgtagggaatcaatgaatcagcccgaggcacatctgaaatagatcaaaacaaggtagtcgccttggtcgtggttccacatgataatccgccaaaagcacttgcttctaccagtcctggaagcgtggcgactagctggagcaaatcagattctgtgcgatgaaaagcaagtgaaagaggctattgttcaggtactaatttgccatagtgttggtctatgactgaatggtacaaaatacatgcaatgaatggatgatactttccagttaaatcatgtaattggaatacagtggtgccgtcagcggtgcggattgggggcttctagagaaagggtctagcgtcgtgccctgcttgacgaacagtgtgttgatatgtgccatcatcgcactgggaacgaacgtgatggctagcacggggagcatcttgagcatctgctttgtctccaccactcaccatgctctgagcctgtgttggtatgcagacttttccctttgtttcagaagaagatgcagttgcattgcacattgttggaacccacgatcaccacaaaattgagggaatatgtcattactcatttgcataactcattagtcattaccttgtcaaggtttatgctttccatcacgaacggttggagttgcaacataacgatactttggtataccaaataaagttactctgttcaccaaatgtagggttagtttttttgttgtgctaaagactgaacataatttgggtgtgttaatattttatttattgtctgcacatggtttgcgttcttatgatgatggctcatggatcctgtaaaatacgtgttaggattgggagatcc

SEQ ID NO: 58269 - DNA, 2289 bp, Zea Mays
agttccgcgagctcgggatctctgctccccatcccgcgcgtccatcttggtcaagaaaccctaaccagcacatccatcccacaggcctgccgacggcgcgtcgcccctaaaccctagaccccctgcggaaatctctagagcctgggccagctctgtgcgccagctcttgctccatctctccgcggcggcagcgcaacaaccgcacccatgaaagtcgccatcctcaccccccgcgagcctgccccatcctgcttagtgtcgtcccccgccaccgcgcagccgcaacccatctggataaggatgcatccgcttctcccatagccgccactacccctgcctgccctcggctacgaacacgaagatcccctggatggaggtggagctctcagaggcttatgatctagaactctatctcatactacggattccacagggtgaggagagatacgagcagggtcccaccggcgatgcgggtcccatcttcggcattgggagcaatccgcctactcggacacgaaggttctctgaggcggtgtagctatagatcatgcgggcaacggggaaggacgatagctacgcagcccacatcacgaaggcatataagtgggagttcgccgaaagggaaggtttgcagctggttgtgctgaatccagggactactctgggtccatttttcatgtcatcagtcaataccagcctgaataatctgttgcaacacctaagaggttgaaaattaaccaggccaacggcttgagtcggaccctgtcaacacagggtggtcgatgttagagacatggcacaatctcgatcgtgacgtatgagaacccatctacacagggttgtgcttggcgtccatggaatgtttgtttgacttcaccgatagaattgctgatatgtaccatgatttcccagttcatagaatcaactatcaaagaggacaaacaggttggttgatgagagcaaaggagccctccaagaagttgatcgatctgggcgtttgtttccttccgtttgatgtgaccatcagggagaccgtcgattgcttcagaagcaaagggctcatctagccatgtgaacatttccagattgctatgagatggagatgatggttaggcatgatctttctataggttaaaagaacagattatccaacagctgatggaacctgcattagagatattatgttgatgtcacagatttagttgatgctcatgtgaaagcgctcaacaaggcagacactagaaaagtcagtatttacaacgttggaacaggaagagagaggcccgcaaatagttaatctgggacaacatatctctgtactggccatagaggacaacaaaaaaaatcaaaagttgaagaatcaccaacggtgcctcctttgcaccctccagctcaagaacctgggcccgagccagttcaacaagtcatgcccacagctgaagtgctgaaccaacagatttactgggaatcaatgaatcagcccgaggcacatctgaaatagatcaaaacaaggtagtcgccttggtcgtggttccacatgataatccgccaaaagcacttgcttctaccagtcctggaagcgtggcgactagctggagcaaatcagattctgtgcgatgaaaagcaagtgaaagaggctattgttcaggtactaatttgccatagtgttggtctatgactgaatggtacaaaatacatgcaatgaatggatgatactttccagttaaatcatgtaattggaatacagtggtgccgtcagcggtgcggattgggggcttctagagaaagggtctagcgtcgtgccctgcttgacgaacagtgtgttgatatgtgccatcatcgcactgggaacgaacgtgatggctagcacggggagcatcttgagcatctgctttgtctccaccactcaccatgctctgagcctgtgttggtatgcagacttttccctttgtttcagaagaagatgcagttgcattgcacattgttggaacccacgatcaccacaaaattgagggaatatgtcattactcatttgcataactcattagtcattaccttgtcaaggtttatgctttccatcacgaacggttggagttgcaacataacgatactttggtataccaaataaagttactctgttcaccaaatgtagggttagtttttttgttgtgctaaagactgaacataatttgggtgtgttaatattttatttattgtctgcacatggtttgcgttcttatgatgatggctcatggatcctgtaaaatacgtgttaggattgggagatcc

SEQ ID NO: 58270 - DNA, 2459 bp, Zea Mays
agttccgcgagctcgggatctctgctccccatcccgcgcgtccatcttggtcaagaaaccctaaccagcacatccatcccacaggcctgccgacggcgcgtcgcccctaaaccctagaccccctgcggaaatctctagagcctgggccagctctgtgcgccagctcttgctccatctctccgcggcggcagcgcaacaaccgcacccatgaaagtcgccatcctcaccccccgcgagcctgccccatcctgcttagtgtcgtcccccgccaccgcgcagccgcaacccatctggataaggatgcatccgcttctcccatagccgccactacccctgcctgccctcggctacgaacacgaagatcccctggatggaggtggagctctcagaggcttatgatctagaactctatctcatactacggattccacagggtgaggagagatacgagcagggtcccaccggcgatgcgggtcccatcttcggcattgggagcaatccgcctactcggacacgaaggttctctgaggcggtgtagctatagatcatgcgggcaacggggaaggacgatagctacgcagcccacatcacgaaggcatataagtgggagttcgccgaaagggaaggtttgcagctggttgtgctgaatccagggactactctgggtccatttttcatgtcatcagtcaataccagcctgaataatctgttgcaacacctaagaggttgaaaattaaccaggccaacggcttgagtcggaccctgtcaacacagggtggtcgatgttagagacatggcacaatctcgatcgtgacgtatgagaacccatctacacagggttgtgcttggcgtccatggaatgtttgtttgacttcaccgatagaattgctgatatgtaccatgatttcccagttcataggtcatacattttctaagaacatgcatcaggtttgtgtaagcagggctagctgttcattttggtaatgacatttttacttttttcacatcagaatcaactatcaaagaggacaaacaggttggttgatgagagcaaaggagccctccaagaagttgatcgatctgggcgtttgtttccttccgtttgatgtgaccatcagggagaccgtcgattgcttcagaagcaaagggctcatctagccatgtgaacatttccagatgtaccagggttactattgcttactagaatgaggcgagagctgcttagctcctttgacattccttctacttagtggcaattggtttggttacttaaacctatgctccatatgatccacgctgattgaattttggtttgttaatatgttttgggcaagcagtgctatgagatggagatgatggttaggcatgatctttctataggttaaaagaacagattatccaacagctgatggaacctgcattagagatattatgttgatgtcacagatttagttgatgctcatgtgaaagcgctcaacaaggcagacactagaaaagtcagtatttacaacgttggaacaggaagagatagagaggcccgcaaatagttaatctgggacaacatatctctgtactggccatagaggacaacaaaaaaaatcaaaagttgaagaatcaccaacggtgcctcctttgcaccctccagctcaagaacctgggcccgagccagttcaacaagtcatgcccacagctgaagtgctgaaccaacagatttactgtagggaatcaatgaatcagcccgaggcacatctgaaatagatcaaaacaaggtagtcgccttggtcgtggttccacatgataatccgccaaaagcacttgcttctaccagtcctggaagcgtggcgactagctggagcaaatcagattctgtgcgatgaaaagcaagtgaaagagttaaatcatgtaattggaatacagtggtgccgtcagcggtgcggattgggggcttctagagaaagggtctagcgtcgtgccctgcttgacgaacagtgtgttgatatgtgccatcatcgcactgggaacgaacgtgatggctagcacggggagcatcttgagcatctgctttgtctccaccactcaccatgctctgagcctgtgttggtatgcagacttttccctttgtttcagaagaagatgcagttgcattgcacattgttggaacccacgatcaccacaaaattgagggaatatgtcattactcatttgcataactcattagtcattaccttgtcaaggtttatgctttccatcacgaacggttggagttgcaacataacgatactttggtataccaaataaagttactctgttcaccaaatgtagggttagtttttttgttgtgctaaagactgaacataatttgggtgtgttaatattttatttattgtctgcacatggtttgcgttcttatgatgatggctcatggatcctgtaaaatacgtgttaggattgggagatcc

SEQ ID NO: 58271 - DNA, 801 bp, Zea Mays
cgctgcagcgcatgcaggcgggccatccgcccatccctcccccaggcccagacgcctgcctcagtgcaggtgcagcgtgtagaccaccggccaccgcgcgggttcatgagagctgagagcgtgcgtggaccgggccaccgcgagccatgagtcgcccgctcgtccttgggcgtaggtggacgcagcagcgcagtgcgttggcacgccacaggtgacagatctgtctgtatctacgcactgcaggggcacgccatggagcacgcatcatcacggatcaatggatcatggccgtcgcgttggctgctggggggccgggttgcattgcaatggccaacgtgactacgtgagaggaatgcgctcgctaactaatggggccgtagagtggacctgctgccttttaccagaacgtataccacaggagagatcgggcgacaaatggcggcgcagctgcatgcccgtgtggaacgcgagaaacggccagaccgtaccggacgtctcagagctaacagtctctggtctcggcacagctggggaagaaagacatctgatcgaaatgctcatcttggatcctagtgacgactgacgcctgacggccaccacaaagtgtgaaaaagggcctagtaccccaccatcatagaggccggaagaaaagctgagccgccatcaataccaaccgcacctgccatgcgagcgcgtccgtgagtaatggctgcctggctgaggactctgtccgacggagtggagcgtggagagaagacacacacacagagaagagagagagagagaaaaaactgagctcag

SEQ ID NO: 58272 - DNA, 551 bp, Zea Mays
aagatctgcaagatgattggtgcatgataaattgtttttgtttcctagctgcggcagccacgttcgctgtcgactgaccgcgactggctccaatggtccattatggccaattggcccacgacgacccaacatgcttcaattcgtccacttactatgtagctagcagctgcatccgttcccctcacatcaggtgagactagagtagactaaacacggcgcgcggccgggtcgcgctaccatgcttgccgccgtgcagccgccggcggcctccgccgtcatcaatcttgctcatgctcggcaggcagccacataagaagggaaggagaaggagggacatggcggagaaggaagcaccacggtcctttctcgctcgccttcctcctctagatcgttcagcggacattggaaatgaagagaagcagcgctgcgtcgtcatcacgcatcatgcagatccagtcctcacagcccccctgctgatccagtaattaacggggagatcagtgatccagagcagagcaaagttcggaagaaggaactgaagtgtgcagccc

SEQ ID NO: 58273 - DNA, 1471 bp, Zea Mays
gttcgctgtcgactgaccgcgactggctccaatggtccattatggccaattggcccacgacgacccaacatgcttcaattcgtccacttactatgtagctagcagctgcatccgttcccctcacatcaggtgagactagagtagactaaacacggcgcgcggccgggtcgcgctaccatgcttgccgccgtgcagccgccggcggcctccgccgtcatcaatcttgctcatgctcggcaggcagccacataagaagggaaggagaaggagggacatggcggagaaggaagcaccacggtcctttctcgctcgccttcctcctctagatcgttcagcggacattggaaatgaagagaagcagcgctgcgtcgtcatcacgcatcatgcagatccagtcctcacagcccccctgctgatccagtacagaatggcgtgagtaacaaacagcgctagcactactactactaccacggtaccaccgttaccaaagagagagaactgaattctgacctcaactcagtcgtcgtccgcgctcctcatcacactctccatgctcccgcttaattaccgacatactcttcctgcatggaccaactgccaagctgaatctgactcttaagctctcagcgttctttgcgttcaccgccctcacatctgccacatgcttcatgttccacaccttaaagatgaaggccgtcgtcactagtacagagaagttctatagtggcggttgtaaacctatttatagtggcgtttttcgtaaccgccagtgctaggggccagtagaaatcatcatttttacaggcgggtaactgaggaccgccagtgcaaatcgtttctaggaaacataaaacatattttaaaaatagttaaaaaatttatttttattaggcccaccccacccgcaagtcgcgcatttttcgcgcaaaattcgcgcgctacgcggttgttagtattcgaaccgtcgacctcaccctcgcgcgtaccctcccctaccactccgtctatgacatgtcttgtgtctagtttgtagttgttttctccacatcactaccggaatcaatagcttcgccgagtgccggaagcactcggcgaagccttaaaaacactcggcaaaggctttgccgagtgttacactcggcaaagaaggttcggcaaacagtgcatcggcaaagacttctttgccgagtactttttctcgggcactcggcaaatatctttgccgagtgtcagggagcactcggcaaagaaaagcgaccgttacgacgccggttgacggagacggcggctttgccgagtgtcaacggtgacactcggcaacgaagatatctttgccgagtgtcctcctggcagcagtagcaaaagattccttgagtgccggaagccctcggcgaagccttaaaaacactcggcaaaggctttgccgagtgttacactcggcaaagaaggttcggcaaacagtgcatcggcc

SEQ ID NO: 58274 - DNA, 2073 bp, Zea Mays
ttcgtccacttactatgtagctagcagctgcatccgttcccctcacatcaggtgagactagagtagactaaacacggcgcgcggccgggtcgcgctaccatgcttgccgccgtgcagccgccggcggcctccgccgtcatcaatcttgctcatgctcggcaggcagccacataagaagggaaggagaaggagggacatggcggagaaggaagcaccacggtcctttctcgctcgccttcctcctctagatcgttcagcggacattggaaatgaagagaagcagcgctgcgtcgtcatcacgcatcatgcagatccagtcctcacagcccccctgctgatccagtacgaaatccgccttccccctctcccccagtcttttgtttcatactgtgccattttaatttgcaccgattttttctttgttgtttggttgacgtacttgacacccctttctccgagacacgtcagctcgtcatatacacccaacaccaccctgcaaagatatataaatttggatcgttaactgaacatggcaaattatttgtggtgtttaatcacaatttatatgtcacggcctctttgctttctatgctgattcatctacgtattattcatgcatgcatacatacatattcagttttaaattcctgtgttatgtcacctatatatgtttcttttagtgtttgtttgtttgtttgtttttgactagaagctatatattttatgtgaaaaataattccttgtgcatgatagttctgcggcgactctttatatatagatacactgaaaagctctaaattctaactctatatgagacaaatatgttgttccgtgtaggatagatgttacccaactgagatccctcctacactggccggccgtcatgaaatatcatcacaattaaatatatgaactagctagtactataagctgtgtacttaatgataatcacatatgagctgagtttaattgattaagtaacttgccgctaataatatttcatgccattaatttaatgccaggtacagaatggcgtgagtaacaaacagcgctagcactactactactaccacggtaccaccgttaccaaagagagagaactgaattctgacctcaactcagtcgtcgtccgcgctcctcatcacactctccatgctcccgcttaattaccgacatactcttcctgcatggaccaactgccaagctgaatctgactcttaagctctcagcgttctttgcgttcaccgccctcacatctgccacatgcttcatgttccacaccttaaagatgaaggccgtcgtcactagtacagagaagttctatagtggcggttgtaaacctatttatagtggcgtttttcgtaaccgccagtgctaggggccagtagaaatcatcatttttacaggcgggtaactgaggaccgccagtgcaaatcgtttctaggaaacataaaacatattttaaaaatagttaaaaaatttatttttattaggcccaccccacccgcaagtcgcgcatttttcgcgcaaaattcgcgcgctacgcggttgttagtattcgaaccgtcgacctcaccctcgcgcgtaccctcccctaccactccgtctatgacatgtcttgtgtctagtttgtagttgttttctccacatcactaccggaatcaatagcttcgccgagtgccggaagcactcggcgaagccttaaaaacactcggcaaaggctttgccgagtgttacactcggcaaagaaggttcggcaaacagtgcatcggcaaagacttctttgccgagtactttttctcgggcactcggcaaatatctttgccgagtgtcagggagcactcggcaaagaaaagcgaccgttacgacgccggttgacggagacggcggctttgccgagtgtcaacggtgacactcggcaacgaagatatctttgccgagtgtcctcctggcagcagtagcaaaagattccttgagtgccggaagccctcggcgaagccttaaaaacactcggcaaaggctttgccgagtgttacactcggcaaagaaggttcggcaaacagtgcatcggcc

SEQ ID NO: 58275 - DNA, 369 bp, Zea Mays
ttcgtccacttactatgtagctagcagctgcatccgttcccctcacatcaggtgagactagagtagactaaacacggcgcgcggccgggtcgcgctaccatgcttgccgccgtgcagccgccggcggcctccgccgtcatcaatcttgctcatgctcggcaggcagccacataagaagggaaggagaaggagggacatggcggagaaggaagcaccacggtcctttctcgctcgccttcctcctctagatcgttcagcggacattggaaatgaagagaagcagcgctgcgtcgtcatcacgcatcatgcagatccagtcctcacagcccccctgctgatccagctgttgtccagcaatgacaagaagct

SEQ ID NO: 58276 - DNA, 439 bp, Zea Mays
ttcgtccacttactatgtagctagcagctgcatccgttcccctcacatcaggtgagactagagtagactaaacacggcgcgcggccgggtcgcgctaccatgcttgccgccgtgcagccgccggcggcctccgccgtcatcaatcttgctcatgctcggcaggcagccacataagaagggaaggagaaggagggacatggcggagaaggaagcaccacggtcctttctcgctcgccttcctcctctagatcgttcagcggacattggaaatgaagagaagcagcgctgcgtcgtcatcacgcatcatgcagatccagtcctcacagcccccctgctgatccagatgacgaagctgaagaatgacgaagctgaagtttgaagaagcctagcctgaagcttgatagttgcttacaatgtattttcctgcaaaaattctaga

SEQ ID NO: 58277 - DNA, 356 bp, Zea Mays
ttcgtccacttactatgtagctagcagctgcatccgttcccctcacatcaggtgagactagagtagactaaacacggcgcgcggccgggtcgcgctaccatgcttgccgccgtgcagccgccggcggcctccgccgtcatcaatcttgctcatgctcggcaggcagccacataagaagggaaggagaaggagggacatggcggagaaggaagcaccacggtcctttctcgctcgccttcctcctctagatcgttcagcggacattggaaatgaagagaagcagcgctgcgtcgtcatcacgcatcatgcagatccagtcctcacagcccccctgctgatccaagaacgattcggtc

SEQ ID NO: 58278 - DNA, 1599 bp, Zea Mays
ttactatgtagctagcagctgcatccgttcccctcacatcaggtgagactagagtagactaaacacggcgcgcggccgggtcgcgctaccatgcttgccgccgtgcagccgccggcggcctccgccgtcatcaatcttgctcatgctcggcaggcagccacatatctgaatttgtcctgagctgacagagatctgaattactaagataatataaggtagacctgtttcataacggaggtaaaaggtagcggagggctggctgggggaggagagtggaagctagcggagagtggaagctgcatgcggctctgccgccgttgcccatctcgctaggtccttcctcgatctgcaattggctacctgctaggctgctactgtaagaagggaaggagaaggagggacatggcggagaaggaagcaccacggtcctttctcgctcgccttcctcctctagatcgttcagcggacattggaaatgaagagaagcagcgctgcgtcgtcatcacgcatcatgcagatccagtcctcacagcccccctgctgatccagtacagaatggcgtgagtaacaaacagcgctagcactactactactaccacggtaccaccgttaccaaagagagagaactgaattctgacctcaactcagtcgtcgtccgcgctcctcatcacactctccatgctcccgcttaattaccgacatactcttcctgcatggaccaactgccaagctgaatctgactcttaagctctcagcgttctttgcgttcaccgccctcacatctgccacatgcttcatgttccacaccttaaagatgaaggccgtcgtcactagtacagagaagttctatagtggcggttgtaaacctatttatagtggcgtttttcgtaaccgccagtgctaggggccagtagaaatcatcatttttacaggcgggtaactgaggaccgccagtgcaaatcgtttctaggaaacataaaacatattttaaaaatagttaaaaaatttatttttattaggcccaccccacccgcaagtcgcgcatttttcgcgcaaaattcgcgcgctacgcggttgttagtattcgaaccgtcgacctcaccctcgcgcgtaccctcccctaccactccgtctatgacatgtcttgtgtctagtttgtagttgttttctccacatcactaccggaatcaatagcttcgccgagtgccggaagcactcggcgaagccttaaaaacactcggcaaaggctttgccgagtgttacactcggcaaagaaggttcggcaaacagtgcatcggcaaagacttctttgccgagtactttttctcgggcactcggcaaatatctttgccgagtgtcagggagcactcggcaaagaaaagcgaccgttacgacgccggttgacggagacggcggctttgccgagtgtcaacggtgacactcggcaacgaagatatctttgccgagtgtcctcctggcagcagtagcaaaagattccttgagtgccggaagccctcggcgaagccttaaaaacactcggcaaaggctttgccgagtgttacactcggcaaagaaggttcggcaaacagtgcatcggcc

SEQ ID NO: 58279 - DNA, 634 bp, Zea Mays
ctagcagctgcatccgttcccctcacatcaggtgagactagagtagactaaacacggcgcgcggccgggtcgcgctaccatgcttgccgccgtgcagccgccggcggcctccgccgtcatcaatcttgctcatgctcggcaggcagccacatatctgaatttgtcctgagctgacagagatctgaattactaagataatataaggtagacctgtttcataacggaggtaaaaggtagcggagggctggctgggggaggagagtggaagctagcggagagtggaagctgcatgcggctctgccgccgttgcccatctcgctaggtccttcctcgatctgcaattggctacctgctaggctgctactgtaagaagggaaggagaaggagggacatggcggagaaggaagcaccacggtcctttctcgctcgccttcctcctctagatcgttcagcggacattggaaatgaagagaagcagcgctgcgtcgtcatcacgcatcatgcagatccagtcctcacagcccccctgctgatccagatgacgaagctgaagaatgacgaagctgaagtttgaagaagcctagcctgaagcttgatagttgcttacaatgtattttcctgcaaaaattctaga

SEQ ID NO: 58280 - DNA, 223 bp, Zea Mays
ttggctacctgctaggctgctactgtaagaagggaaggagaaggagggacatggcggagaaggaagcaccacggtcctttctcgctcgccttcctcctctagatcgttcagcggacattggaaatgaagagaagcagcgctgcgtcgtcatcacgcatcatgcagatccagtcctcacagcccccctgctgatccagctgttgtccagcaatgacaagaagct

SEQ ID NO: 58281 - DNA, 1258 bp, Zea Mays
ggtcgtagatccgcccctgcccacactctttctaaggaagaagggaaggagaaggagggacatggcggagaaggaagcaccacggtcctttctcgctcgccttcctcctctagatcgttcagcggacattggaaatgaagagaagcagcgctgcgtcgtcatcacgcatcatgcagatccagtcctcacagcccccctgctgatccagtacagaatggcgtgagtaacaaacagcgctagcactactactactaccacggtaccaccgttaccaaagagagagaactgaattctgacctcaactcagtcgtcgtccgcgctcctcatcacactctccatgctcccgcttaattaccgacatactcttcctgcatggaccaactgccaagctgaatctgactcttaagctctcagcgttctttgcgttcaccgccctcacatctgccacatgcttcatgttccacaccttaaagatgaaggccgtcgtcactagtacagagaagttctatagtggcggttgtaaacctatttatagtggcgtttttcgtaaccgccagtgctaggggccagtagaaatcatcatttttacaggcgggtaactgaggaccgccagtgcaaatcgtttctaggaaacataaaacatattttaaaaatagttaaaaaatttatttttattaggcccaccccacccgcaagtcgcgcatttttcgcgcaaaattcgcgcgctacgcggttgttagtattcgaaccgtcgacctcaccctcgcgcgtaccctcccctaccactccgtctatgacatgtcttgtgtctagtttgtagttgttttctccacatcactaccggaatcaatagcttcgccgagtgccggaagcactcggcgaagccttaaaaacactcggcaaaggctttgccgagtgttacactcggcaaagaaggttcggcaaacagtgcatcggcaaagacttctttgccgagtactttttctcgggcactcggcaaatatctttgccgagtgtcagggagcactcggcaaagaaaagcgaccgttacgacgccggttgacggagacggcggctttgccgagtgtcaacggtgacactcggcaacgaagatatctttgccgagtgtcctcctggcagcagtagcaaaagattccttgagtgccggaagccctcggcgaagccttaaaaacactcggcaaaggctttgccgagtgttacactcggcaaagaaggttcggcaaacagtgcatcggcc

SEQ ID NO: 58282 - DNA, 786 bp, Zea Mays
tgggagacaaaataaaaaaaatgaaaatacactttgccgagtgtctggagatgacactcggcaaagagggctttgccgagtgtctattacgtggcactcggcaaagaagcatctttgccgagtgccagccgttggctctcggcaaagactgacggccgtcagctctgggacggccgctgacggccctttgccgagagccccgtttgccgagtgtgtgacactcggcaaacttgtctttgccgagtgcctacctgtgccgagtgttcagcactcggtaaaggggctcttttccgagagcctaactttaccgagggcggcactcggcaaagccttctttgccgagtgcccgacaaaaggcactcggcaaagaatacaacactcggcaaagcctcggattccggtagtgcatattacaaccatttgtgtgtaaattgcttatttgagaccctaaacgaattcaaataaaaaagttgtcaactacaaagataaataacttttgaagttctacaacttttattttgacacttttttcatcatccgaggtagtttgcaaaatttgaattttaaatttgacatacttatattcaatttttgagaaccgaaatgagttcaaataaaaaagttgtcaactacaaagtttcataacttttagagatctacaacttttattttggtggttttgtcatacgaggccgtttgaaaaattcgaaaaattaaggataaaaatgatttctagtggcggttccttaagaaaaccgccactagaaatcgtatttctagtggcgg

SEQ ID NO: 58283 - DNA, 4724 bp, Zea Mays
cttgatctggtcacgcacgcacgcatggatggtgacgtcgcatgatatcgagacgtgtaaatttagtgtaaattaaatgctaccctcgaacgaatgtaaattaaaagctacttccttcgtaccggagaaatttaattactatcttgatcgggttaatagaaaaggtataaatatttatacaacacagaacaaacaattactattgggtgtaaattaataaacctaacagcactgttggggacttgctctcaaatgctatgaattaagaacaaggcaacataaaatatcaaatattaatgcccttcgtccgctgaagcattatttcctcaaggatttaatgaatttcggacgaagaccatgagcagaatattacgaaggttatacattcgtaatcaaaattacaaagataatacaaagtaatatacaatgtgaaacattaaagatgaatatatcagaaataattgacattattcacatatcttatcatacaaatttaagatgcttgaacataatgttttatgaacatttatacctctgccttgacagataataattcccgagtgaagcgtttgcaattacaagaatgcgtgaacagtaaaggaatactgttcactatttataggcacaggacacggcccgtgaggaattacaatcatacccctcgtaaaaatttacaacaatgactcggactcttatggactaaaaagtcattctatgtttaagtcggtttgtaattccgaagcttcacaaagtggcaccttcggcatcgtgtacaagcagcttcagccgaagctgtttctttctataggaccttcggcgacgaagcatggtcccaacagtagccctttcgtggtgctagatcgtttttcgtaacgagcttgatccgtgaaaaaagtctcttaggcttcaggaagccgaaggtccgaaaacaccttccctgagctcgttgtcgagaaacgatacagctttcaagcgtgcagcggtcccaccatgcagattcactgttctggttcttgcggcccactgttcagcgggtgcgagcaactgtttgcctggtgtaaaaatcctgacgattcaccttcttacctgtaacactatataaacagacgggtaggtgtgaagttaccacaacattcattgctattgtactgttttgctgccaaaattttcgaccatagccgaagcttaactttcgcattcaaacgaagctccaatttagaatttgcttcgtcagaagaatagcttcggaagagaagactattatttttcaagaaaattttcaagaaattcaaaattaaatggccagagtgcgctctactgctagagttgaacgtgagggagacgaagccgaaggtgtggagacagttcctatctcggaagcaatgcagcgatctggattggtgacgtcgggagaagctcccgctgctgaagcagaacaagagatattgaggaggctgattctgatgatgattacaatatctcagtaccgagcaagcctagccatctggactttgggaagtcgactatctccaaggctgatctttccaagatggtgaaatcgggctacttcagtgaagatgagaaaaagctgattcgcttcggtggagaggaaactaccccgaagccagagaaggatgaaatagtgatttttaagagttttcttaaagctggcttgagatttcctttgaataggatgattgctgatgtgcttcaaaagtttgggatttattttcaccaactgactcctaacgccattgttaggctcagtgtttatatttgggctctccgaagccaagcagtggagccatttgccgaaggtttctgccgagtacatgagctacactatcaaacaaaggacagaaaggatgggctacatgaaaattttggttgttacaactttgcatatcgaaaaaccacaaaatttcctatcatcagctatcaaagcaagtggctggcaggctggaaatcggaatggttctacgtcaaggttgatgacgacaaggagaagcttgtgcagagtccgcttgaactaatcttcggagaaacccgacctcagtgcaatatgacaccagaaggtccaacccaaaaagcgttggctgaattcagaaatattgcagagcacattggcactagggatttagtgcaggaatttcttgccttcagagtatttccaactatgaaggagtggactatgccgaagcctacaggggagaagaaagaaggggagcttgtccatctaccctaccattataagttcaagaaatattttaaggctccttgccaagaatggctcgatacaatcgaaataatgagtactgaaattcttggaaattactctaaaaaggaggaccaattgatgacagcagccttcggcacccggccgaaacgaaggctaaacagagtacttgatgctataggcttcgaatattctgactatgggcgattggacggagatgctgacggcccgaagagaaaaagaattgctagcgctgttgacgaagagagcaccaaagtggctaaaaagaaaaaggagatttctgaaaaactgagtcccgaaaagctgagccctgagccgaaggtggctgctgcaagaaagagaaaaactgcatctccagaaccaaaaacgttggttcgggaagaagatactcctacaacaccttctactgccgatgtagaagagattatgaaggtaatgactgaacccttgcctgtcaagctaagtccgctggcgccggaactgacgaagttttttcagaaggacaaagcagcttcggcagaagaaggtcctacactgcggaaaaaacgaagaattattcagatagcagatgtgattcatcagacgccgccaccgacgacagtgtcgaaagttgcttttgtcgagaccgccgaagcaaaaggcgccgcagccgaagctaccagggtggaaacccccgaagctgaaaccggcgcagccgaagctactggggccgaaaccggggccacagaagatctgaacctggaagacacacttgaagttattgataatatacttctgaaaatggctgaggaagaagctgttgtggttacagtgagcacagctactgaaaaggggaaaaacaagttgaagagactttggaagaaaaagattttaactttcaagatttacttgggcaagaattgacagatgctgaaaaagaagagcttaaaaaatatgccatatcctgcggatataagccaggagctacactgtttggtggggttaacgaaggaaagctgagatgccttcgaaaccgcagcgaagctaaaattgttaggaccctctccaaaaatattggcctgccgaagctggaagcggacctctgccgctaccaacgacaccatatcgctggaagcttactttatgctaattttaaggtaacaaatattaatgctattttattattattattattattattatttaggtcgttttttaacaaatattgttttgacagagcatattgttaagtaaggttctaaaaatgcaacaagatctcgaagacgagaaaaacaaagccagcatccaagatttggctgaaaaagttgaaaattacgaagctgatctgaaaaagaaggacttcaccatccaagaccttgaaatcatggttaaggaacacgaaggtgcattagaaaagaaagactttgttatccagtctatagaaggctccttgactgaagtccaagcagagaacgacaacttaaagaatgaattgctgaaacaatcagaaaaatttgagcaagaaaagaaacaccttgaagcaagcctaaaaactgagatggataaaaattcaaatttgcagaaatccttgaaggaacttcaagagaaatgcctaagcttcggcagccgatgtgtgcagcggctgaaggatgtgttttattctgtcggagccagctctgcaaaatttataccttcagctgaaaatctgcccagcacattagaatatatgaaggcgaaggtgatgcccttgacgaagttattgggtgggcatgcacgacttctgcgccctggtagcatctcggggcacagctaccgcttttctgaaggctggttgtacgcatggaaaatattgtgaatagaccaaactttagcttatcagcatcagatctgatagatatcccaagcctggcccgaagcattgggaatagattcatgacccagatctaggtaagtggcgagcaaaaaatggcaggtgacgaagctcgtagtcatcttaaaccggtaagaaactgatatttgttacttttaccttttccttgaaatttgcacctttcttattctgctatttggtatacgcaggatgacgaagctgaagaatgacgaagctgaagtttgaagaagcctagcctgaagcttgatagttgcttacaatgtattttcctgcaaaaattctagagaaacttttgtaatatagttatggaacaactcatgtaaatttgtacataccttgtaatatattttgtttctgctatctgtgtacaatctgctttgctgtggacgaaacttctcttttgagccgaaggcgaaaaacaccttcccttcttttcgtacacaacgaagcataaaaaaaatttccttcaaagtttttcctcattgctgaagtacctgtcttgtttgtgtggtatgatgatgattctatatatgtctaaatgaatgtttatgaatgcaaatgacatgatgaaaatgtatcgtgcaaatgaatattggg

SEQ ID NO: 58284 - DNA, 318 bp, Zea Mays
gaccaaactttagcttatcagcatcagatctgatagatatcccaagcctggcccgaagcattgggaatagattcatgacccagatctaggtaagtggcgagcaaaaaatggcaggtgacgaagctcgtagtcatcttaaaccggtaagaaactgatatttgttacttttaccttttccttgaaatttgcacctttcttattctgctatttggtatacgcaggatgacgaagctgaagaatgacgaagctgaagtttgaagaagcctagcctgaagcttgatagttgcttacaatgtattttcctgcaaaaattctaga

SEQ ID NO: 58285 - DNA, 1416 bp, Zea Mays
tcagaggcgccgtacttgccctggaccaggcctgattctgattctgattccatctcccctgttgcaaaccctagttctttactcctcttttctcgattaagtagcagcagaatccaggaccacgaaatcccgaactagttgtttacaatttcttctctgcttcccactttccgccctctcgaaagcttctctcccttctgcacaagctcaggattatagatctggggcgggagtggcaagcgaaggacatgcagatgcacgtcggaggaggcgcggccgacagcccggaggcgacgcggccgagccgctacgagtcgcagaagcggcgggactggcacacgttcgggcagtacctgcgcaaccaccggccgccgctggagctggcgcggtgcagcggcgcgcacgtgctcgagttcctgcgctacctcgaccagttcggcaagaccaaggtccacgcggcggggtgccccttcttcggccacccgtcgccgcccgcgccgtgcccgtgcccgctgcgccaggcttggggcagcctcgacgcgctcgtcggccgcctgcgcgccgccttcgaggagcacgggggccggcccgaggccaaccccttcggcgcgcgcgccgtgcgcctctacctccgcgaggtccgcgacagccaggccaaggcgcgcggcattgcctacgagaagaagcgccggaagcggccgtcgtcgttcgcgtccgcctcgtcccagtcgtcgccgcaggccgcgaccagcccgccgcagcaggccgctcccgcttcctcgccgatcctgtcggacgcggcggctgagagggccgacgtgcgggcgttcgtgtctgacgccggggcacggggcacgggcacgggcaccagcaacagcaccacttcttcatgccgcacccgcagttcctgcacgggttcagcctgctgccgggaaaccaccgaagcggtggctggcaatggcaatggcagcagcagcagcgctagcgtcgccgccagcagcggggacgagatagcgctggcactggcggcggcggaggaggcgcacgcggcggggtgcatgctgccgttgtcggtgttcaactaggcaggcgtatagccaaaagcgaggtagggcgaatgaatagtccgggtgcttgcttatccggttccggtgttcatgcatgatcgttctcactgtcgcgatggagttgaggcgatcaacacacgtacgttctgcttgctgttcttaagtaattcctattcccatctcttttttgctcatgcatttcctgctgtgctgctgctgctgggaaatagtattagtagctgtgcttggtactgtagggtttgcagaatcctgcttggtttgtgtatgcaatgcaaatgatgacggaggtataatataatggaaggcttaatttccaggctaattaatg

SEQ ID NO: 58286 - DNA, 3130 bp, Zea Mays
atcttcccccgccccgcctctccctttcttctttaccaagccccccacacccaaacccctcctcccctgctctgcctgccccatgtccccgcgcctctgaccaaccaggctgccggaaccctacccggtgccccgtgatgcccccgcggccgtcgctccactctctgctcctcatggccgcctccgccgccgcggccagcggggactcgggcccgctcctcgctgcgcgccgccgtctagctgcgacggccgccgcaggggggcaccgcatccggctgctccactccttctcgccgggacgcgtccccaggcggcctgaggtggtctgctgcgtgcgcagcgcccccgactcgcggcggtcggcccccgcccccccgtgctccaggaacgttctttcggcaaaaaactactcaactgcttctgaggagaggcttgggaagatcattcagaagttgaaaaacgaaggtattaatcccaagcagtggagacttggaaattttcagcgcatgttgtgtccacagtgcaatggtggatctagtgaggaattgagtctcagtgtctacatccgaaaggatggcataaatgcaacatggaactgttttaggtctaagtgtggctggagaggttttgtccaggctgatggagttaccaacatatcccaaggaaagagtggcatagaaagtgaaactgaccaagaggttgaagctaagaaggcagcaaataaggtttatagaaaaatcagtgacgaggacctcaatcttgagccactctgtgatgagcttgtagagtactttgctacgagaatgatttcggcggaaacacttcggaggaataaagtcatgcaacgtaactggaataataagatatccattgcttttacctatagacgtgatggagctcttgttggctgcaaatacagggcagtcgataagacattttcacaggaggcaaacacggagaaaattttttatggtctggacgatataaagcgtgcacatgatgttatcattgtggagggtgaaattgataagctgtccatggatgaagctggttatcgtaattgtgtcagtgtgccagatggtgcaccacccaaagtgtccagtaagattccagaccaagaacaggttagaactattttgtattttcccatgttgctaaaagttctggtccctgtgataatctatatttgcttatgtaccaccatcggacagtagtttgttaagctttgacctgatgcctttgtatgctctctgtaaagctaggataagaagtatagctatctttggaactgcaaagactatcttgactcggtgaagattttcttcagaattcaatcataacttattttgtgaggcgtgcagatcacttcactgactttgttctggcacatgggaataggcatctaggataatattagcaaccgataatgatcgtccaggtcaggctctggctgaggaacttgctcgtcggcttggtaaagaaaggttctaatgtttttaggtccacaagcattgagaaaggttatagaagatgcagaactgtatcctataagaggccttttttcattcgaacagttcttcccagagattgacaattactttcttggaatacatggtgatgagcttggtattcatactggatggaaatctatggatgatctttacaaggttgttcctggtgaattgactgttgttactggagtaccaaattctggtaaaagcgagtggatagatgctttattgtgcaatataaacaaacaatctgggtggaaatttgttctgtgctcaatggaaaacaaggtaaaggagcatgctaggaaactcttagagaagcacattcagaagccattctttaatgctaggtatggtgggtctgcacagcggatgactcctgatgaatttgaagcaggaaaacaatggttaaataaaactttccatcttatccggtgtgaagatgatagccttccatctattaattgggttcttgaccttgcgaaagctgcagttctaagacatggagtgcgtggtctggtgatagatccttataatgaacttgaccatcagcgcccctcaaaccagacggaaacagaatatgtcagccagattctgaccaagattaagcgctttgctcagcaccattcatgtcatgtatggtttgttgcacatcctagacagcttcaaaactggaatggaggcccaccaaatatatacgacataagtggaagcgcacattttataaacaaatgtgataatggaattgtcatccacagaaacagggacccaaatgctggcccccttgataccgtgcaggtttgtgtgaggaaggtgcggaataaagtggttgggcaaataggagatgctttcctgacatatgaccgggttactggtgaattcaaggatgctggtaaggccactacagcacccagtgcaaaagcggcaaaacagtcacgcaaagaggcatataagatgccatttcaacatgctgctgaagacggtgagaatagtggtctgtgactgcataagaaagacatgttcctgctgatttgatgtatctgtatcattcaacgaaagtgagatttcacgattgtttctggggatggcctgctggagctcaggcagtacctcattgaactggatttgaaaccccaggatttcaccgattcctgctgcaaatgaagttgaaagctaaacttgctcagatgcgcacaagacattggcggggtggtgtatagtagtaagattaatgtaaatcaattgccacaccaggtgctaatctatgaacatttgggtgggttatatcagtagctaaactttagcagctaaggtagtacgattaatcatgcaggctttcccaaaaaattgtagcagttggaagggtttttatgttcacccttctcaacgcctgaccaggaaccaatgcctttaatgtggccgtattttttaaaaaagatgcctttaatgtgacccaactgcgaattcaggtgctcgtttgacccatgcaaagcaataccgaccatgtgccgaacattttaaattggggaccgtctccgtcattctgttttgttgtaactggatccctgttgtgatgtgcagctggaacaatgagcatgaacgaatgctctcaaaatcca

SEQ ID NO: 58287 - DNA, 2938 bp, Zea Mays
atcttcccccgccccgcctctccctttcttctttaccaagccccccacacccaaacccctcctcccctgctctgcctgccccatgtccccgcgcctctgaccaaccaggctgccggaaccctacccggtgccccgtgatgcccccgcggccgtcgctccactctctgctcctcatggccgcctccgccgccgcggccagcggggactcgggcccgctcctcgctgcgcgccgccgtctagctgcgacggccgccgcaggggggcaccgcatccggctgctccactccttctcgccgggacgcgtccccaggcggcctgaggtggtctgctgcgtgcgcagcgcccccgactcgcggcggtcggcccccgcccccccgtgctccaggaacgttctttcggcaaaaaactactcaactgcttctgaggagaggcttgggaagatcattcagaagttgaaaaacgaaggtattaatcccaagcagtggagacttggaaattttcagcgcatgttgtgtccacagtgcaatggtggatctagtgaggaattgagtctcagtgtctacatccgaaaggatggcataaatgcaacatggaactgttttaggtctaagtgtggctggagaggttttgtccaggctgatggagttaccaacatatcccaaggaaagagtggcatagaaagtgaaactgaccaagaggttgaagctaagaaggcagcaaataaggtttatagaaaaatcagtgacgaggacctcaatcttgagccactctgtgatgagcttgtagagtactttgctacgagaatgatttcggcggaaacacttcggaggaataaagtcatgcaacgtaactggaataataagatatccattgcttttacctatagacgtgatggagctcttgttggctgcaaatacagggcagtcgataagacattttcacaggaggcaaacacggagaaaattttttatggtctggacgatataaagcgtgcacatgatgttatcattgtggagggtgaaattgataagctgtccatggatgaagctggttatcgtaattgtgtcagtgtgccagatggtgcaccacccaaagtgtccagtaagattccagaccaagaacaggataagaagtatagctatctttggaactgcaaagactatcttgactcggcatctaggataatattagcaaccgataatgatcgtccaggtcaggctctggctgaggaacttgctcgtcggcttggtaaagaaagatgttggagagtcaattggccgaagaagaatgatacagatacttgcaaagatgcaaatgaggttctaatgtttttaggtccacaagcattgagaaaggttatagaagatgcagaactgtatcctataagaggccttttttcattcgaacagttcttcccagagattgacaattactttcttggaatacatggtgatgagcttggtattcatactggatggaaatctatggatgatctttacaaggttgttcctggtgaattgactgttgttactggagtaccaaattctggtaaaagcgagtggatagatgctttattgtgcaatataaacaaacaatctgggtggaaatttgttctgtgctcaatggaaaacaaggtaaaggagcatgctaggaaactcttagagaagcacattcagaagccattctttaatgctaggtatggtgggtctgcacagcggatgactcctgatgaatttgaagcaggaaaacaatggttaaataaaactttccatcttatccggtgtgaagatgatagccttccatctattaattgggttcttgaccttgcgaaagctgcagttctaagacatggagtgcgtggtctggtgatagatccttataatgaacttgaccatcagcgcccctcaaaccagacggaaacagaatatgtcagccagattctgaccaagattaagcgctttgctcagcaccattcatgtcatcttcaaaactggaatggaggcccaccaaatatatacgacataagtggaagcgcacattttataaacaaatgtgataatggaattgtcatccacagaaacagggacccaaatgctggcccccttgataccgtgcaggtttgtgtgaggaaggtgcggaataaagtggttgggcaaataggagatgctttcctgacatatgaccgggttactggtgaattcaaggatgctggtaaggccactacagcacccagtgcaaaagcggcaaaacagtcacgcaaagaggcatataagatgccatttcaacatgctgctgaagacggtgagaatagtggtctgtgactgcataagaaagacatgttcctgctgatttgatgtatctgtatcattcaacgaaagtgagatttcacgattgtttctggggatggcctgctggagctcaggcagtacctcattgaactggatttgaaaccccaggatttcaccgattcctgctgcaaatgaagttgaaagctaaacttgctcagatgcgcacaagacattggcggggtggtgtatagtagtaagattaatgtaaatcaattgccacaccaggtgctaatctatgaacatttgggtgggttatatcagtagctaaactttagcagctaaggtagtacgattaatcatgcaggctttcccaaaaaattgtagcagttggaagggtttttatgttcacccttctcaacgcctgaccaggaaccaatgcctttaatgtggccgtattttttaaaaaagatgcctttaatgtgacccaactgcgaattcaggtgctcgtttgacccatgcaaagcaataccgaccatgtgccgaacattttaaattggggaccgtctccgtcattctgttttgttgtaactggatccctgttgtgatgtgcagctggaacaatgagcatgaacgaatgctctcaaaatcca

SEQ ID NO: 58288 - DNA, 2954 bp, Zea Mays
atcttcccccgccccgcctctccctttcttctttaccaagccccccacacccaaacccctcctcccctgctctgcctgccccatgtccccgcgcctctgaccaaccaggctgccggaaccctacccggtgccccgtgatgcccccgcggccgtcgctccactctctgctcctcatggccgcctccgccgccgcggccagcggggactcgggcccgctcctcgctgcgcgccgccgtctagctgcgacggccgccgcaggggggcaccgcatccggctgctccactccttctcgccgggacgcgtccccaggcggcctgaggtggtctgctgcgtgcgcagcgcccccgactcgcggcggtcggcccccgcccccccgtgctccaggaacgttctttcggcaaaaaactactcaactgcttctgaggagaggcttgggaagatcattcagaagttgaaaaacgaaggtattaatcccaagcagtggagacttggaaattttcagcgcatgttgtgtccacagtgcaatggtggatctagtgaggaattgagtctcagtgtctacatccgaaaggatggcataaatgcaacatggaactgttttaggtctaagtgtggctggagaggttttgtccaggctgatggagttaccaacatatcccaaggaaagagtggcatagaaagtgaaactgaccaagaggttgaagctaagaaggcagcaaataaggtttatagaaaaatcagtgacgaggacctcaatcttgagccactctgtgatgagcttgtagagtactttgctacgagaatgatttcggcggaaacacttcggaggaataaagtcatgcaacgtaactggaataataagatatccattgcttttacctatagacgtgatggagctcttgttggctgcaaatacagggcagtcgataagacattttcacaggaggcaaacacggagaaaattttttatggtctggacgatataaagcgtgcacatgatgttatcattgtggagggtgaaattgataagctgtccatggatgaagctggttatcgtaattgtgtcagtgtgccagatggtgcaccacccaaagtgtccagtaagattccagaccaagaacagatcacttcactgactttgttctggcacatgggaataggcatctaggataatattagcaaccgataatgatcgtccaggtcaggctctggctgaggaacttgctcgtcggcttggtaaagaaagatgttggagagtcaattggccgaagaagaatgatacagatacttgcaaagatgcaaatgaggttctaatgtttttaggtccacaagcattgagaaaggttatagaagatgcagaactgtatcctataagaggccttttttcattcgaacagttcttcccagagattgacaattactttcttggaatacatggtgatgagcttggtattcatactggatggaaatctatggatgatctttacaaggttgttcctggtgaattgactgttgttactggagtaccaaattctggtaaaagcgagtggatagatgctttattgtgcaatataaacaaacaatctgggtggaaatttgttctgtgctcaatggaaaacaaggtaaaggagcatgctaggaaactcttagagaagcacattcagaagccattctttaatgctaggtatggtgggtctgcacagcggatgactcctgatgaatttgaagcaggaaaacaatggttaaataaaactttccatcttatccggtgtgaagatgatagccttccatctattaattgggttcttgaccttgcgaaagctgcagttctaagacatggagtgcgtggtctggtgatagatccttataatgaacttgaccatcagcgcccctcaaaccagacggaaacagaatatgtcagccagattctgaccaagattaagcgctttgctcagcaccattcatgtcatgtatggtttgttgcacatcctagacagcttcaaaactggaatggaggcccaccaaatatatacgacataagtggaagcgcacattttataaacaaatgtgataatggaattgtcatccacagaaacagggacccaaatgctggcccccttgataccgtgcaggtttgtgtgaggaaggtgcggaataaagtggttgggcaaataggagatgctttcctgacatatgaccgggttactggtgaattcaaggatgctggtaaggccactacagcacccagtgcaaaagcggcaaaacagtcacgcaaagaggcatataagatgccatttcaacatgctgctgaagacggtgagaatagtggtctgtgactgcataagaaagacatgttcctgctgatttgatgtatctgtatcattcaacgaaagtgagatttcacgattgtttctggggatggcctgctggagctcaggcagtacctcattgaactggatttgaaaccccaggatttcaccgattcctgctgcaaatgaagttgaaagctaaacttgctcagatgcgcacaagacattggcggggtggtgtatagtagtaagattaatgtaaatcaattgccacaccaggtgctaatctatgaacatttgggtgggttatatcagtagctaaactttagcagctaaggtagtacgattaatcatgcaggctttcccaaaaaattgtagcagttggaagggtttttatgttcacccttctcaacgcctgaccaggaaccaatgcctttaatgtggccgtattttttaaaaaagatgcctttaatgtgacccaactgcgaattcaggtgctcgtttgacccatgcaaagcaataccgaccatgtgccgaacattttaaattggggaccgtctccgtcattctgttttgttgtaactggatccctgttgtgatgtgcagctggaacaatgagcatgaacgaatgctctcaaaatcca

SEQ ID NO: 58289 - DNA, 2795 bp, Zea Mays
atcttcccccgccccgcctctccctttcttctttaccaagccccccacacccaaacccctcctcccctgctctgcctgccccatgtccccgcgcctctgaccaaccaggctgccggaaccctacccggtgccccgtgatgcccccgcggccgtcgctccactctctgctcctcatggccgcctccgccgccgcggccagcggggactcgggcccgctcctcgctgcgcgccgccgtctagctgcgacggccgccgcaggggggcaccgcatccggctgctccactccttctcgccgggacgcgtccccaggcggcctgaggtggtctgctgcgtgcgcagcgcccccgactcgcggcggtcggcccccgcccccccgtgctccaggaacgttctttcggcaaaaaactactcaactgcttctgaggagaggcttgggaagatcattcagaagttgaaaaacgaaggtattaatcccaagcagtggagacttggaaattttcagcgcatgttgtgtccacagtgcaatggtggatctagtgaggaattgagtctcagtgtctacatccgaaaggatggcataaatgcaacatggaactgttttaggtctaagtgtggctggagaggttttgtccaggctgatggagttaccaacatatcccaaggaaagagtggcatagaaagtgaaactgaccaagaggttgaagctaagaaggcagcaaataaggtttatagaaaaatcagtgacgaggacctcaatcttgagccactctgtgatgagcttgtagagtactttgctacgagaatgatttcggcggaaacacttcggaggaataaagtcatgcaacgtaactggaataataagatatccattgcttttacctatagacgtgatggagctcttgttggctgcaaatacagggcagtcgataagacattttcacaggaggcaaacacggagaaaattttttatggtctggacgatataaagcgtgcacatgatgttatcattgtggagggtgaaattgataagctgtccatggatgaagctggttatcgtaattgtgtcagtgtgccagatggtgcaccacccaaagtgtccagtaagattccagaccaagaacagctaggataagaagtatagctatctttggaactgcaaagactatcttgactcggcatctaggataatattagcaaccgataatgatcgtccaggtcaggctctggctgaggaacttgctcgtcggcttggtaaagaaagatgttggagagtcaattggccgaagaagaatgatacagatacttgcaaagatgcaaatgagttcttcccagagattgacaattactttcttggaatacatggtgatgagcttggtattcatactggatggaaatctatggatgatctttacaaggttgttcctggtgaattgactgttgttactggagtaccaaattctggtaaaagcgagtggatagatgctttattgtgcaatataaacaaacaatctgggtggaaatttgttctgtgctcaatggaaaacaaggtaaaggagcatgctaggaaactcttagagaagcacattcagaagccattctttaatgctaggtgtgaagatgatagccttccatctattaattgggttcttgaccttgcgaaagctgcagttctaagacatggagtgcgtggtctggtgatagatccttataatgaacttgaccatcagcgcccctcaaaccagacggaaacagaatatgtcagccagattctgaccaagattaagcgctttgctcagcaccattcatgtcatgtatggtttgttgcacatcctagacagcttcaaaactggaatggaggcccaccaaatatatacgacataagtggaagcgcacattttataaacaaatgtgataatggaattgtcatccacagaaacagggacccaaatgctggcccccttgataccgtgcaggtttgtgtgaggaaggtgcggaataaagtggttgggcaaataggagatgctttcctgacatatgaccgggttactggtgaattcaaggatgctggtaaggccactacagcacccagtgcaaaagcggcaaaacagtcacgcaaagaggcatataagatgccatttcaacatgctgctgaagacggtgagaatagtggtctgtgactgcataagaaagacatgttcctgctgatttgatgtatctgtatcattcaacgaaagtgagatttcacgattgtttctggggatggcctgctggagctcaggcagtacctcattgaactggatttgaaaccccaggatttcaccgattcctgctgcaaatgaagttgaaagctaaacttgctcagatgcgcacaagacattggcggggtggtgtatagtagtaagattaatgtaaatcaattgccacaccaggtgctaatctatgaacatttgggtgggttatatcagtagctaaactttagcagctaaggtagtacgattaatcatgcaggctttcccaaaaaattgtagcagttggaagggtttttatgttcacccttctcaacgcctgaccaggaaccaatgcctttaatgtggccgtattttttaaaaaagatgcctttaatgtgacccaactgcgaattcaggtgctcgtttgacccatgcaaagcaataccgaccatgtgccgaacattttaaattggggaccgtctccgtcattctgttttgttgtaactggatccctgttgtgatgtgcagctggaacaatgagcatgaacgaatgctctcaaaatcca

SEQ ID NO: 58290 - DNA, 2942 bp, Zea Mays
atcttcccccgccccgcctctccctttcttctttaccaagccccccacacccaaacccctcctcccctgctctgcctgccccatgtccccgcgcctctgaccaaccaggctgccggaaccctacccggtgccccgtgatgcccccgcggccgtcgctccactctctgctcctcatggccgcctccgccgccgcggccagcggggactcgggcccgctcctcgctgcgcgccgccgtctagctgcgacggccgccgcaggggggcaccgcatccggctgctccactccttctcgccgggacgcgtccccaggcggcctgaggtggtctgctgcgtgcgcagcgcccccgactcgcggcggtcggcccccgcccccccgtgctccaggaacgttctttcggcaaaaaactactcaactgcttctgaggagaggcttgggaagatcattcagaagttgaaaaacgaaggtattaatcccaagcagtggagacttggaaattttcagcgcatgttgtgtccacagtgcaatggtggatctagtgaggaattgagtctcagtgtctacatccgaaaggatggcataaatgcaacatggaactgttttaggtctaagtgtggctggagaggttttgtccaggctgatggagttaccaacatatcccaaggaaagagtggcatagaaagtgaaactgaccaagaggttgaagctaagaaggcagcaaataaggtttatagaaaaatcagtgacgaggacctcaatcttgagccactctgtgatgagcttgtagagtactttgctacgagaatgatttcggcggaaacacttcggaggaataaagtcatgcaacgtaactggaataataagatatccattgcttttacctatagacgtgatggagctcttgttggctgcaaatacagggcagtcgataagacattttcacaggaggcaaacacggagaaaattttttatggtctggacgatataaagcgtgcacatgatgttatcattgtggagggtgaaattgataagctgtccatggatgaagctggttatcgtaattgtgtcagtgtgccagatggtgcaccacccaaagtgtccagtaagattccagaccaagaacagctaggataagaagtatagctatctttggaactgcaaagactatcttgactcggcatctaggataatattagcaaccgataatgatcgtccaggtcaggctctggctgaggaacttgctcgtcggcttggtaaagaaagatgttggagagtcaattggccgaagaagaatgatacagatacttgcaaagatgcaaatgaggttctaatgtttttaggtccacaagcattgagaaaggttatagaagatgcagaactgtatcctataagaggccttttttcattcgaacagttcttcccagagattgacaattactttcttggaatacatggtgatgagcttggtattcatactggatggaaatctatggatgatctttacaaggttgttcctggtgaattgactgttgttactggagtaccaaattctggtaaaagcgagtggatagatgctttattgtgcaatataaacaaacaatctgggtggaaatttgttctgtgctcaatggaaaacaaggtaaaggagcatgctaggaaactcttagagaagcacattcagaagccattctttaatgctaggtatggtgggtctgcacagcggatgactcctgatgaatttgaagcaggaaaacaatggtgtgaagatgatagccttccatctattaattgggttcttgaccttgcgaaagctgcagttctaagacatggagtgcgtggtctggtgatagatccttataatgaacttgaccatcagcgcccctcaaaccagacggaaacagaatatgtcagccagattctgaccaagattaagcgctttgctcagcaccattcatgtcatgtatggtttgttgcacatcctagacagcttcaaaactggaatggaggcccaccaaatatatacgacataagtggaagcgcacattttataaacaaatgtgataatggaattgtcatccacagaaacagggacccaaatgctggcccccttgataccgtgcaggtttgtgtgaggaaggtgcggaataaagtggttgggcaaataggagatgctttcctgacatatgaccgggttactggtgaattcaaggatgctggtaaggccactacagcacccagtgcaaaagcggcaaaacagtcacgcaaagaggcatataagatgccatttcaacatgctgctgaagacggtgagaatagtggtctgtgactgcataagaaagacatgttcctgctgatttgatgtatctgtatcattcaacgaaagtgagatttcacgattgtttctggggatggcctgctggagctcaggcagtacctcattgaactggatttgaaaccccaggatttcaccgattcctgctgcaaatgaagttgaaagctaaacttgctcagatgcgcacaagacattggcggggtggtgtatagtagtaagattaatgtaaatcaattgccacaccaggtgctaatctatgaacatttgggtgggttatatcagtagctaaactttagcagctaaggtagtacgattaatcatgcaggctttcccaaaaaattgtagcagttggaagggtttttatgttcacccttctcaacgcctgaccaggaaccaatgcctttaatgtggccgtattttttaaaaaagatgcctttaatgtgacccaactgcgaattcaggtgctcgtttgacccatgcaaagcaataccgaccatgtgccgaacattttaaattggggaccgtctccgtcattctgttttgttgtaactggatccctgttgtgatgtgcagctggaacaatgagcatgaacgaatgctctcaaaatcca

SEQ ID NO: 58291 - DNA, 2969 bp, Zea Mays
atcttcccccgccccgcctctccctttcttctttaccaagccccccacacccaaacccctcctcccctgctctgcctgccccatgtccccgcgcctctgaccaaccaggctgccggaaccctacccggtgccccgtgatgcccccgcggccgtcgctccactctctgctcctcatggccgcctccgccgccgcggccagcggggactcgggcccgctcctcgctgcgcgccgccgtctagctgcgacggccgccgcaggggggcaccgcatccggctgctccactccttctcgccgggacgcgtccccaggcggcctgaggtggtctgctgcgtgcgcagcgcccccgactcgcggcggtcggcccccgcccccccgtgctccaggaacgttctttcggcaaaaaactactcaactgcttctgaggagaggcttgggaagatcattcagaagttgaaaaacgaaggtattaatcccaagcagtggagacttggaaattttcagcgcatgttgtgtccacagtgcaatggtggatctagtgaggaattgagtctcagtgtctacatccgaaaggatggcataaatgcaacatggaactgttttaggtctaagtgtggctggagaggttttgtccaggctgatggagttaccaacatatcccaaggaaagagtggcatagaaagtgaaactgaccaagaggttgaagctaagaaggcagcaaataaggtttatagaaaaatcagtgacgaggacctcaatcttgagccactctgtgatgagcttgtagagtactttgctacgagaatgatttcggcggaaacacttcggaggaataaagtcatgcaacgtaactggaataataagatatccattgcttttacctatagacgtgatggagctcttgttggctgcaaatacagggcagtcgataagacattttcacaggaggcaaacacggagaaaattttttatggtctggacgatataaagcgtgcacatgatgttatcattgtggagggtgaaattgataagctgtccatggatgaagctggttatcgtaattgtgtcagtgtgccagatggtgcaccacccaaagtgtccagtaagattccagaccaagaacagctaggataagaagtatagctatctttggaactgcaaagactatcttgactcggcatctaggataatattagcaaccgataatgatcgtccaggtcaggctctggctgaggaacttgctcgtcggcttggtaaagaaagatgttggagagtcaattggccgaagaagaatgatacagatacttgcaaagatgcaaatgaggttctaatgtttttaggtccacaagcattgagaaaggttatagaagatgcagaactgtatcctataagaggccttttttcattcgaacagttcttcccagagattgacaattactttcttggaatacatggtgatgagcttggtattcatactggatggaaatctatggatgatctttacaaggttgttcctggtgaattgactgttgttactggagtaccaaattctggtaaaagcgagtggatagatgctttattgtgcaatataaacaaacaatctgggtggaaatttgttctgtgctcaatggaaaacaaggtaaaggagcatgctaggaaactcttagagaagcacattcagaagccattctttaatgctaggtatggtgggtctgcacagcggatgactcctgatgaatttgaagcaggaaaacaatggttaaataaaactttccatcttatccggtgtgaagatgatagccttccatctattaattgggttcttgaccttgcgaaagctgcagttctaagacatggagtgcgtggtctggtgatagatccttataatgaacttgaccatcagcgcccctcaaaccagacggaaacagaatatgtcagccagattctgaccaagattaagcgctttgctcagcaccattcatgtcatgtatggtttgttgcacatcctagacagcttcaaaactggaatggaggcccaccaaatatatacgacataagtggaagcgcacattttataaacaaatgtgataatggaattgtcatccacagaaacagggacccaaatgctggcccccttgataccgtgcaggtttgtgtgaggaaggtgcggaataaagtggttgggcaaataggagatgctttcctgacatatgaccgggttactggtgaattcaaggatgctggtaaggccactacagcacccagtgcaaaagcggcaaaacagtcacgcaaagaggcatataagatgccatttcaacatgctgctgaagacggtgagaatagtggtctgtgactgcataagaaagacatgttcctgctgatttgatgtatctgtatcattcaacgaaagtgagatttcacgattgtttctggggatggcctgctggagctcaggcagtacctcattgaactggatttgaaaccccaggatttcaccgattcctgctgcaaatgaagttgaaagctaaacttgctcagatgcgcacaagacattggcggggtggtgtatagtagtaagattaatgtaaatcaattgccacaccaggtgctaatctatgaacatttgggtgggttatatcagtagctaaactttagcagctaaggtagtacgattaatcatgcaggctttcccaaaaaattgtagcagttggaagggtttttatgttcacccttctcaacgcctgaccaggaaccaatgcctttaatgtggccgtattttttaaaaaagatgcctttaatgtgacccaactgcgaattcaggtgctcgtttgacccatgcaaagcaataccgaccatgtgccgaacattttaaattggggaccgtctccgtcattctgttttgttgtaactggatccctgttgtgatgtgcagctggaacaatgagcatgaacgaatgctctcaaaatcca

SEQ ID NO: 58292 - DNA, 6065 bp, Zea Mays
atcagatacaccatcttggttaaaacacacagaaagaggtttaccaacaagtggttacagtaagctcatagcacacgtgacgggtgtgaatgtcgaataacatcatagttaactcgtgttagccagagaatccaagtccctgaaaggtgatatagattcgagaacatcaccagcaaagggatctgtagatacggactttaaaactagtccattttatcaagcactaggcatgactcgacctggtcatacatgctagaaaagcacacgtgaggcgatcgagacacgactagagcgatggctaggtggttattggccgccttaatctcgattcttataagtactttcttaagagggtttgaaccaaagtgagttcaggcaaatcgataaaacgatctctaaactcaaccttcgttcattgagcagttacaagttagtaaaaccaacttgttgaactacttttgacattgggcatgtcctctcagtaccatcggtaagccaacggtcgagagttcactcatactaacagttggtcatgcatttgggtagaaatccatttggtcatgttgttcatccgtttcttcatgcgagacgcattatccacttggttagggaatacatggattaaataagagagcgaatgaacaaactcctgcatctcagtagcagaggaaacagatctccattttgagagctaatcggttgtctctcgacactaaaaagctccaaggcttctcctttacacaaaggatgtaaagggaacttgtatgagtagtcactaccaagatcaaaagaaataagaccacacatgaaagtggtatgcccttttgatccaacggagatgacagatgttgcttgatctcttcacaaacgacatagaaattgtttcaaggaagaagtctacggaagataacatattgatacaatctcataatggattatgactattaactgtgataccaacgcgtgccatcggttttagtcataacaccattaccagacgtaaccaataagaaatctcacgcgatacaaatgaattaggcaagggtgacaatatacaaagagatgctccccctgtaatgatggttacagcagagagccaaatagatcatggcccgatgaaatggacaagacatggccataacctaaacttgatgaatggagtatgatgggagactgttagttcagccccaagcatatttctttgccaatcgtagagatcacaaggtcaaggatcagtatctgactagatacaggggaaaacaatcataagattaagttggtatgccttcgatagatatggggaaaccaaaggcatcaaattccagaaaaatggttggacatgtctttcctaggttgggttgataaagcgacaagataatccgcaaggagaggccaaacacaatagagacctcaacctgtatcaactaagcaagggcaggatctaggatggaaacacgaccactaagggagtgacaagttaattgccaagatccttatttggagtccgaatgcaacttatgtccaacaaagaaattatcaagcatttatttgtatgggcttggtcacagagtgataatggtaaattcaaattggggtctcggttcaccaactaagaacatggcctaattttgggtttaagcaaccaaactactaaccctctatcggcacatcaacaaaagagcacacataaagcactctaagaggtcacctaaagaatggaggacacctatttcatcgaagttcataatttagcattacaccatattatctacaatcaatggttactagaataaagatgagagaagcatcttgggtgtataggtgacaaacatgatgcaacaatcaggatgcatgctcgtcctacacgtcctcacgagttttgccaatatactgtggcaatagcgttctatatcggtggcatacttacgactctcacggtattttgctagtcgtcaactacacatacattttcgaggttagtgtacctgcagaaaaatccatcatagcccaattcccaatgatgcaattcacacatgatagtttatcacagtttatactccatatattgctatatggaggccagctcatcattaagcgccgagccatgcataggcgccgttgccacactttaaccatagggcaactcattatggtaactcaccttcttacctgagcgtaggtgcgtcgttacgagtacaatacacttctcagtattcccatgtctgtatacccatacacatccatggggtactgaattcccagaaaagtaaatactccacatcgcagccttcatatatacatatgtggaacatgtatataatcaagcgccacacttaagcactcccctagaccgacgtttgttcggtcatgctctcacatctcaccttaccttgagcgtcgatccattcaaaaccgaatggcctcaaaaataacaatacacatgtatgcaatacccacctggttgtgggttagtggttttgaactaagccacctgatagtccttaacttagggcttaatagaggatgtcactagcattatagttttttaaaactgtttttcaaaaccaaacaatgtgtttaggtgaaaataggttttctgaaaccaaaactttggttttgaaaatatgtatgtgactgtatatacttaatcttgctccgataccagctgtggcagaacctcccaagttatcgggcccacatgcacctgtccttgtctcaaagacctcagacggctatgtatgtgcaccagataacttaacaggatctgtccgagtgtcccagggaccccggataaaccacgaacaaccaggatcacaagattaagtaaacacaaatcacacaccaacattttgcagcggaaatctttttaccaaattttacaagctacatcaagttttacattagatttatcggagtggttacagaagtggttcaaaggaataactttaaactattataaattatttatagttttgaaatatatgctagctcaagtgaacatcctcaataagaagtatagaagagttacttagacttataagaaggccgagcccaccggcacttaacaccatcaacaacagcacaaagttagaacctgaaaaacaacagggaataaaaccctaagcacggaattactcagcaagacttacccgactaaagaaaagactctcaagggtatgctggctagagggattcaaggtaaagctcatcaagtttcaaggactctttttgcagaaaagcttactagaagtgagtccttaagccaaaattttacatcacaagttaagtacttttcctgaatctagatttgcctaatctagagcattcacttgtcctacactagctttcttttaaaatccaacttttgtttcgcttgttatctacgatgagggtcgaagatccagtcttcatatccgagaagttcggcgatccgaatcgattaatacccagctggggatctccaaccacacgacatatgcttctcttaactcttttgcacatgtctaccattcccacggatcctccaccacatgaacaggtccgcgccacccgagagcacaccaccccttttaggcggtcctttgccaggagggtacgtgccactctcgccatctctccactcccagtgcgcgattgtcttttcatgtatggaatagccgggttcaagcttacccatgatgaggtatgtggccagataaagggtcctagatcaacaggccaacaatcagtacggtccttaaacgactcagacggagacactacatcgagactcctttctcgtgcaagtcacccgcccggtctcagcttaatcatttaaccccaaaggtgggtacctggcagaggtacatcttttccgatgttgaatccatcacggccgtgatggattcaccatcaagttttattttcaaaaacatcccatccacttttgccaaatcatcttttgtaaaaacaaaacattttgtttttctaaagcaatgctaagcatcaaaaatcttttgtaaaacaggtgatcaaggaaggtaatcaaattcaaggaaggtaatgcaggaattgttttagcaatcaactcctatcacctaatgcatcaatcaagtgagaaagattttaaaaacatcaaggaaggtggcaaatgcaccggggcttgcctgggtaacactaggttagtgttgttagacgacgaccacttgacgatcagccttttgttttggcattgttcagattatccatcttccggttcgtccatcagcatcatcctgcggattagcccgcgcttgagatcgacttggctcttcttccgcatcgcgcgattaattatcgtacctcatgagatgcacgatgcacatgtatgagcacgagtatacatagtatgagatagataatctaagccaaaaaggacgaaacacttaaaaccaagaattaagcatcatggatatcacagcagggcatcgactacatccattaaccaaattgacatattacactagatctatttttattcctagctttttattaactctttaaactatgtatcttaattacttgatttaccgatttacctaaatcgattatcacaatataggcatgctaaattagtaaattactaacatttattgtgaccacaattctatttatagacctagtttagatcattcattaatccactcgcacgaataataaatttgcttaccctgtctaatttgacgcgatagtcgcaagcacgactatgggttccggttgacgtcacccaggggtcttcttttcttcggtagtcaattgcttgaagatcttttccttgactgaataattctgacgagtcgaacttgagtcgcgcaggatgtttgagcttttgtcgcgcacttggtgaacaccacgctgttggctttgtcttcacctgattctttagatttcttgatgactcgcggaacgacgacgagatcgtttttggagcgagctggtaaggtggggatcgagcaggggatgacgagtttgacggctcgacgataaacgtgaatatgccgaaacccaaaggatgaggagtgagcgcatgcggggcaagcaacacgtatttgaagtgtggagaaaattgcccacggcgaaataaattgagcaaagagcgttcgtgaactttatggcggaatcggcggcagccgatgccagagcgcatggtgaggaagcttcgcaatttgatgaaatcatggccgggtgaactctatggcgcggactacttcacgaccaagacaactgtcgcgacgcgcacgacgtcgccacgccataatatcaattatcaccacggccatgaacagatgtgcgcacaaggagctagagaccgagcgtggccagatagacagtaccgagctcggcagggaatagcacgcgcagccaccaaggcgcacgcaagggaactgagcagagaactttgagcggaactgtagctggcgagacctcggctggccggagagtgcatagagaaggggcctcggcgagcagaggagcgcgcacgaccagagcggagctggggagagcaggacgtgcaggggcgagctcggcgaagcatgcctgcgcgtgggcaaacagagggagaaaggacagagctgagcgccgccaggaagatggagcaggccgacaggggaccgagtagaggaagctccggcgcgcgtagaggagcctggacgggcgcgacagcgggcgcggccatggaggaagagcgcgcgcagcagctagaggccgagctgggaaggtccaggttgcagggaaggaagagcgctgggagagcagctcggctggaggaacaagggagggacgcggccgagcagcagataagcccgggaccgagcagggcgcagcgaactgggacaggggcatcccggcgagctcgccatgggaggagcgaaggggccggggcgagctcggccggtggtggctgtgcgcagggagggagaccacgacgcggcacagggggcgagcagacacccggatgtgcggcgcggagggagatgggcgcgcgcagcggcgagccggaggcagtacgccggccagggaggaagacggacggtcggcaagcttga

SEQ ID NO: 58293 - DNA, 1395 bp, Zea Mays
gtgggaggatatctgagaaagaaaacgacgatagatttttttgttccaggacacagtgacgcggatcctgataaggctcatgcgaaaaaaaatcaagagaggaagacgatgggaggataaggagaagatatttttccttttttataattttttttaaagaattttgcagatatttttggatcacaattttaagcgatgaacataattggtcaacgcgttatacggctacacatttcagtctaatgatttagcgaaccaaatcattcaccaattacttgttgtcagtactaattacagtagtctggtttaaaatcagatgaacatacgtctaacctcggaacacctggttccacagccaggataatttatccgtgaattgatgcacaatttttggatcctcgtacacgatttcacgattgacgagtgtgagtcgaattgtttgcaccaaaaatcttagtcgacgagtgcaaattaatttgttatggataaaatcattcgagtgagtcgggcttccgaattcgtattcgcgcgagcgatgaattttaaatactcatcggacgcactaatttttggaacgacgaggttccgaacaccacgaaaatttaggacgagcccgaatagatgaaaataaaacgatgtcgcacccacgacagacggaacggatgcgatattaaaatcgcaataggcgaagataattagaccttagtgtccgtcttattcactgatatcacgtgcttaaatccgtactcgctgtcgagcggaatataaacacctggggtgttacagccctcccccttaaaagaatctcgtcccgagattcggagcgaaagacttctaagggtagagaagtatgtaaccttgttcatatcagcgataattataaggcaattccaagcaaggacgagtgtctcagaatgttgtttctctagtggacatatcatgtatcgccttaagccaatttagaaatgtccaccaatagagacgctgtctgccagaagaacacataaggttccatgtgtgcagtttgcttttttttatgacactgtactatctgagtctgttgagcgagcgacaaatacacgattttacccaaacagaatcagatacaccatcttggttaaaacacacagaaagaggtttaccaacaagtggttacagtaagctcatagcacacgtgacgggtgtgaatgtcgaataacatcatagttaactcgtgttagccagagaatccaagtccctgaaaggtgatatagattcgagaacatcaccagcaaagggatctgtagatacggactttaaaactagtccattttatcaagcactaggcatgactcgacctggtcatacatgctagaaaagcacacgtgaggcgatcgagacacgactagagcgatg

SEQ ID NO: 58294 - DNA, 3327 bp, Zea Mays
gtttcttttctgcactttgatttattgtaaggactatatgggcgtctcagacgtatgatgtaatcgactatttcccttcttaatactattttgagcactgtgtgatgatgtccatgttatgtaactgctgtgtacgtgaataactgatcctggcacgtacatggttcgcattcggtttgccttctaaaaccgggtgtgacaaacagtgcgaagatgagctttcttaggattagattgaaatctagcacacatgcagacactaaacatgatatcgggcctagatgcggtaaggtacaataaactacctgtggcagaacctcccaagttatcgggcccacatgcacctgtccttgtctcaaagacctcagacggctatgtatgtgcaccagataacttaacaggatctgtccgagtgtcccagggaccccggataaaccacgaacaaccaggatcacaagattaagtaaacacaaatcacacaccaacattttgcagcggaaatctttttaccaaattttacaagctacatcaagttttacattagatttatcggagtggttacagaagtggttcaaaggaataactttaaactattataaattatttatagttttgaaatatatgctagctcaagtgaacattctcaataagaagtatagaagagttacttagacttataagaaggccgagcccaccggcacttaacaccatcaacaacagcacaaagttagaacctgaaaaacaacagggaataaaaccctgagcacggaattactcagcaagacttacccaactaaagaaaagactctcaagggtatgctggctagagggattcaaggtaaagctcatcaagtttcaaggactctttttgcagaaaagcttactagaagtgggtccttaagccaaaattttacatcacaagttaagtacttttcctgaatctagatttgcctaatctagagcattcacttgtcctacactagctttcttttaaaatctaacttttgtttcgcttgttatctacgatgagggtcgaagatccagtcttcatatccgagaagttcggcgatctgaatcgattaatacccagctagggatctccaaccacacgacatatgcttctcttaactcttttgcacatgtctaccattcccacggatcctccaccacatgaacaggtccgcgccacccgagagcacaccaccccttttaggcggtcctttgccaggagggtacgtgccactctcgccatctctccactcccagtgcgtgattgtcttttcatgtatggaatagccgggttcaagcttacccatgatgaggtatgtggccagataaagggtcctagatcagcaggccaacaatcggtacggtccttaaacgactcagacggagacactacatcgagactcctttctcgtgcaagtcacccgcccggtctcagcttaatcatttaaccccaaaggtgggtacctggcagaggtacatcttttccaatgttgaatccatcacggccgtgatggattcaccatcaagttttattttcaaaaacatcccatccacttttgccaaatcatcttttgtaaaaacaaaacattttgtttttctaaagcaatgctaagcatcaaaaatcttttgtaaaacaggtgatcaaggaaggtaatcaaattcaaggaaggtaatgcaggaattgttttagcaatcaactcctatcacctaatgcatcaatcaagtgagaaagattttaaaaacatcaaggaaggtggcaaatgcaccggggcttgcctgggtaacactaggttagtgttgttagacgacgaccacttgacgatcagccttttgttttggcattgttcagattatccatcttccggttcgtccatcagcatcatcctgcggattagcccgcgcttgagatcgacttggctcttcttccgcatcgcgcgattaattatcgtacctcatgagatgcacgatgcacatgtatgagcacgagtatacatagtatgagatagataatctacgccaaaaaggacgaaacacttaaaaccaagaattaagcatcatggatatcacagcagggcatcgactacatccattaaccaaattgacatattacactagatctatttttattcctagctttttattaactctttaaactatgtatcttaattacttgatttaccgatttacctaaatcgattatcacaatataggcatgctaaattagtaaattactaacatttattgtgaccacaattctatttatagacctagtttagatcattcattaatccactcgcacgaataataaatttgcttaccctgtctaatttgacgtcgcaagcacgactatgggttccggttgacgtcacccaggggtcttcttttcttcggtagtcaattgcttgaagatcttttcctcgactgaataattctgacgagtcgaacttgagtcgcgcaggatgtttgagcttttgtcgcgcacttggtgaacaccacactgttggcttcgtcttcacctgattctttagatttcttgatgactcgcggaacgacgacgagatcgtttttggagcgagctggtaaggtggggatcgagcaggggatgacgagtttgacggctcgacgataaacgtgaatatgccgaaacccaaaggatgaggagtgagcgcatgcggggcaagcaacacgtatttgaagtgtggagaaattacccacggcgaaataaattgagcaaagagcgctcgtgaactttatggcggaatcggcggcagccgatgccagagcacatggtgaggaagcttcgcaatttgatgaaatcatggccgggtgaactctatggcgcggactacttcacgaccaagacaactgtcgcgacgcgcacgacgtcgccacgccataatatcaattatcaccacggccatgaacagatgtgcgcacaaggagctagagaccgagcgtggcgagatagacagtaccaagctcggcagggaatagcacgcgcagccaccagggcgcacgcaagggaactgagcagagaactttgagcggaactgtggctggcgagacctcggctggccggagagtgcatagagaaggggcctcggcgagcagaggagcgcgcacgaccagagcggagctggggagagcaggacgtgcccggcgaagcatgcctgcgcgtgggcgaacagagggagaaaggacagagctgagcgccgccaggaagatggagcaggccgacaggggaccgagtagaggaagctccagcgcgcgtagaggagcctggccgggcgcgacagcgggcgcggccatggaggcaga

SEQ ID NO: 58295 - DNA, 650 bp, Zea Mays
atacttatgactatgtgactaatatgtgctcacctcttctgtcatttcagtgaccttgcctgcccgtgagccgtctcctgtcctgcctggattttcacctctcgtgtgagctttccaggtagccatctcctcttttgacattttatcgaatattatcgacctgtgcttagcctctctctctctctctcatttgcagtcattaggtcaggatgtcgcgcacgaagaatgtgtcgacgccagggggaggcgatgatgaggatcctcgtcgccccttcaggcaggtcaagggcaagactgtgtatttggagcagcaggaaggccgcaagaagcggcgtatggacagagcagcccgagcagcggcagcagcagcagcagacgctgagcaggccgagctaggagatcagcctcagactccttcagatcagattgcgtactgaaagtcacctagagggggggtgaatagggcgaaactgaaattctcaaaataatcacaactacaagccaggttagcgttagaaatataattgagtccgcgagagatggtgcaaaacaaatcgcaagcaaataagagatgtgacatgcggatttgttttaccgaggttcggttctcgcaaatctactccccgttgaggtggtcacaatgaccgggt

SEQ ID NO: 58296 - DNA, 3199 bp, Zea Mays
gcatcttcgagccttccacagttccacctcccgcctgctggaccctaggctttcttgccccacgccgtatccaccagcacgagtggagaaactgaagcacgatcccgaccacttcagaacccgatttggtggccacctccgttttcgctagtacttaatcccagttacatcaacaagaattgctcctctaagttctattggagcgtaatctgatcggtttgggtcggttcgagaacttgagattgcgatttgggagttgcgggagagaaaggaagagatgggccagagcaaggcggagtttttggagcagttcggtggggactacggttacccggacgcgcccaggggcatcgacgatctgcgggccgccgagttcaagcggctggaagggatggtttacctggaccatgctggtgcgacactgtactcagaggcacagatgacggatgttgctagagaccttatgtctaatgtctatgggaatcctcatagtcagaacgatccaagcatggctacaagtgatattgttacttctgcgcggcatcaggtcctaaaatacttcaatgcatcaccaaaggactacaaatgtatatttacatcaggggcaacagcagctctgaaacttgttggtgaatgttttccatggagtagagacagctgctatatgtacacaatggaaaatcataatagtgtgcttgggataagggaatatgctctgagcaaaggagctactgcatcagcagttgatgttcaagaggttatcgatccatcaaagagtcatgaaagtgacagtatgtttaaggtttcaaaacacctaaatcaaagaagaggtgatgatgtgcttctgcacaagtatcagaatgggagcctggcacctatttcaggaaacagtttaaatctatttgcattcccttcagagtgcaatttctcaggacataagttcaacctcagcttggtcaagttcatcaaggaagggaaatttatggatttgccatcacagcagcagggccagtggatggttctgatagatgctgcaaaaggatgtacaactgaaccaccaaacttaaccctgtattctgctgactttgttgtctgttcgttttacaagatatttggctatccaactggtcttggtgccttaatcgtaaaaaatgaggctgctagtttactgaacaagacatacttcagtggagaaaagaaaaagcattgagcaagctcttgaggatggaacaatctcattcttgagcatatcttctcttcgacatggatttaagataatcaatatgctaactatctcggctattgcacggcatactgcatctcttgctacttatgtgagaaataaaatgctagagctgaagcatagcaatgggaaaaatgtttgcatgatctatggacagacttctaaggtgaatcatctgaaaatgggtcctacaatcacattcaatttgaaaagagaagatgacacctggtttggatatcgtgaggtggagaagcttgcctcactgtcaagaattcatttgcgtacgggctgcttttgtaaccctggtgcatgtgctaagtatgttggtttgtcgcactcagatcttgtttccaattttgaggctgggcatgtttgttgggatggtaatgatgtaataaatgggaaaccaactggtgctgtgaggatatcatttggctatatgtctacatatgaagatgcagaggaatttctgaagttcctacggtcatcttttgtgtccaaacctgtaggattgaacaatgaatacatggtgaatatggatactcttaatttagtagatgattggagccaacaagctctttcagttattcgcttgaaatccataactatctatcctgtaaaatcttgccaaggatttagtgtgcagagctggccactgacaactggtggtttaaaatatgacagagaatggcttctccaaggattaggtggtgaaattttgacgcaaaaaaaggtaacggttttatgttctgaacgttagatgtttgacatcactttctctaccctgttttttttttctcgaacaacgcaggagatctgcatgtcatttcaattaaggagagaaaaacaagaggtctggcaaggccagaccgattacaaaaggaacacaacaaaacccacaaggccacaactcagacgagggtcctcaaccacgaccaacaaaaagaacaccctaaagaaaaactcaaactaaaccatctagcgacccaaccaggaactcctgtagctttgaagctccagccatgcaccacattttgcattcctccacaatcttccttagaagatcagatatacacggtcttccattataaaaaacacagctatttcggtgcttccaaattttccaggcagcaaggatgatcagagagttcagccccctatgccttccctttggcgtcaaacgaaccacctttctccaccactcagggaaagaataatcatccagagtgggagatagacctggaatgtggagtgcctggaacatatgaaaccatagctgtctagaaaaactgcaaccaactagaatgtgaatgtgattaatggtctcatctgcttgatcacaaagggggcaaacctcagggtggggtaaccctcttttggccagcctatcggctgtccaacgacacttcttgaacaccagccatataaagaacttgcaacgaagtggtgcccaactcttcgaaattttcttccatggagaaaaacggatggatccaacaaagaaagctgcatatgcggacctgctagaatattcccctgaatctgaaagcttccatctaaaagtgtcaggaacctctggctataggataaccccttgcacttgatcctagacctggacataatcaatcagaactggaatggttaggccccttgaatatccatccaccacccacttgagattatttagagcttcagctacagttctttattgatcactcttcttgcaatattttggatcaggtagggggccaaatcagcaatggaattaccatttaaccatttgtctttccaaaacaggatccttttactatttccaagcactggagaagtggctgtatcaaaaaaaggtcgtagcattccgagggaccccaatttggaagccaacccaaggacggggccagtccaccttatgggcccgtaactaacggattttcagagcccagcctaatttctcca

SEQ ID NO: 58297 - DNA, 2920 bp, Zea Mays
caaacatgcgctccgtaaccctagcagccgccaccggagctgcacgcccatcgtagctgcgctccactcctcgctagagctgcacagttgatgtactgacaaacaaagggatggtttacctggaccatgctggtgcgacactgtactcagaggcacagatgacggatgttgctagagaccttatgtctaatgtctatgggaatcctcatagtcagaacgatccaagcatggctacaagtgatattgttacttctgcgcggcatcaggtcctaaaatacttcaatgcatcaccaaaggactacaaatgtatatttacatcaggggcaacagcagctctgaaacttgttggtgaatgttttccatggagtagagacagctgctatatgtacacaatggaaaatcataatagtgtgcttgggataagggaatatgctctgagcaaaggagctactgcatcagcagttgatgttcaagaggttatcgatccatcaaagagtcatgaaagtgacagtatgtttaaggtttcaaaacacctaaatcaaagaagaggtgatgatgtgcttctgcacaagtatcagaatgggagcctggcacctatttcaggaaacagtttaaatctatttgcattcccttcagagtgcaatttctcaggacataagttcaacctcagcttggtcaagttcatcaaggaagggaaatttatggatttgccatcacagcagcagggccagtggatggttctgatagatgctgcaaaaggatgtacaactgaaccaccaaacttaaccctgtattctgctgactttgttgtctgttcgttttacaagatatttggctatccaactggtcttggtgccttaatcgtaaaaaatggaacggtagctgcttcaattgctgacatcgactttgttcagaaaagaaaaagcattgagcaagctcttgaggatggaacaatctcattcttgagcatatcttctcttcgacatggatttaagataatcaatatgctaactatctcggctattgcacggcatactgcatctcttgctacttatgtgagaaataaaatgctagagctgaagcatagcaatgggaaaaatgtttgcatgatctatggacagacttctaaggtgaatcatctgaaaatgggtcctacaatcacattcaatttgaaaagagaagatgacacctggtttggatatcgtgaggtggagaagcttgcctcactgtcaagaattcatttgcgtacgggctgcttttgtaaccctggtgcatgtgctaagtatgttggtttgtcgcactcagatcttgtttccaattttgaggctgggcatgtttgttgggatggtaatgatgtaataaatgggaaaccaactggtgctgtgaggatatcatttggctatatgtctacatatgaagatgcagaggaatttctgaagttcctacggtcatcttttgtgtccaaacctgtaggattgaacaatgaatacatggtgaatatggatactcttaatttagtagatgattggagccaacaagctctttcagttattcgcttgaaatccataactatctatcctgtaaaatcttgccaaggatttagtgtgcagagctggccactgacaactggtggtttaaaatatgacagagaatggcttctccaaggattaggtggtgaaattttgacgcaaaaaaaggtaacggttttatgttctgaacgttagatgtttgacatcactttctctaccctgttttttttttctcgaacaacgcaggagatctgcatgtcatttcaattaaggagagaaaaacaagaggtctggcaaggccagaccgattacaaaaggaacacaacaaaacccacaaggccacaactcagacgagggtcctcaaccacgaccaacaaaaagaacaccctaaagaaaaactcaaactaaaccatctagcgacccaaccaggaactcctgtagctttgaagctccagccatgcaccacattttgcattcctccacaatcttccttagaagatcagatatacacggtcttccattataaaaaacacagctatttcggtgcttccaaattttccaggcagcaaggatgatcagagagttcagccccctatgccttccctttggcgtcaaacgaaccacctttctccaccactcagggaaagaataatcatccagagtgggagatagacctggaatgtggagtgcctggaacatatgaaaccatagctgtctagaaaaactgcaaccaactagaatgtgaatgtgattaatggtctcatctgcttgatcacaaagggggcaaacctcagggtggggtaaccctcttttggccagcctatcggctgtccaacgacacttcttgaacaccagccatataaagaacttgcaacgaagtggtgcccaactcttcgaaattttcttccatggagaaaaacggatggatccaacaaagaaagctgcatatgcggacctgctagaatattcccctgaatctgaaagcttccatctaaaagtgtcaggaacctctggctataggataaccccttgcacttgatcctagacctggacataatcaatcagaactggaatggttaggccccttgaatatccatccaccacccacttgagattatttagagcttcagctacagttctttattgatcactcttcttgcaatattttggatcaggtagggggccaaatcagcaatggaattaccatttaaccatttgtctttccaaaacaggatccttttactatttccaagcactggagaagtggctgtatcaaaaaaaggtcgtagcattccgagggaccccaatttggaagccaacccaaggacggggccagtccaccttatgggcccgtaactaacggattttcagagcccagcctaatttctcca

SEQ ID NO: 58298 - DNA, 967 bp, Zea Mays
tttagagagtgaacatgcattgtttgactggactagaagcaactccgaagcaaattcttcagttgatgggcgtgaagggagttagcatatgtcatatcaagagccatcttcagatgtacagaagctccagctccagtagcagcagtacccataatcagtcctccagcctccagaagctgacatcgaccacggcgagcaacagcaagcgcgtgttcttgagccgtgaagatcatgcgtcacaggcagatggcagcactccagcttcagacgagaacatctatactaccatgctctgtggttgcagccactcaacaccataccaaatacgaccgtcgctagagggagtcttcagaggcttggaacaaacaagaatgcttgcaacaacagagaagtcgattagcaggccaagtcacactgagaagcagcacaccggatgcgacctcacgctgtcgatcggcctgtgggcggaggatgcgagcagcaacgacgtcgacggctcgagctccatcagcgaggagctgatgcctgctgctccggcagcgggcgctcgccgtgccgccgccgtgaaggaggagagcgaggcggcggctctaaacctggacctgaccatctcgtcgtcttattggctggccctgacgagtgacgacggcgcacgccgacgcacggccggctggcggcgctagctagctgtgcatgacgggcgtaggtacgcgcgcatctcatgcacagccgcagcagactgtgatcaggccatcagtacccgactgtatatgtgtgtatatgctagtgttaaattaacaggatctctaggagtagattattctattgagtaatttcgggttcttaatttctagaacaaaactgtattagattgttaccgtcattaggaagcacaggcgtgttggaggatgtaaatccgtccgccatcaggttcgttgatgaaggtcgatgcagcgaggttgtcaat

SEQ ID NO: 58299 - DNA, 3027 bp, Zea Mays
aacaccccaggtgtttatcgtctactcgactacgagcgtggacgttaacacgtgatagctgtgaatgtaaaggtcactaaattttaaccatcctcgtctatcacgattttgatatcgtgcatgtctccatctgtctaaatgttcctaatttattctgcaaaaattcagactttggtaattttcggaacatcgaatccagtatcgtttgggttgagcatcgacgtcttgcccaaactataatctttgaaatcagatctggttcctaaactttgtttcaaattctttcacgcttgccttgcacgtgtctctctgtagcctggcatcgtggcgcgtggctggtgctaaccggtgcctggacagcgcacaacctctcgcccacgtgaacattgtgtgacgtcgttcgattttgatccatcgacatctcatctaaaccttatctcatgtactatcgaacaggttcgtagtgattcgattcaattatacccggtcagaccctagttttggatttataattaagatttattccttcagtaaattatctgactttaaatcaaatcatgcgtagtctaaaattgtttggcagatatcttttgtttcgtcctgtttacatctcgcttagatttaaaccgcagaactaaatcatccgtgtatctttaattaaaaaaatatagaaaatcctctttatctccatgtcggccaacatgttgttagccttatccaatcaacatcctaccttgttccttatctactcttttccttggaacaaaaatcccatacgttgcctcctcccttgctgtgacgcacggctcctggaagcctctctccccaccgcatcttctatcttcggttccttgctctgcaccgcctcctgctcatccatatcccatggtgcccagccgagcagcccatggaggcttcctccccacgcccagccctctctactggtggccgccgctccaagtcctctcgtcgcctatggctgcctcctctgttcgatccgtggcgctatcgtgggttcgcgcccagctccttctcggcctccagctcgccaacagccctcttccatggatggcgattttctttcctgcagcaagaagccatgccgcagtcctctctctcagtttcctctcacggctatggacatcggttgttccttccctcccatggccgccccaactccttccatggacgccaatagtagcagcccctcgctgccggacatcctccggtagtcccgcaccatccgcacccgtatggtgtttgataaaatgtccaagtggagtgccgtgtcatggacaaccctattagcgtcatgggatgtttggtattttgcgcagcccatccacgacaccgtcgaccctcggagcgaaatccgtggaatctgagtgaagaagaaacagagcacgtccgtcacttactagctgctgggtgaaaggattgaatcggctatcatggtcgtttagtgccgatcgagtcaactttagtcatggtgagctcttaggctatcctcgctagttagcgtgtatggtggattgattaggatatgatcgatgattctgtctagtgataggtgtgatgatatattgtatgaaatatgcttggtgaatatatatgcattgatatgattgtgttaataaatcataaaggatagagttttgtttatggttaagttacttatacaaataacatgttaacacttgtttggacagcacatgataattataggagtaaaattgaatgtttgctgtttggactgtgtccagttttagtatgcaggtagttaagtgaagtaaactttgttttctgaagagatgttatatagaaaagttgtagataaccttttcatcttacttgtgttaaaatttcatggtcatatgtctagtagtttatgagttatgatttttctaagtccagtttctgaatctgtccaaattatgtacaggtttcgaaaattggactgtttggctaagctaaactgaaaatcagctcttagtaattatagaagaattgtaatacttttcttaagctttccaacaaattttggagcaccctttttggtggtctagaagtcaggttatggctgattggaacgtgatgtttgaagctgtcaaaaactggacagcaatgcttgtttgtattaactgacttcgatacacattgaatcaccctgaggtgtttataaatgaattgtagacaattctataagatttctaaaaagtctaagatcacccgatttggatgcctgaaactccagttatgaatttttgaagtaagtagtcgaattctgtccgaatctggacagaatttatgtttagttctgtttgaccttcttaagggtcgaatcatgttgtgcttgtaatacaaaagttataggggattccataagctttctagaaagtcttaattcactattttttggattaatatcctgtgagttatgaacaaaacaattgactgctgagtgctgtccagaaaatctgcatgtgttaaattgattgcttggaatcattcttgcttggctagataggattaattagttcttggttcttgattgacgaagtcttgaaatagctaacctaaagtgaacatgtgtcccatgtttaatgtgtttagttattgttacctaatgtttgggttaggtctgattacctcaaagttcatgattgtataaaatcagaagcatctagtgtttatgcatataagtgttttaaacctttaaattaagataaatactatactataaaattctatgcttcttaataatgagttgtttcttagtactaagagtggtgttaatcattcggtaggatattctagttcatgaggttggatttatgtgtagcctttttgatgcttgagttcatccgtttaaatgaaaaaaatgtaattgtgatacgtagtgatatgtcaacatatagtaattgtttttaaatattgcggtacatcaggatttgaatattgctaatgttacttgatgattggtttaggtccaattgactagaacgtcatgtctgatgtagagttaaa

SEQ ID NO: 58300 - DNA, 1919 bp, Zea Mays
aacaccccaggtgtttatcgtctactcgactacgagcgtggacgttaacacgtgatagctgtgaatgtaaaggtcactaaattttaaccatcctcgtctatcacgattttgatatcgtgcatgtctccatctgtctaaatgttcctaatttattctgcaaaaattcagactttggtaattttcggaacatcgaatccagtatcgtttgggttgagcatcgacgtcttgcccaaactataatctttgaaatcagatctggttcctaaactttgtttcaaattctttcacgcttgccttgcacgtgtctctctgtagcctggcatcgtggcgcgtggctggtgctaaccggtgcctggacagcgcacaacctctcgcccacgtgaacattgtgtgacgtcgttcgattttgatccatcgacatctcatctaaaccttatctcatgtactatcgaacaggttcgtagtgattcgattcaattatacccggtcagaccctagttttggatttataattaagatttattccttcagtaaattatctgactttaaatcaaatcatgcgtagtctaaaattgtttggcagatatcttttgtttcgtcctgtttacatctcgcttagatttaaaccgcagaactaaatcatccgtgtatctttaattaaaaaaatatagaaaatcctctttatctccatgtcggccaacatgttgttagccttatccaatcaacatcctaccttgttccttatctactcttttccttggaacaaaaatcccatacgttgcctcctcccttgctgtgacgcacggctcctggaagcctctctccccaccgcatcttctatcttcggttccttgctctgcaccgcctcctgctcatccatatcccatggtgcccagccgagcagcccatggaggcttcctccccacgcccagccctctctactggtggccgccgctccaagtcctctcgtcgcctatggctgcctcctctgttcgatccgtggcgctatcgtgggttcgcgcccagctccttctcggcctccagctcgccaacagccctcttccatggatggcgattttctttcctgcagcaagaagccatgccgcagtcctctctctcagtttcctctcacggctatggacatcggttgttccttccctcccatggccgccccaactccttccatggacgccaatagtagcagcccctcgctgccggacatcctccggtagtcccgcaccatccgcacccgtatggtgtttgataaaatgtccaagtggagtgccgtgtcatggacaaccctattagcgtcatgggatgtttggtattttgcgcagcccatccacgacaccgtcgaccctcggtgaggtttcattcttgctttgccgtttcatcgatcgacgtatatttgctaacataaattgtgtttatgtgcctatgtgtgttgaggagcgaaatccgtggaatctgagtgaagaagaaacagagcacgtccgtcacttactagctgctgggtgaaaggattgaatcggctatcatggtcgtttagtgccgatcgagtcaactttagtcatggacaagagctggattaatcacaagacgatgttgatggacgaagctaaagtggatgaatcaaccaagtgccaggatgggagatactcaccaagtgatcgtcatttaacaacactaacatagtgttatcccaggcaagccccggtgcatttgccacctccttctgttttaaaaacttttatcacttacctgctgcattaggtgataggagttgtgtgaataaacaattgatgcattaccattccttggaatttgattatcctccttgctacctgttttataaagagaactaatgaggcttagccctgcctagagaactaaaacttgattctttttaaaagaatgat

SEQ ID NO: 58301 - DNA, 5331 bp, Zea Mays
ctttaattaaaaaaatatagaaaatcctctttatctccatgtcggccaacatgttgttagccttatccaatcaacatcctaccttgttccttatctactcttttccttggaacaaaaatcccatacgttgcctcctcccttgctgtgacgcacggctcctggaagcctctctccccaccgcatcttctatcttcggttccttgctctgcaccgcctcctgctcatccatatcccatggtgcccagccgagcagcccatggaggcttcctccccacgcccagccctctctactggtggccgccgctccaagtcctctcgtcgcctatggctgcctcctctgttcgatccgtggcgctatcgtgggttcgcgcccagctccttctcggcctccagctcgccaacagccctcttccatggatggcgattttctttcctgcagcaagaagccatgccgcagtcctctctctcagtttcctctcacggctatggacatcggttgttccttccctcccatggccgccccaactccttccatggacgccaatagtagcagcccctcgctgccggacatcctccggtagtcccgcaccatccgcacccgtatggtgtttgataaaatgtccaagtggagtgccgtgtcatggacaaccctattagcgtcatgggatgtttggtattttgcgcagcccatccacgacaccgtcgaccctcggagcgaaatccgtggaatctgagtgaagaagaaacagagcacgtccgtcacttactagctgctgggtgaaaggattgaatcggctatcatggtcgtttagtgccgatcgagtcaactttagtcatggtacgttaattaatcacgtgatgtgaaggacaagagctggattaatcacaagacgatgttgatggacgaagctaaagtggatgaatcaaccaagtgccaggatgggagatactcaccaagtgatcgtcatttaacaacactaacatagtgttatcccaggttataattttattctgttgtggatgctgctaagtgccggtgggctcggccttcttctataagtatatcccgtctttagtttctctattgaggattatcacttaagctagcatgtattttaaaacttataaatattttatacattttaaattgtaattctttttaatcattttcttttgtaatcactccgataattgtataatgtaaaattattgtaacatgtaatcattttgcaataaagaatttatttccgctgcaaatgttggtgtgtgatttgtgtttacttaatcctgcgatcttggcggtaagtcgtttatccggggtcctcggggcactcggacagatcctgttaagttgtttggtgcacatgcatagccgtctgatgtctttgagacaaggacaggtgcatgtgggcccgataacttgggaggttctgcgacagctggtatcggagcttgattaagtatgatacggtcacatacgtattttcaaaacaaaattttggttttggaaaacctattttcaactaaacacattgtttggttttgaaaaacatattaaaaaaaactataatgctagcgacatcctctattaagccctaaagttaaggactactaggtggcttggttcagaatactgacccacaacctgggaagggtaatgcatacatgtgtattgttatttttgaggccattcagttttgaatggatcgacgctcaaggtaaggtgagatgtgagagcatgaccgaacaaacgtcggtctagggaagagcataaaaagcgcttgattatatacatgttttacatatgtatatatgaaggctgcgatgtggagtaattactttttcgggattcagtaccccatggatgtgtatgggtatacagacatgggaatactgagaagtgtaatgtatttgcaacaacgcacctacgctcaggtaagaaggtgagttaccataatgagctgccctatggttaaagtgtggcagcggcgcctatgtgtggctcggcgcttaatgaggagctggcctccatatagcaatatatggagtataaactgtgataaactgtcatgtgtgaattgcatcattgggaattgggctgtgatggaattttctgcaggtacactaacttcgaactcgtatgtgtagctgacgactagcaatataccgagagagacgtagatatgccaccgatatagaacgctattgccacgttatgttggcaaaattggtgaggccgaataggacgaacatgcatcctgattgctgcattgtgtttgttgtttgcgcatagagatgcttccctcacctttattctaataataggtgatggtgaacgaacatgcttttctcatctttattctgataataaataattggaaaatgtgtgaagcatgattgtcctataagcaaatttctagctttgtttgttgtgtcctttagacatgtatttatgaggcctgtggttcttagtcaattgaccgctagtgcaacttgggttttttttcgtgcttgtgtgctggtagaatgtaggtagtttgtttacataaacccaaagctaggtaatgtcctcgtttagtgaaccataacccaaatcgtcctcaatcctccaaaaattcctccaagtctccaagcagggatgagttcgagtttttctttactactccaggaccgcttagataagctttttattggatgtaaaatgcacgcaaacttaaaataaggatctcgagtacatgttctcgtcgtttcatatgtgactcttttgtagtcatttttccatccaaaatcatgcctttactcgcttggtgcaagctgatgtttctattccactctgtatcatcttggagaccatgtcgttattttatcaacctaacctaggaaagccatgtccaatcattttcttgaactggatgcctttggttttctcatatctttcgaaggcataccaacttaatcttatgattgttttccctccgtatctaatcaaatactaatccttaatcttataatctttgcgataggcatagaaatatgcttggggctaaaataacagtcttccatcgtactcctttcatcaaatttaggttatggccatgtcttattcgtatcattggccatgatctatttgactctctactcataattattctgacaggtagagtctctttgtatattgtcacccttgctcaatccatttgtctcgcgcgagatgtcttattggttacgtctggtaatggtgttatgactaaaaccgatggtgccgcgatgaaaccgagggcctcctgtgaatgtacacacatggttgtgctgctcggcacgcgctggtatcacggtgagtagttgtaatccattatgaggctatatcaatgtgttatcttggcacaatctagttttgtcatgcggaattcattattggtgttgttcggtaatggtgtcacgattaatgatttgtggtgccgccgcgaaactgagagccccttgtgaaagtacacgcaaggttatgctgcttggcgcatgctggtatcgaggtctttggtcatgatccattgtggaactacattgatgtgtgatcttccgtggactcctcccttgaaacgaattttgtgtcgtttgctgaaacaatccaacaacatatgccatcactattgaatcaaaagagtatataactctgatatattccttggtaaattttctacccatttagaaatctccaacaaaaatcaaaacctatatgtgtttggatcatgtgataaaaatccatcttcccatgtgtggtcgcatgtcttttgactcaagtggtgactgcacacatacaagttccctttgcatcctttattttaaaggtgaagccttgaagctttttaatgttggaagacaactattagttctcaagatggagaattgttttctttcctactgagttgcaggagtttattcattttctctcttatccaatacatgtgttccctaaccaagtcattccatctcagatgaagaaatggatgaacaacctgactgaatggatctttatctaaatacatggcctcctgctagcaaacgtgaactctcgaccattagattgccgatgggtaataagaggacttgctcaatgtcaaaagtagttcaacaagttggttttactaacttgtaactacccaatgaacaaaggttgagtttagagatcgtttatcgagttgtctaaactcactttagttcagcctatcttgaagagacccttgtgaagatcaagtgaaggttatgaacatatgcgcagatcttatgccatattggattatattatgagcatatgtatcttaactttatcttgttggccgaggcactttgccatcctcagctgactgataacatcctgaccacagttctagtcgtgcctcaatcgcctcacatgtgattttctaacatgtgtgatcaagccgagccgtgcttagtgcttgataaaatggattggacacgaggtcaacatctacagatcccttcattccttgaatctctatcatttttcttggacttggattccctggctaaccacgagttaattgtgatgttattcgacatccatcctcgtcttatgtgctaggaattgctatccatttgtccaccgttctcaacagactcagatagtacagtgttattagaaaaaaaaacaaactgcacacatgtagccttatgtgttcttctagctgatgtcgtctctattgatggacatccctaattagcttaaaatgatacatgctatacccacttgaggaaccaacatcttggagtactcatctctactcggaactgtcttatgctatcactattatggacagggttacacgcctctctactcttagaagtctttcgttctgaatctcgggacgagattcttttaaggggggaaggctgtaacaccccaggtgtttatcgtctactcgactacgagcgtggacgttaacacgtgatagctgtgaatgtaaaggtcactaaattttaaccatcctcgtctatcacgattttgatatcgtgcatgtctccatctgtctaaatgttcctaatttattctgcaaaaattcagactttggtaattttcggaacatcgaatccagtatcgtttgggttgagcatcgacgtcttgcccaaactataatctttgaaatcagatctggttcctaaactttgtttcaaattctttcacgcttgccttgcacgtgtctctctgtagcctggcatcgtggcgcgtggctggtgctaaccggtgcctggacagcgcacaacctctcgcccacgtgaacattgtgtgacgtcgttcgatttgatccatcgacc

SEQ ID NO: 58302 - DNA, 1071 bp, Zea Mays
cccttgctgtgacgcacggctcctggaagcctctctccccaccgcatcttctatcttcggttccttgctctgcaccgcctcctgctcatccatatcccatggtgcccagccgagcagcccatggaggcttcctccccacgcccagccctctctactggtggccgccgctccaagtcctctcgtcgcctatggctgcctcctctgttcgatccgtggcgctatcgtgggttcgcgcccagctccttctcggcctccagctcgccaacagccctcttccatggatggcgattttctttcctgcagcaagaagccatgccgcagtcctctctctcagtttcctctcacggctatggacatcggttgttccttccctcccatggccgccccaactccttccatggacgccaatagtagcagcccctcgctgccggacatcctccggtagtcccgcaccatccgcacccgtatggtgtttgataaaatgtccaagtggagtgccgtgtcatggacaaccctattagcgtcatgggatgtttggtattttgcgcagcccatccacgacaccgtcgaccctcgcgaaatccgtggaatctgagtgaagaagaaacagagcacgtccgtcacttactagctgctgggtgaaaggattgaatcggctatcatggtcgtttagtgccgatcgagtcaactttagtcatggtacgttaattaatcacgtgatgtgaaggacaagagctggattaatcacaagacgatgttgatggacgaagctaaagtggatgaatcaaccaagtgccaggatgggagatactcaccaagtgatcgtcatttaacaacactaacatagtgttatcccaggcaagccccggtgcatttgccacctccttctgttttaaaaacttttatcacttacctgctgcattaggtgataggagttgtgtgaataaacaattgatgcattaccattccttggaatttgattatcctccttgctacctgttttataaagagaactaatgaggcttagccctgcctagagaactaaaacttgattctttttaaaagaatgat

SEQ ID NO: 58303 - DNA, 4815 bp, Zea Mays
aatggctggacggtggagtgctgtgctcttgggtcgcgtgaacccgttctggtcttgagaaacctgtgggcgagttgacatatgcaagggttaagtgctacatatgtcgtgtggttggagatcctcagctgagtattaatcgattcggatcgccgaacttctcggatatgaagactggatcactgccctgcatcgtagataacaagtgaaactaaagatgctaaaataaagttagtgtaggacaagtgaatgctctagattaggaaaatctagattcaggtaaagtacttaacctgtgaagtaaaattttagcataaggatccactactagtaagctcttctgcaaaatgagtctttgaaatttgataagctttaccttgattcccaataaaccagcatacccttgagagtcttttctttagtcgggtaagtcttgctgagtaattgcgtactcagggttttattccctgttgtttttcaggttataattttattctgttgtggatgctgctaagtgccggtgggctcggccttcttctataagtatatcccgtctttagtttctctattgaggattatcacttaagctagcatgtattttaaaacttataaatattttatacattttaaattgtaattctttttaatcattttcttttgtaatcactccgataattgtataatgtaaaattattgtaacatgtaatcattttgcaataaagaatttatttccgctgcaaatgttggtgtgtgatttgtgtttacttaatcctgcgatcttggcggtaagtcgtttatccggggtcctcggggcactcggacagatcctgttaagttgtttggtgcacatgcatagccgtctgatgtctttgagacaaggacaggtgcatgtgggcccgataacttgggaggttctgcgacagctggtatcggagcttgattaagtatgatacggtcacatacgtattttcaaaacaaaattttggttttggaaaacctattttcaactaaacacattgtttggttttgaaaaacatattaaaaaaaactataatgctagcgacatcctctattaagccctaaagttaaggactactaggtggcttggttcagaatactgacccacaacctgggaagggtaatgcatacatgtgtattgttatttttgaggccattcagttttgaatggatcgacgctcaaggtaaggtgagatgtgagagcatgaccgaacaaacgtcggtctagggaagagcataaaaagcgcttgattatatacatgttttacatatgtatatatgaaggctgcgatgtggagtaattactttttcgggattcagtaccccatggatgtgtatgggtatacagacatgggaatactgagaagtgtaatgtatttgcaacaacgcacctacgctcaggtaagaaggtgagttaccataatgagctgccctatggttaaagtgtggcagcggcgcctatgtgtggctcggcgcttaatgaggagctggcctccatatagcaatatatggagtataaactgtgataaactgtcatgtgtgaattgcatcattgggaattgggctgtgatggaattttctgcaggtacactaacttcgaactcgtatgtgtagctgacgactagcaatataccgagagagacgtagatatgccaccgatatagaacgctattgccacgttatgttggcaaaattggtgaggccgaataggacgaacatgcatcctgattgctgcattgtgtttgttgtttgcgcatagagatgcttccctcacctttattctaataataggtgatggtgaacgaacatgcttttctcatctttattctgataataaataattggaaaatgtgtgaagcatgattgtcctataagcaaatttctagctttgtttgttgtgtcctttagacatgtatttatgaggcctgtggttcttagtcaattgaccgctagtgcaacttgggttttttttcgtgcttgtgtgctggtagaatgtaggtagtttgtttacataaacccaaagctaggtaatgtcctcgtttagtgaaccataacccaaatcgtcctcaatcctccaaaaattcctccaagtctccaagcagggatgagttcgagtttttctttactactccaggaccgcttagataagctttttattggatgtaaaatgcacgcaaacttaaaataaggatctcgagtacatgttctcgtcgtttcatatgtgactcttttgtagtcatttttccatccaaaatcatgcctttactcgcttggtgcaagctgatgtttctattccactctgtatcatcttggagaccatgtcgttattttatcaacctaacctaggaaagccatgtccaatcattttcttgaactggatgcctttggttttctcatatctttcgaaggcataccaacttaatcttatgattgttttccctccgtatctaatcaaatactaatccttaatcttataatctttgcgataggcatagaaatatgcttggggctaaaataacagtcttccatcgtactcctttcatcaaatttaggttatggccatgtcttattcgtatcattggccatgatctatttgactctctactcataattattctgacaggtagagtctctttgtatattgtcacccttgctcaatccatttgtctcgcgcgagatgtcttattggttacgtctggtaatggtgttatgactaaaaccgatggtgccgcgatgaaaccgagggcctcctgtgaatgtacacacatggttgtgctgctcggcacgcgctggtatcacggtgagtagttgtaatccattatgaggctatatcaatgtgttatcttggcacaatctagttttgtcatgcggaattcattattggtgttgttcggtaatggtgtcacgattaatgatttgtggtgccgccgcgaaactgagagccccttgtgaaagtacacgcaaggttatgctgcttggcgcatgctggtatcgaggtctttggtcatgatccattgtggaactacattgatgtgtgatcttccgtggactcctcccttgaaacgaattttgtgtcgtttgctgaaacaatccaacaacatatgccatcactattgaatcaaaagagtatataactctgatatattccttggtaaattttctacccatttagaaatctccaacaaaaatcaaaacctatatgtgtttggatcatgtgataaaaatccatcttcccatgtgtggtcgcatgtcttttgactcaagtggtgactgcacacatacaagttccctttgcatcctttattttaaaggtgaagccttgaagctttttaatgttggaagacaactattagttctcaagatggagaattgttttctttcctactgagttgcaggagtttattcattttctctcttatccaatacatgtgttccctaaccaagtcattccatctcagatgaagaaatggatgaacaacctgactgaatggatctttatctaaatacatggcctcctgctagcaaacgtgaactctcgaccattagattgccgatgggtaataagaggacttgctcaatgtcaaaagtagttcaacaagttggttttactaacttgtaactacccaatgaacaaaggttgagtttagagatcgtttatcgagttgtctaaactcactttagttcagcctatcttgaagagacccttgtgaagatcaagtgaaggttatgaacatatgcgcagatcttatgccatattggattatattatgagcatatgtatcttaactttatcttgttggccgaggcactttgccatcctcagctgactgataacatcctgaccacagttctagtcgtgcctcaatcgcctcacatgtgattttctaacatgtgtgatcaagccgagccgtgcttagtgcttgataaaatggattggacacgaggtcaacatctacagatcccttcattccttgaatctctatcatttttcttggacttggattccctggctaaccacgagttaattgtgatgttattcgacatccatcctcgtcttatgtgctaggaattgctatccatttgtccaccgttctcaacagactcagatagtacagtgttattagaaaaaaaaacaaactgcacacatgtagccttatgtgttcttctagctgatgtcgtctctattgatggacatccctaattagcttaaaatgatacatgctatacccacttgaggaaccaacatcttggagtactcatctctactcggaactgtcttatgctatcactattatggacagggttacacgcctctctactcttagaagtctttcgttctgaatctcgggacgagattcttttaaggggggaaggctgtaacaccccaggtgtttatcgtctactcgactacgagcgtggacgttaacacgtgatagctgtgaatgtaaaggtcactaaattttaaccatcctcgtctatcacgattttgatatcgtgcatgtctccatctgtctaaatgttcctaatttattctgcaaaaattcagactttggtaattttcggaacatcgaatccagtatcgtttgggttgagcatcgacgtcttgcccaaactataatctttgaaatcagatctggttcctaaactttgtttcaaattctttcacgcttgccttgcacgtgtctctctgtagcctggcatcgtggcgcgtggctggtgctaaccggtgcctggacagcgcacaacctctcgcccacgtgaacattgtgtgacgtcgttcgatttgatccatcgacc

SEQ ID NO: 58304 - DNA, 388 bp, Zea Mays
aaacaacttaacaggatctgtccgagtgccccgaggaccccggataaacgacttaccgccaagatcgcaggattaagtaaacacaaatcacacaccaacatttgcagcggaaataaattctttattgcaaaatgattacatgttacaataattttacattatacaattatcggagtgattacaaaagaaaatgattaaaaagaattacaatttaaaatgtataaaatatttataagttttaaaatacatgctagcttaagtgacaatcctcaatagagaaactaaagacgggatatacttatagaagaaggccgagcccaccggcacttagcagcatccacaacagaataaaattataacctgaaaaacaacagggaataaaaccctg

SEQ ID NO: 58305 - DNA, 1040 bp, Zea Mays
ctcattcaaatggaacgagatggattcttatctgacattcttctcaatggacatgatggtggagttactggtatgcaagacttgaacattccgagcacacaagacattaattatgaagttgaacaagctgatgtggaagtgatgccaagtcgtggtacaaagggatcgaagaggacaaaaaattttaattccacagaagatgaagttgtatgctcaggttggttgaacattagcaaagatcccattcacggggccaatcaatctcgtcccacattttggagtagagttcatgcattctttgaggaacacatgcaggaacacattaaagataaagttccgaggacacagagttctgttatgcataggtggctgacaattcagacacaagtgaacaagttttgttcttgctatgatgcgattttgcgcaggaatcaaagtgggtcaactatccatgacaaggatgaagacaagtggaaagccaagaggcttgaacttgccgagctggaaaaacaaccaaacaagaaaaaacagaagtccaccaagatgtctaggccaagggatgatgaagccaccaacaatgaagaagttccagaggatgttgctccacaaactgaatcaaaaaaaggccacaggggataaagaaggcaaaagaagctctcaggcgaggaggtggcgaagcttgcatggaggctctggacaatatgtgggcaaagaaggaggctttcgacaaggagatcgaaaaagcaaaagaggagaggttcaacattgcactagaactagagaagaagcgagtgtcagctgaggaaaaaaaagctgaagcaaaactgattaaagtgtcagctgaggataaaaaagctgaagcggaattgattaaagaggaaaaagagataatgtcaatcgacatgacttccctcagcccgctgcagcgccagtactacgagacaatgcaggagaagattgttgctaggcgtttggcaaattaatttagttctagtcatttcagttgtggaactattaagcttcagtttatttgtttagtt

SEQ ID NO: 58306 - DNA, 2001 bp, Zea Mays
gccgtcttcatctccccgccgacggaagcctgctcccagcaagccccagccgcgtctcgtctccctctcccttgtctccctcacacacgtttctctctccctcctcttcttccttgctgcgctccacctcgccccaggtgctcggccgctcatctccctgctgccgcgtccctgcgcccggccttcgtccccgtcgcgccgatccgcgctcgcccaggtcgcccgccgtcgcccagctcggtgccttccctgctcctccaagccggcgtcctctgccctcatcttcttcctcaggtccgaccggtgccctcattcccctggctggcgctcggcttcctcctcctgaagtccctccacgcgccgaatttcgagctccattcatgccggccgaggtccttcccatggcgcccctccctgctcccgtgcacgtgcccccctggtggtcggagctcgccaacgccagttgttcctccacacacacctcctgctcccctcgccatggcatggatgaccgctgtatctgctcctgtcgtgctcaagtcgtcacaggttggtgggttgtgcgcgcctagcggtaagttatctgctcctgtcggtaattttgcatcattaattattctgttaaggatctgaatttaggctagagtatcaggttcattttgtgggcatgtgatcaaatgcctactgtgctgacatatgctagtctggccccataattaatataccattacttttttgaatgctaattaggaccgcagcaggtctaatctggccccataattaatataccattactcaggaaatattttggagtaaatgcagagctaacttgaaatggttgttataacttaaaaattatataaatggtgaattgaacattattatgtgttctacagtagtctaatctgctgatgtgtcaatcaagcttattgtattaagttgtatatttactatctagctcattattctgctgttgttacatattgatatattgtttgttacatgcggagtttgaaggagtttaaaacacaagcaaccacattggcatcgcttcagcatcccaatttatgtaaactgatcggctattatgcaaaagaagattctaatgaaaggatgttggtctatgaacggctttatcatggaagcttagataagctactctttggaagatcagatggtcatttcatggactggtctaaacgtttgaaggttgccctgggtgctgccagaggtctagctttcttgcatgatgaaggaccctttcaggccatgtacaacgagttctcaactttgaacatccaaatagataaaggtttcactgctaagctttcaggatatggttgtgttggcttcaataccgaggagatatctaatgcacctgtgcaaaccattcggtggagaccttggagaagggtttactcactcagtttgtctattgctgcaacaagtcggggctggaccgttccaaagtaaatgtaaatggaggcacgattgcccttggacaccctttgggtgcaacaggtgcccggtgcgtggctactcttctaaatgaaatgaagtgccggggcagagactgcagatttggtgttgtcaccatgtgtatcggatctggaatgggggcagcagctgtgttcgagctatgttcggcccggctggaggtatcgaccatcactcgtcactgtaacccgatggtgatcgacgaccgtgagcttccatgttattgcgttctgatacttgagacttttattataactatgtatgagatattgtctcttattagtactggatgatgagatgtgtcttattatgactatggatgagacttttgtgatgtaattgatgagactatggatgagacttttgtgatgtaattgatgagactatgaatttaaatattgttatgtgattgtgtgtgagatgtgttatgtgaaaatatgttgtgttatatagctgttgatatatttgttatgttgtggaatgtggtgtaaaataaaaataaaa

SEQ ID NO: 58307 - DNA, 2242 bp, Zea Mays
gccgtcttcatctccccgccgacggaagcctgctcccagcaagccccagccgcgtctcgtctccctctcccttgtctccctcacacacgtttctctctccctcctcttcttccttgctgcgctccacctcgccccaggtgctcggccgctcatctccctgctgccgcgtccctgcgcccggccttcgtccccgtcgcgccgatccgcgctcgcccaggtcgcccgccgtcgcccagctcggtgccttccctgctcctccaagccggcgtcctctgccctcatcttcttcctcaggtccgaccggtgccctcattcccctggctggcgctcggcttcctcctcctgaagtccctccacgcgccgaatttcgagctccattcatggcacgctccgttccttctcctcgacctccctctgccctcttccatggtcggcgcccccttcagctccagctcggcctccagctcccgtgccacgcgccgtggagctccctgcgcgcgccctggcccctgctcggatttagccgtgccgagtcccatcttccaattcaataccataaagaagctccgttctactgcacttgcagtttactgtgttttaggttggatcgaatcattgagttagccggccgaggtccttcccatggcgcccctccctgctcccgtgcacgtgcccccctggtggtcggagctcgccaacgccagttgttcctccacacacacctcctgctcccctcgccatggcatggatgaccgctgtatctgctcctgtcgtgctcaagtcgtcacaggttggtgggttgtgcgcgcctagcggtaagttatctgctcctgtcggtaattttgcatcattaattattctgttaaggatctgaatttaggctagagtatcaggttcattttgtgggcatgtgatcaaatgcctactgtgctgacatatgctagtctggccccataattaatataccattacttttttgaatgctaattaggaccgcagcaggtctaatctggccccataattaatataccattactcaggaaatattttggagtaaatgcagagctaacttgaaatggttgttataacttaaaaattatataaatggtgaattgaacattattatgtgttctacagtagtctaatctgctgatgtgtcaatcaagcttattgtattaagttgtatatttactatctagctcattattctgctgttgttacatattgatatattgtttgttacatgcggagtttgaaggagtttaaaacacaagcaaccacattggcatcgcttcagcatcccaatttatgtaaactgatcggctattatgcaaaagaagattctaatgaaaggatgttggtctatgaacggctttatcatggaagcttagataagctactctttggaagatcagatggtcatttcatggactggtctaaacgtttgaaggttgccctgggtgctgccagaggtctagctttcttgcatgatgaaggaccctttcaggccatgtacaacgagttctcaactttgaacatccaaatagataaaggtttcactgctaagctttcaggatatggttgtgttggcttcaataccgaggagatatctaatgcacctgtgcaaaccattcggtggagaccttggagaagggtttactcactcagtttgtctattgctgcaacaagtcggggctggaccgttccaaagtaaatgtaaatggaggcacgattgcccttggacaccctttgggtgcaacaggtgcccggtgcgtggctactcttctaaatgaaatgaagtgccggggcagagactgcagatttggtgttgtcaccatgtgtatcggatctggaatgggggcagcagctgtgttcgagctatgttcggcccggctggaggtatcgaccatcactcgtcactgtaacccgatggtgatcgacgaccgtgagcttccatgttattgcgttctgatacttgagacttttattataactatgtatgagatattgtctcttattagtactggatgatgagatgtgtcttattatgactatggatgagacttttgtgatgtaattgatgagactatggatgagacttttgtgatgtaattgatgagactatgaatttaaatattgttatgtgattgtgtgtgagatgtgttatgtgaaaatatgttgtgttatatagctgttgatatatttgttatgttgtggaatgtggtgtaaaataaaaataaaa

SEQ ID NO: 58308 - DNA, 2218 bp, Zea Mays
gccgtcttcatctccccgccgacggaagcctgctcccagcaagccccagccgcgtctcgtctccctctcccttgtctccctcacacacgtttctctctccctcctcttcttccttgctgcgctccacctcgccccaggtgctcggccgctcatctccctgctgccgcgtccctgcgcccggccttcgtccccgtcgcgccgatccgcgctcgcccaggtcgcccgccgtcgcccagctcggtgccttccctgctcctccaagccggcgtcctctgccctcatcttcttcctcaggtccgaccggtgccctcattcccctggctggcgctcggcttcctcctcctgaagtccctccacgcgccgaatttcgagctccattcatggcacgctccgttccttctcctcgacctccctctgccctcttccatggtcggcgcccccttcagctccagctcggcctccagctcccgtgccacgcgccgtggagctccctgcgcgcgccctggcccctgctcggatttagccgtgccgagtcccatcttccaattcaataccataaagaagctccgttctactgcacttgcagtttactgtgttttaggttggatcgaatcattgagttaggtttgctgttcagttttaccacctactcctacctgtaacactttaattttacaactacgcggctgccttcattagaaatttaaatttagaactttaaatgtgttcctctgttaattgaccatcatatgttcaaattgccatctccatcttcttttggcatgccaacccccacctttaccaacaatatacatgcccagaattctgcatgtttttttcttaattaaagtaggtgtgatttcctcttaaatttttggttggacagtgacagtcagaaccctgtgaagtctattcccttgctatccattgtagtcactgatgatccacatcctcgtgggtgtgttttattcagtttctctccttgatcaatatcttttggtcaaacttgtgtgttttatttagtttctctctactcctcccagccggccgaggtccttcccatggcgcccctccctgctcccgtgcacgtgcccccctggtggtcggagctcgccaacgccagttgttcctccacacacacctcctgctcccctcgccatggcatggatgaccgctgtatctgctcctgtcgtgctcaagtcgtcacaggttggtgggttgtgcgcgcctagcggagtttaaaacacaagcaaccacattggcatcgcttcagcatcccaatttatgtaaactgatcggctattatgcaaaagaagattctaatgaaaggatgttggtctatgaacggctttatcatggaagcttagataagctactctttggaagatcagatggtcatttcatggactggtctaaacgtttgaaggttgccctgggtgctgccagaggtctagctttcttgcatgatgaaggaccctttcaggccatgtacaacgagttctcaactttgaacatccaaatagataaaggtttcactgctaagctttcaggatatggttgtgttggcttcaataccgaggagatatctaatgcacctgtgcaaaccattcggtggagaccttggagaagggtttactcactcagtttgtctattgctgcaacaagtcggggctggaccgttccaaagtaaatgtaaatggaggcacgattgcccttggacaccctttgggtgcaacaggtgcccggtgcgtggctactcttctaaatgaaatgaagtgccggggcagagactgcagatttggtgttgtcaccatgtgtatcggatctggaatgggggcagcagctgtgttcgagctatgttcggcccggctggaggtatcgaccatcactcgtcactgtaacccgatggtgatcgacgaccgtgagcttccatgttattgcgttctgatacttgagacttttattataactatgtatgagatattgtctcttattagtactggatgatgagatgtgtcttattatgactatggatgagacttttgtgatgtaattgatgagactatggatgagacttttgtgatgtaattgatgagactatgaatttaaatattgttatgtgattgtgtgtgagatgtgttatgtgaaaatatgttgtgttatatagctgttgatatatttgttatgttgtggaatgtggtgtaaaataaaaataaaa

SEQ ID NO: 58309 - DNA, 1912 bp, Zea Mays
gccgtcttcatctccccgccgacggaagcctgctcccagcaagccccagccgcgtctcgtctccctctcccttgtctccctcacacacgtttctctctccctcctcttcttccttgctgcgctccacctcgccccaggtgctcggccgctcatctccctgctgccgcgtccctgcgcccggccttcgtccccgtcgcgccgatccgcgctcgcccaggtcgcccgccgtcgcccagctcggtgccttccctgctcctccaagccggcgtcctctgccctcatcttcttcctcagccggccgaggtccttcccatggcgcccctccctgctcccgtgcacgtgcccccctggtggtcggagctcgccaacgccagttgttcctccacacacacctcctgctcccctcgccatggcatggatgaccgctgtatctgctcctgtcgtgctcaagtcgtcacaggttggtgggttgtgcgcgcctagcggtaagttatctgctcctgtcggtaattttgcatcattaattattctgttaaggatctgaatttaggctagagtatcaggttcattttgtgggcatgtgatcaaatgcctactgtgctgacatatgctagtctggccccataattaatataccattacttttttgaatgctaattaggaccgcagcaggtctaatctggccccataattaatataccattactcaggaaatattttggagtaaatgcagagctaacttgaaatggttgttataacttaaaaattatataaatggtgaattgaacattattatgtgttctacagtagtctaatctgctgatgtgtcaatcaagcttattgtattaagttgtatatttactatctagctcattattctgctgttgttacatattgatatattgtttgttacatgcggagtttgaaggagtttaaaacacaagcaaccacattggcatcgcttcagcatcccaatttatgtaaactgatcggctattatgcaaaagaagattctaatgaaaggatgttggtctatgaacggctttatcatggaagcttagataagctactctttggaagatcagatggtcatttcatggactggtctaaacgtttgaaggttgccctgggtgctgccagaggtctagctttcttgcatgatgaaggaccctttcaggccatgtacaacgagttctcaactttgaacatccaaatagataaaggtttcactgctaagctttcaggatatggttgtgttggcttcaataccgaggagatatctaatgcacctgtgcaaaccattcggtggagaccttggagaagggtttactcactcagtttgtctattgctgcaacaagtcggggctggaccgttccaaagtaaatgtaaatggaggcacgattgcccttggacaccctttgggtgcaacaggtgcccggtgcgtggctactcttctaaatgaaatgaagtgccggggcagagactgcagatttggtgttgtcaccatgtgtatcggatctggaatgggggcagcagctgtgttcgagctatgttcggcccggctggaggtatcgaccatcactcgtcactgtaacccgatggtgatcgacgaccgtgagcttccatgttattgcgttctgatacttgagacttttattataactatgtatgagatattgtctcttattagtactggatgatgagatgtgtcttattatgactatggatgagacttttgtgatgtaattgatgagactatggatgagacttttgtgatgtaattgatgagactatgaatttaaatattgttatgtgattgtgtgtgagatgtgttatgtgaaaatatgttgtgttatatagctgttgatatatttgttatgttgtggaatgtggtgtaaaataaaaataaaa

SEQ ID NO: 58310 - DNA, 1835 bp, Zea Mays
gccgtcttcatctccccgccgacggaagcctgctcccagcaagccccagccgcgtctcgtctccctctcccttgtctccctcacacacgtttctctctccctcctcttcttccttgctgcgctccacctcgccccaggtgctcggccgctcatctccctgctgccgcgtccctgcgcccggccttcgtccccgtcgcgccgatccgcgctcgcccagccggccgaggtccttcccatggcgcccctccctgctcccgtgcacgtgcccccctggtggtcggagctcgccaacgccagttgttcctccacacacacctcctgctcccctcgccatggcatggatgaccgctgtatctgctcctgtcgtgctcaagtcgtcacaggttggtgggttgtgcgcgcctagcggtaagttatctgctcctgtcggtaattttgcatcattaattattctgttaaggatctgaatttaggctagagtatcaggttcattttgtgggcatgtgatcaaatgcctactgtgctgacatatgctagtctggccccataattaatataccattacttttttgaatgctaattaggaccgcagcaggtctaatctggccccataattaatataccattactcaggaaatattttggagtaaatgcagagctaacttgaaatggttgttataacttaaaaattatataaatggtgaattgaacattattatgtgttctacagtagtctaatctgctgatgtgtcaatcaagcttattgtattaagttgtatatttactatctagctcattattctgctgttgttacatattgatatattgtttgttacatgcggagtttgaaggagtttaaaacacaagcaaccacattggcatcgcttcagcatcccaatttatgtaaactgatcggctattatgcaaaagaagattctaatgaaaggatgttggtctatgaacggctttatcatggaagcttagataagctactctttggaagatcagatggtcatttcatggactggtctaaacgtttgaaggttgccctgggtgctgccagaggtctagctttcttgcatgatgaaggaccctttcaggccatgtacaacgagttctcaactttgaacatccaaatagataaaggtttcactgctaagctttcaggatatggttgtgttggcttcaataccgaggagatatctaatgcacctgtgcaaaccattcggtggagaccttggagaagggtttactcactcagtttgtctattgctgcaacaagtcggggctggaccgttccaaagtaaatgtaaatggaggcacgattgcccttggacaccctttgggtgcaacaggtgcccggtgcgtggctactcttctaaatgaaatgaagtgccggggcagagactgcagatttggtgttgtcaccatgtgtatcggatctggaatgggggcagcagctgtgttcgagctatgttcggcccggctggaggtatcgaccatcactcgtcactgtaacccgatggtgatcgacgaccgtgagcttccatgttattgcgttctgatacttgagacttttattataactatgtatgagatattgtctcttattagtactggatgatgagatgtgtcttattatgactatggatgagacttttgtgatgtaattgatgagactatggatgagacttttgtgatgtaattgatgagactatgaatttaaatattgttatgtgattgtgtgtgagatgtgttatgtgaaaatatgttgtgttatatagctgttgatatatttgttatgttgtggaatgtggtgtaaaataaaaataaaa

SEQ ID NO: 58311 - DNA, 2576 bp, Zea Mays
gccgtcttcatctccccgccgacggaagcctgctcccagcaagccccagccgcgtctcgtctccctctcccttgtctccctcacacacgtttctctctccctcctcttcttccttgctgcgctccacctcgccccaggtgctcggccgctcatctccctgctgccgcgtccctgcgcccggccttcgtccccgtcgcgccgatccgcgctcgcccaggtcgcccgccgtcgcccagctcggtgccttccctgctcctccaagccggcgtcctctgccctcatcttcttcctcaggtccgaccggtgccctcattcccctggctggcgctcggcttcctcctcctgaagtccctccacgcgccgaatttcgagctccattcatggcacgctccgttccttctcctcgacctccctctgccctcttccatggtcggcgcccccttcagctccagctcggcctccagctcccgtgccacgcgccgtggagctccctgcgcgcgccctggcccctgctcggatttagccgtgccgagtcccatcttccaattcaataccataaagaagctccgttctactgcacttgcagtttactgtgttttaggttggatcgaatcattgagttaggtttgctgttcagttttaccacctactcctacctgtaacactttaattttacaactacgcggctgccttcattagaaatttaaatttagaactttaaatgtgttcctctgttaattgaccatcatatgttcaaattgccatctccatcttcttttggcatgccaacccccacctttaccaacaatatacatgcccagaattctgcatgtttttttcttaattaaagtaggtgtgatttcctcttaaatttttggttggacagtgacagtcagaaccctgtgaagtctattcccttgctatccattgtagtcactgatgatccacatcctcgtggccggccgaggtccttcccatggcgcccctccctgctcccgtgcacgtgcccccctggtggtcggagctcgccaacgccagttgttcctccacacacacctcctgctcccctcgccatggcatggatgaccgctgtatctgctcctgtcgtgctcaagtcgtcacaggttggtgggttgtgcgcgcctagcggtaagttatctgctcctgtcggtaattttgcatcattaattattctgttaaggatctgaatttaggctagagtatcaggttcattttgtgggcatgtgatcaaatgcctactgtgctgacatatgctagtctggccccataattaatataccattacttttttgaatgctaattaggaccgcagcaggtctaatctggccccataattaatataccattactcaggaaatattttggagtaaatgcagagctaacttgaaatggttgttataacttaaaaattatataaatggtgaattgaacattattatgtgttctacagtagtctaatctgctgatgtgtcaatcaagcttattgtattaagttgtatatttactatctagctcattattctgctgttgttacatattgatatattgtttgttacatgcggagtttgaaggagtttaaaacacaagcaaccacattggcatcgcttcagcatcccaatttatgtaaactgatcggctattatgcaaaagaagattctaatgaaaggatgttggtctatgaacggctttatcatggaagcttagataagctactctttggaagatcagatggtcatttcatggactggtctaaacgtttgaaggttgccctgggtgctgccagaggtctagctttcttgcatgatgaaggaccctttcaggccatgtacaacgagttctcaactttgaacatccaaatagataaaggtttcactgctaagctttcaggatatggttgtgttggcttcaataccgaggagatatctaatgcacctgtgcaaaccattcggtggagaccttggagaagggtttactcactcagtttgtctattgctgcaacaagtcggggctggaccgttccaaagtaaatgtaaatggaggcacgattgcccttggacaccctttgggtgcaacaggtgcccggtgcgtggctactcttctaaatgaaatgaagtgccggggcagagactgcagatttggtgttgtcaccatgtgtatcggatctggaatgggggcagcagctgtgttcgagctatgttcggcccggctggaggtatcgaccatcactcgtcactgtaacccgatggtgatcgacgaccgtgagcttccatgttattgcgttctgatacttgagacttttattataactatgtatgagatattgtctcttattagtactggatgatgagatgtgtcttattatgactatggatgagacttttgtgatgtaattgatgagactatggatgagacttttgtgatgtaattgatgagactatgaatttaaatattgttatgtgattgtgtgtgagatgtgttatgtgaaaatatgttgtgttatatagctgttgatatatttgttatgttgtggaatgtggtgtaaaataaaaataaaa

SEQ ID NO: 58312 - DNA, 2219 bp, Zea Mays
gccgtcttcatctccccgccgacggaagcctgctcccagcaagccccagccgcgtctcgtctccctctcccttgtctccctcacacacgtttctctctccctcctcttcttccttgctgcgctccacctcgccccaggtgctcggccgctcatctccctgctgccgcgtccctgcgcccggccttcgtccccgtcgcgccgatccgcgctcgcccaggtcgcccgccgtcgcccagctcggtgccttccctgctcctccaagccggcgtcctctgccctcatcttcttcctcaggtccgaccggtgccctcattcccctggctggcgctcggcttcctcctcctgaagtccctccacgcgccgaatttcgagctccattcatggcacgctccgttccttctcctcgacctccctctgccctcttccatggtcggcgcccccttcagctccagctcggcctccagctcccgtgccacgcgccgtggagctccctgcgcgcgccctggcccctgctcggatttagccgtgccgagtcccatcttccaattcaataccataaagaagctccgttctactgcacttgcagtttactgtgttttagccggccgaggtccttcccatggcgcccctccctgctcccgtgcacgtgcccccctggtggtcggagctcgccaacgccagttgttcctccacacacacctcctgctcccctcgccatggcatggatgaccgctgtatctgctcctgtcgtgctcaagtcgtcacaggttggtgggttgtgcgcgcctagcggtaagttatctgctcctgtcggtaattttgcatcattaattattctgttaaggatctgaatttaggctagagtatcaggttcattttgtgggcatgtgatcaaatgcctactgtgctgacatatgctagtctggccccataattaatataccattacttttttgaatgctaattaggaccgcagcaggtctaatctggccccataattaatataccattactcaggaaatattttggagtaaatgcagagctaacttgaaatggttgttataacttaaaaattatataaatggtgaattgaacattattatgtgttctacagtagtctaatctgctgatgtgtcaatcaagcttattgtattaagttgtatatttactatctagctcattattctgctgttgttacatattgatatattgtttgttacatgcggagtttgaaggagtttaaaacacaagcaaccacattggcatcgcttcagcatcccaatttatgtaaactgatcggctattatgcaaaagaagattctaatgaaaggatgttggtctatgaacggctttatcatggaagcttagataagctactctttggaagatcagatggtcatttcatggactggtctaaacgtttgaaggttgccctgggtgctgccagaggtctagctttcttgcatgatgaaggaccctttcaggccatgtacaacgagttctcaactttgaacatccaaatagataaaggtttcactgctaagctttcaggatatggttgtgttggcttcaataccgaggagatatctaatgcacctgtgcaaaccattcggtggagaccttggagaagggtttactcactcagtttgtctattgctgcaacaagtcggggctggaccgttccaaagtaaatgtaaatggaggcacgattgcccttggacaccctttgggtgcaacaggtgcccggtgcgtggctactcttctaaatgaaatgaagtgccggggcagagactgcagatttggtgttgtcaccatgtgtatcggatctggaatgggggcagcagctgtgttcgagctatgttcggcccggctggaggtatcgaccatcactcgtcactgtaacccgatggtgatcgacgaccgtgagcttccatgttattgcgttctgatacttgagacttttattataactatgtatgagatattgtctcttattagtactggatgatgagatgtgtcttattatgactatggatgagacttttgtgatgtaattgatgagactatggatgagacttttgtgatgtaattgatgagactatgaatttaaatattgttatgtgattgtgtgtgagatgtgttatgtgaaaatatgttgtgttatatagctgttgatatatttgttatgttgtggaatgtggtgtaaaataaaaataaaa

SEQ ID NO: 58313 - DNA, 1558 bp, Zea Mays
gccgtcttcatctccccgccgacggaagcctgctcccagcaagccccagccgcgtctcgtctccctctcccttgtctccctcacacacgtttctctctccctcctcttcttccttgctgcgctccacctcgccccaggtgctcggccgctcatctccctgctgccgcgtccctgcgcccggccttcgtccccgtcgcgccgatccgcgctcgcccaggtcgcccgccgtcgcccagctcggtgccttccctgctcctccaagccggcgtcctctgccctcatcttcttcctcaggtccgaccggtgccctcattcccctggctggcgctcggcttcctcctcctgaagtccctccacgcgccgaatttcgagctccattcatgccggccgaggtccttcccatggcgcccctccctgctcccgtgcacgtgcccccctggtggtcggagctcgccaacgccagttgttcctccacacacacctcctgctcccctcgccatggcatggatgaccgctgtatctgctcctgtcgtgctcaagtcgtcacaggttggtgggttgtgcgcgcctagcggagtttaaaacacaagcaaccacattggcatcgcttcagcatcccaatttatgtaaactgatcggctattatgcaaaagaagattctaatgaaaggatgttggtctatgaacggctttatcatggaagcttagataagctactctttggaagatcagatggtcatttcatggactggtctaaacgtttgaaggttgccctgggtgctgccagaggtctagctttcttgcatgatgaaggaccctttcaggccatgtacaacgagttctcaactttgaacatccaaatagataaaggtttcactgctaagctttcaggatatggttgtgttggcttcaataccgaggagatatctaatgcacctgtgcaaaccattcggtggagaccttggagaagggtttactcactcagtttgtctattgctgcaacaagtcggggctggaccgttccaaagtaaatgtaaatggaggcacgattgcccttggacaccctttgggtgcaacaggtgcccggtgcgtggctactcttctaaatgaaatgaagtgccggggcagagactgcagatttggtgttgtcaccatgtgtatcggatctggaatgggggcagcagctgtgttcgagctatgttcggcccggctggaggtatcgaccatcactcgtcactgtaacccgatggtgatcgacgaccgtgagcttccatgttattgcgttctgatacttgagacttttattataactatgtatgagatattgtctcttattagtactggatgatgagatgtgtcttattatgactatggatgagacttttgtgatgtaattgatgagactatggatgagacttttgtgatgtaattgatgagactatgaatttaaatattgttatgtgattgtgtgtgagatgtgttatgtgaaaatatgttgtgttatatagctgttgatatatttgttatgttgtggaatgtggtgtaaaataaaaataaaa

SEQ ID NO: 58314 - DNA, 2085 bp, Zea Mays
gccgtcttcatctccccgccgacggaagcctgctcccagcaagccccagccgcgtctcgtctccctctcccttgtctccctcacacacgtttctctctccctcctcttcttccttgctgcgctccacctcgccccaggtgctcggccgctcatctccctgctgccgcgtccctgcgcccggccttcgtccccgtcgcgccgatccgcgctcgcccaggtcgcccgccgtcgcccagctcggtgccttccctgctcctccaagccggcgtcctctgccctcatcttcttcctcaggtccgaccggtgccctcattcccctggctggcgctcggcttcctcctcctgaagtccctccacgcgccgaatttcgagctccattcatggcacgctccgttccttctcctcgacctccctctgccctcttccatggtcggcgcccccttcagctccagctcggcctccagctcccgtgccacgcgccgtggagctccctgcgcgcgccctggcccctgctcggatttagccgtgccgagtcccatcttccaattcaataccataaagaagctccgttctactgcacttgcagtttactgtgttttaggttggatcgaatcattgagttaggtttgctgttcagttttaccacctactcctacctgtaacactttaattttacaactacgcggctgccttcattagaaatttaaatttagaactttaaatgtgttcctctgttaattgaccatcatatgttcaaattgccatctccatcttcttttggcatgccaacccccacctttaccaacaatatacatgcccagaattctgcatgtttttttcttaattaaagtaggtgtgatttcctcttaaatttttggttggacagtgacagtcagaaccctgtgaagtctattcccttgctatccattgtagtcactgatgatccacatcctcgtgggtgtgttttattcagtttctctccttgatcaatatcttttggtcaaacttgtgtgttttatttagtttctctctactcctcccagccggccgaggtccttcccatggcgcccctccctgctcccgtgcacgtgcccccctggtggtcggagctcgccaacgccagttgttcctccacacacacctcctgctcccctcgccatggcatggatgaccgctgtatctgctcctgtcgtgctcaagtcgtcacaggttggtgggttgtgcgcgcctagcgataagctactctttggaagatcagatggtcatttcatggactggtctaaacgtttgaaggttgccctgggtgctgccagaggtctagctttcttgcatgatgaaggaccctttcaggccatgtacaacgagttctcaactttgaacatccaaatagataaaggtttcactgctaagctttcaggatatggttgtgttggcttcaataccgaggagatatctaatgcacctgtgcaaaccattcggtggagaccttggagaagggtttactcactcagtttgtctattgctgcaacaagtcggggctggaccgttccaaagtaaatgtaaatggaggcacgattgcccttggacaccctttgggtgcaacaggtgcccggtgcgtggctactcttctaaatgaaatgaagtgccggggcagagactgcagatttggtgttgtcaccatgtgtatcggatctggaatgggggcagcagctgtgttcgagctatgttcggcccggctggaggtatcgaccatcactcgtcactgtaacccgatggtgatcgacgaccgtgagcttccatgttattgcgttctgatacttgagacttttattataactatgtatgagatattgtctcttattagtactggatgatgagatgtgtcttattatgactatggatgagacttttgtgatgtaattgatgagactatggatgagacttttgtgatgtaattgatgagactatgaatttaaatattgttatgtgattgtgtgtgagatgtgttatgtgaaaatatgttgtgttatatagctgttgatatatttgttatgttgtggaatgtggtgtaaaataaaaataaaa

SEQ ID NO: 58315 - DNA, 2025 bp, Zea Mays
cttccatctggcagctggcttggttgctaagcaaccaacctgttctccctttgatacaagtcagaaagaaggagccagcctttaatttgccgacgtggtaaagcagcctgcctgctcatgttctttcgggtgcaaatcagatagtaaagctgcgctgagttaccataaaaagaagagaaaaaaacagtctatcctgagttctcgatcgcgccattcaatcggataaagctgtgttgagttgcagaaaatcagtctttgatcgtctgtgttttcctgattaaagcagcgctttgttgctttagatagaggtagagccatgtgcggcgcttttcaggctggttctttttcgaaaaccggtttcccccactccacaccaccaccaccaccattgacgacttgactacaaagcccagatccattcctcggggtcgggcggccgccaatcccgccgcataccgctggccgagtcctcgtcggcgccggacggggtgaagtgaaggccgactgggagaattttgtggatcttatctggtctccatcatggaacatgacggcacaacgaacctggctgtcactgaggctgtgcgctcggtgcagctgctcaagatcgacggctactgcgccaccgctaccatgggggcatcggagttcatcaaattccgatggcacatcgatggccacgagtgggagagggacgacgacaaggtgagggtgaacctgagctgccggcttgtatgccccagccccaccagccagcggccgcatctcgatacctgctggtccgaagagaagagggtgtcccatgtgtttgccagcgactcgaaatgctcgcctgaacttctcctcatcctgaagcacgagctaccatcgtcaggttatctcgtggacgattcactgaccgtggaatgcacggtcaccgtgctacgcgacttggacgccgccacggataaggcgctgtcgtccctgccagtgccgccaccctcggacctacaccagcacctcggcgacctcctgcagagcgaggacggagcggacgtcacgttccgtgtctccggggagtccttcgccgcccacagggccatactcgccgcaaggtcccctgtttttaaggccgagttcttcggaggcatggaggaacgcagctccgcttctgtggaggtcaaaggcatggaggctgctgtgttcaggtccatgcttcgcttcatctataccgacacggctccagagctcgacggtgcccaggaccaggagcctgaggcggcggtggccatggctcagcacctactggtagctgctgacagactgaagctcatgtgcgaatgcaagctctctggcggcatcgacatcggcacagcggccgcgacgttggctctcgccgagcagcacaactgctcgctgctcaaagccaagtgccttgagttcgtcaccaggtcgcctgagactctcgatgctatcctggcgactgacggctacgagcatctggtggcaagctgcccctcggtgctggctgaactgctgagggctgcgcgtggaaggaagatctgagctggacgatgatttcatattatggtttgcctaagatgtgtgtgaactaaaaaccatgcatgatgaactagtagtgcttgcagttgatttcctgcccctcctttcagtttgacctgcgcttgtcatacatgtattgtatgcacatacacgagacgggcagctagcattttctgtggttagatctcgtctcggctttgtgcctgtcatttgggggcttaattgtaccggttgccgtttctcgttcttctcatgcatgtattgtacgcgcagccacacgcatgacatgagcagactgctgctgcttcagtcgcaactagtacacaagattcagaaaactcatctttagagcagtcagtttctgggggaacagggcaacaggcaactccaaaactcgatcacagttgtcaactgcagtgtggatttcgagggcagttaggccttattctattattttcattggatgcgattggaaaaaaaata

SEQ ID NO: 58316 - DNA, 456 bp, Zea Mays
atgaagtgaagcatggaactgaacgcagcagagtccatgtctctgatctccacatgagcagagcttctttccttcatgcctccgaagaactgagccatgaaaaccggggaccttgcggcgagaatggccttgtgggcggcgaatgacttcccggagacacggaacgtgacgtccgctccattcttgctctgcaacagctcatcgaagtgctggtgtaggtcggagggtggtggcagtggcactggcagggacagcaccttagccgtggcgtccaagtcgcgtagcacggtgaccgtgcattccacggtcagtgaatcgttcacgaggtgctggtgtaggtccgagcgcagtggctgtggctgtggcactggcaggggcggatccttcacagaggcgtcgaagccacgtagctcggtgagcgtgcattccacggtcagcgaatcctccacgaggtaa

SEQ ID NO: 58317 - DNA, 559 bp, Zea Mays
cttcttggactcttggaaaaggtgaagatcaatgcacctcatttctgccctcagttgctcatggttgatggaaatggattgctccatccgcgaggttttggtttagcttgtcatctcggcgttcttgcagacattcctactgttggagttggaaaaaatctacatcacgtagatggccttaaccaatcagaagttagaagactgctcggatcaaaagagaactgcaacagggaactggttttgttgactggacagtctgggacaaaatggggcatgccacggcgatagtgaaatcttgctgtagataccgtgttcctgagcctacaaggcggatataagatcaaaggtcttcctgcagaagctccaaaagccacggcagtgacaggacttcctttttgttttttttcctcaagtatgttacaaactgggatcctgaccgtcttgcttgctgtagtcgagttttcagaaacaaatatgtaacatgatagaattgtcacttgcgaggttgccgcaccgtagtttgtaaaacagaccgatgatttctctgaatttgtaaaac

SEQ ID NO: 58318 - DNA, 668 bp, Zea Mays
cttcttggactcttggaaaaggtgaagatcaatgcacctcatttctgccctcagttgctcatggttgatggaaatggattgctccatccgcgaggttttggtttagcttgtcatctcggcgttcttgcagacattcctactgttggagttggaaaaaatagaagactaatcccaacgtttcaactgcgtagctacatcacgtagatggccttaaccaatcagaagttagaagactgctcggatcaaaagagaactgcaacagggaactggttttgttgactggacagtctgggacaaaatggggcatggcggtgcgctcctgccctggttcgtcgaagccaatctacgtctcagttgggcatcgcatctcacttgattcagccacggcgatagtgaaatcttgctgtagataccgtgttcctgagcctacaaggcaggcggatataagatcaaaggtcttcctgcagaagctccaaaagccacggcagtgacaggacttcctttttgttttttttcctcaagtatgttacaaactgggatcctgaccgtcttgcttgctgtagtcgagttttcagaaacaaatatgtaacatgatagaattgtcacttgcgaggttgccgcaccgtagtttgtaaaacagaccgatgatttctctgaatttgtaaaac

SEQ ID NO: 58319 - DNA, 636 bp, Zea Mays
cttcttggactcttggaaaaggtgaagatcaatgcacctcatttctgccctcagttgctcatggttgatggaaatggattgctccatccgcgaggttttggtttagcttgtcatctcggcgttcttgcagacattcctactgttggagttggaaaaaatctacatcacgtagatggccttaaccaatcagaagttagaagactgctcggatcaaaagagaactgcaacagggaactggttttgttgactggacagtctgggacaaaatggggcatggcggtgcgctcctgccctggttcgtcgaagccaatctacgtctcagttgggcatcgcatctcacttgattcagccacggcgatagtgaaatcttgctgtagataccgtgttcctgagcctacaaggcaggcggatataagatcaaaggtcttcctgcagaagctccaaaagccacggcagtgacaggacttcctttttgttttttttcctcaagtatgttacaaactgggatcctgaccgtcttgcttgctgtagtcgagttttcagaaacaaatatgtaacatgatagaattgtcacttgcgaggttgccgcaccgtagtttgtaaaacagaccgatgatttctctgaatttgtaaaac

SEQ ID NO: 58320 - DNA, 632 bp, Zea Mays
cttcttggactcttggaaaaggtgaagatcaatgcacctcatttctgccctcagttgctcatggttgatggaaatggattgctccatccgcgaggttttggtttagcttgtcatctcggcgttcttgcagacattcctactgttggagttggaaaaaatctacatcacgtagatggccttaaccaatcagaagttagaagactgctcggatcaaaagagaactgcaacagggaactggttttgttgactggacagtctgggacaaaatggggcatggcggtgcgctcctgccctggttcgtcgaagccaatctacgtctcagttgggcatcgcatctcacttgattcagccacggcgatagtgaaatcttgctgtagataccgtgttcctgagcctacaaggcggatataagatcaaaggtcttcctgcagaagctccaaaagccacggcagtgacaggacttcctttttgttttttttcctcaagtatgttacaaactgggatcctgaccgtcttgcttgctgtagtcgagttttcagaaacaaatatgtaacatgatagaattgtcacttgcgaggttgccgcaccgtagtttgtaaaacagaccgatgatttctctgaatttgtaaaac

SEQ ID NO: 58321 - DNA, 563 bp, Zea Mays
cttcttggactcttggaaaaggtgaagatcaatgcacctcatttctgccctcagttgctcatggttgatggaaatggattgctccatccgcgaggttttggtttagcttgtcatctcggcgttcttgcagacattcctactgttggagttggaaaaaatctacatcacgtagatggccttaaccaatcagaagttagaagactgctcggatcaaaagagaactgcaacagggaactggttttgttgactggacagtctgggacaaaatggggcatgccacggcgatagtgaaatcttgctgtagataccgtgttcctgagcctacaaggcaggcggatataagatcaaaggtcttcctgcagaagctccaaaagccacggcagtgacaggacttcctttttgttttttttcctcaagtatgttacaaactgggatcctgaccgtcttgcttgctgtagtcgagttttcagaaacaaatatgtaacatgatagaattgtcacttgcgaggttgccgcaccgtagtttgtaaaacagaccgatgatttctctgaatttgtaaaac

SEQ ID NO: 58322 - DNA, 621 bp, Zea Mays
aggaaattaaacaaggcatatgctgttctttattatcatttgctcatggttgatggaaatggattgctccatccgcgaggttttggtttagcttgtcatctcggcgttcttgcagacattcctactgttggagttggaaaaaatctacatcacgtagatggccttaaccaatcagaagttagaagactgctcggatcaaaagagaactgcaacagggaactggttttgttgactggacagtctgggacaaaatggggcatggcggtgcgctcctgccctggttcgtcgaagccaatctacgtctcagttgggcatcgcatctcacttgattcagccacggcgatagtgaaatcttgctgtagataccgtgttcctgagcctacaaggcaggcggatataagatcaaaggtcttcctgcagaagctccaaaagccacggcagtgacaggacttcctttttgttttttttcctcaagtatgttacaaactgggatcctgaccgtcttgcttgctgtagtcgagttttcagaaacaaatatgtaacatgatagaattgtcacttgcgaggttgccgcaccgtagtttgtaaaacagaccgatgatttctctgaatttgtaaaac

SEQ ID NO: 58323 - DNA, 3323 bp, Zea Mays
cccttttctgctcgctttcgcttcgccgttccaacgcgctcacggaagtggagtaaaaacacgcgggggagagcgacaaggttggtagaggacgcgcacccggggtggagctgagagcaacaggagctcctgcggcgaattcgggccccgagtacgccggttcaggcggccgccgccggtggaattgtgccagtcgaggtggcctgctggtgcggcgggagtttgcgagtagggcggttccggttttgagtgagcgaaggtgttgttgggggcgtggatctggccggcggcgggcgatgggaaggagggactagggctcgattggagggaaaggcgtgatccatgggcggatgcttctcgcaggaggagcaccggctccagagcaggccagctgaagctgctggaccagacggactgcagaagtcaaaatctgattctaaagctacagcaagtgttcttgctccaccaaaagctgtggtggatctgcaagtggaaggatatggaaatgtgaatattttcacatatgacgaattgagcgcagccacaaaaaacttccgaccagatcaaattcttggagagggtgggtttggagttgtttacaaaggtgtaattgatgaaaatgttagagcaggtttcccatccaggcaggttgctgtgaaagaactaaacccagagggttttcaaggggacaaggagtggctggcagaagtcaactatcttgggcaacttagtcatccaaatcttgttgaactgattggctattgctgtgagggttcacatagactgcttgtgtatgagtacatggcttgtggaagcctcgaaaagcacctttttcggcgggtttgccttaatatgccatggtcaacacgcatgaagattgcattgggtgctgcaagggggctcgagtaccttcacagagctgagagatccatcatttatcgagatttcaagacatcaaacatcttgctagatgcggattataatgctaagctttcagactttggtctcgcaagaacaggtcctagtggagaccaaacccacgtgtcaactcgtgttatgggaacttatggatacgcggctccagaatatgtcatgactggccatctgacagcacgaagtgatgtttatggctttggagtcgtgcttctagagatgattattggaagaagggctgtggacgatagccggccgagccgtgagcataacctagttgactgggcacggcccctcctcgtccataacaggaagctgttccggataatcgatccaagaatggaagggcagtactccaccaaggctgccaccgaggtggcaagccttgcataccgctgcctgagccagaaccccaaaggacgaccaaccatgagccaagttgttgagacctttgaggccgtgcagaacatgcctgaatgccaggacatactcctccagaacggcatcacaggtgccgtgacgctctacgaggtcccaaaggagcctgcagacagagttgagctggagaaggccaagcaggaaccggcagtaaagaccgccgcaatcccgcccgtgaacggaaagccggccccccagagcaggcgaacgcggcctgggaatggccggagcaagagcgagccatcgttggagtgtaagatgtacatcccatcaccagactctgacgaacagcagctcggcctggaggcactggcgtccccaaatggcagcatgaaggaccatcctgacgaggatttgtacaagatataaaatcagatcagttttttttttttcaaacaacatgagccctcgttgctcgccttttgcgccgccaccccagctctcaaagatcgaacacatccgctcaaactttcagcacatgctcaccaagttccgtcccctcatggcgacggcggcgaaggcaagggctccgccggccgtgacggcttccaaagcggcggcggcagcggtggagctggaggagcacgtgcactacaagcacactgatgcgtgccaccaactccggtggacagccaaggaaagctatgagtacatgtacgcgcggccgtggagcagggtggtcgacttttatgccgagctcgtgcgcgccggcgccggcgcagcggggctcgccaaattatttgggaatgatgagaaagattacacactttatactgctggagaaaattatctaacaccatcagaaaaaccaacgacaactaccttctccaaaggtcgtggaggaagatgggaaagagtaacatttaaagttgttatttcataccatggggggtcgttcgatggctggcagaaacagcctggccttaatactgttcaagggttagtggagaaacatctcggacaatttgttgatgagcgaaaagctaaacagcttgaagcaagatctttgccgatagaaggctgtgcaattgttgctggacgcactgacaaaggggtgactgctcttcagcaagtttgctcattttacacctggagaaaggatgtgaaatctggagatataaaaggtgcaataaatgaggctgctccagataaactaaaacctctgcatgtgtcagaggtttcgcgtgagtttcatcctaattttgcagcgaaatggaggaggtacatgtatattttccctcttgatgaggatgctgacttgattttaggggaagcacagtcctcaaaaacactagagaattctgaacacaacataaagcctcaaagctttgatgtgtccaaggttgatgaaattctcaaaccacttgctggaaagacattatcctacaagatgtttgcacgtgatacacaggcttcacgaagtgttggcccacctacagaatgtttcatgttccattcccgagctgcagtggccaaactacattctgctaatgaggatcacaaaggaggcatggtggtcatgtgcgtcgagctagtcgcaaacaggttcctgcgcaagatggtcagggttcttgtggccactgccataagagaggctgctgccggtgctggcgccgatgctttgctgaacctaatggaagccacggacaggcgtgccacggcgcccccggcaccgccagaaggcctgtgcctcgtagacgttggttatgaagattttgataagcagaggtgcttcatagtcgattgaaagaagtattctttgtagggaaaaaaatacaagatgcatgattcagcaattgaggggtctgtttagagaaacatacttcatgtcatgaagtgaccaagccatgcagctgctattagtcggctatttttggttgctatgagtcgcctatttataatctgtgggttttttttaaatgatttggtagttgtacttttgatgctctgtc

SEQ ID NO: 58324 - DNA, 3240 bp, Zea Mays
gtaaaaacacgcgggggagagcgacaaggttggtagaggacgcgcacccggggtggagctgagagcaacaggagctcctgcggcgaattcgggccccgagtacgccggttcaggcggccgccgccggtggaattgtgccagtcgaggtggcctgctggtgcggcgggagtttgcgagtagggcggttccggttttgagtgagcgaaggtgttgttgggggcgtggatctggccggcggcgggcgatgggaaggagggactagggctcgattggagggaaaggcgtgatccatgggcggatgcttctcgcaggaggagcaccggctccagagcaggccagctgaagctgctggaccagacggactgcagaagtcaaaatctgattctaaagctacagcaagtgttcttgctccaccaaaagctgtggtggatctgcaagtggaaggatatggaaatgtgaatattttcacatatgacgaattgagcgcagccacaaaaaacttccgaccagatcaaattcttggagagggtgggtttggagttgtttacaaaggtgtaattgatgaaaatgttagagcaggtttcccatccaggcaggttgctgtgaaagaactaaacccagagggttttcaaggggacaaggagtggctggcagaagtcaactatcttgggcaacttagtcatccaaatcttgttgaactgattggctattgctgtgagggttcacatagactgcttgtgtatgagtacatggcttgtggaagcctcgaaaagcacctttttcggcgggtttgccttaatatgccatggtcaacacgcatgaagattgcattgggtgctgcaagggggctcgagtaccttcacagagctgagagatccatcatttatcgagatttcaagacatcaaacatcttgctagatgcggattataatgctaagctttcagactttggtctcgcaagaacaggtcctagtggagaccaaacccacgtgtcaactcgtgttatgggaacttatggatacgcggctccagaatatgtcatgactggccatctgacagcacgaagtgatgtttatggctttggagtcgtgcttctagagatgattattggaagaagggctgtggacgatagccggccgagccgtgagcataacctagttgactgggcacggcccctcctcgtccataacaggaagctgttccggataatcgatccaagaatggaagggcagtactccaccaaggctgccaccgaggtggcaagccttgcataccgctgcctgagccagaaccccaaaggacgaccaaccatgagccaagttgttgagacctttgaggccgtgcagaacatgcctgaatgccaggacatactcctccagaacggcatcacaggtgccgtgacgctctacgaggtcccaaaggagcctgcagacagagttgagctggagaaggccaagcaggaaccggcagtaaagaccgccgcaatcccgcccgtgaacggaaagccggccccccagagcaggcgaacgcggcctgggaatggccggagcaagagcgagccatcgttggagtgtaagatgtacatcccatcaccagactctgacgaacagcagctcggcctggaggcactggcgtccccaaatggcagcatgaaggaccatcctgacgaggatttgtacaagatataaaatcagatcagttttttttttttcaaacaacatgagccctcgttgctcgccttttgcgccgccaccccagctctcaaagatcgaacacatccgctcaaactttcagcacatgctcaccaagttccgtcccctcatggcgacggcggcgaaggcaagggctccgccggccgtgacggcttccaaagcggcggcggcagcggtggagctggaggagcacgtgcactacaagcacactgatgcgtgccaccaactccggtggacagccaaggaaagctatgagtacatgtacgcgcggccgtggagcagggtggtcgacttttatgccgagctcgtgcgcgccggcgccggcgcagcggggctcgccaaattatttgggaatgatgagaaagattacacactttatactgctggagaaaattatctaacaccatcagaaaaaccaacgacaactaccttctccaaaggtcgtggaggaagatgggaaagagtaacatttaaagttgttatttcataccatggggggtcgttcgatggctggcagaaacagcctggccttaatactgttcaagggttagtggagaaacatctcggacaatttgttgatgagcgaaaagctaaacagcttgaagcaagatctttgccgatagaaggctgtgcaattgttgctggacgcactgacaaagggacacctggagaaaggatgtgaaatctggagatataaaaggtgcaataaatgaggctgctccagataaactaaaacctctgcatgtgtcagaggtttcgcgtgagtttcatcctaattttgcagcgaaatggaggaggtacatgtatattttccctcttgatgaggatgctgacttgattttaggggaagcacagtcctcaaaaacactagagaattctgaacacaacataaagcctcaaagctttgatgtgtccaaggttgatgaaattctcaaaccacttgctggaaagacattatcctacaagatgtttgcacgtgatacacaggcttcacgaagtgttggcccacctacagaatgtttcatgttccattcccgagctgcagtggccaaactacattctgctaatgaggatcacaaaggaggcatggtggtcatgtgcgtcgagctagtcgcaaacaggttcctgcgcaagatggtcagggttcttgtggccactgccataagagaggctgctgccggtgctggcgccgatgctttgctgaacctaatggaagccacggacaggcgtgccacggcgcccccggcaccgccagaaggcctgtgcctcgtagacgttggttatgaagattttgataagcagaggtgcttcatagtcgattgaaagaagtattctttgtagggaaaaaaatacaagatgcatgattcagcaattgaggggtctgtttagagaaacatacttcatgtcatgaagtgaccaagccatgcagctgctattagtcggctatttttggttgctatgagtcgcctatttataatctgtgggttttttttaaatgatttggtagttgtacttttgatgctctgtc

SEQ ID NO: 58325 - DNA, 2156 bp, Zea Mays
gacaaggttggtagaggacgcgcacccggggtggagctgagagcaacaggagctcctgcggcgaattcgggccccgagtacgccggttcaggcggccgccgccggtggaattgtgccagtcgaggtggcctgctggtgcggcgggagtttgcgagtagggcggttccggttttgagtgagcgaaggcgtgatccatgggcggatgcttctcgcaggaggagcaccggctccagagcaggccagctgaagctgctggaccagacggactgcagaagtcaaaatctgattctaaagctacagcaagtgttcttgctccaccaaaagctgtggtggatctgcaagtggaaggatatggaaatgtgaatattttcacatatgacgaattgagcgcagccacaaaaaacttccgaccagatcaaattcttggagagggtgggtttggagttgtttacaaaggtgtaattgatgaaaatgttagagcaggtttcccatccaggcaggttgctgtgaaagaactaaacccagagggttttcaaggggacaaggagtggctggcagaagtcaactatcttgggcaacttagtcatccaaatcttgttgaactgattggctattgctgtgagggttcacatagactgcttgtgtatgagtacatggcttgtggaagcctcgaaaagcacctttttcggggtttgccttaatatgccatggtcaacacgcatgaagattgcattgggtgctgcaagggggctcgagtaccttcacagagctgagagatccatcatttatcgagatttcaagacatcaaacatcttgctagatgcggattataatgctaagctttcagactttggtctcgcaagaacaggtcctagtggagaccaaacccacgtgtcaactcgtgttatgggaacttatggatacgcggctccagaatatgtcatgactggccatctgacagcacgaagtgatgtttatggctttggagtcgtgcttctagagatgattattggaagaagggctgtggacgatagccggccgagccgtgagcataacctagttgactgggcacggcccctcctcgtccataacaggaagctgttccggataatcgatccaagaatggaagggcagtactccaccaaggctgccaccgaggtggcaagccttgcataccgctgcctgagccagaaccccaaaggacgaccaaccatgagccaagttgttgagacctttgaggccgtgcagaacatgcctgaatgccaggacatactcctccagaacggcatcacaggtgccgtgacgctctacgaggtcccaaaggagcctgcagacagagttgagctggagaaggccaagcaggaaccggcagtaaagaccgccgcaatcccgcccgtgaacggaaagccggccccccagagcaggcgaacgcggcctgggaatggccggagcaagagcgagccatcgttggagtgtaagatgtacatcccatcaccagactctgacgaacagcagctcggcctggaggcactggcgtccccaaatggcagcatgaaggaccatcctgacgaggatttgtacaagatataaaatcagatcagttttttttttttcaaacaacatgagccctcgttgctcgccttttgcgccgccaccccagctctcaaagatcggtcagttacaattttttctctgatagccaccggcctcgctagggttcttattcttccgattagcaattgtatgtagagggagagttgtgatggaaagcatgtgtgtgcttgccatgacgatgctgtagagatctgatacacttctttctggggaatttccactccaaaaatggaagttgagagatgtgtcctgacgattggtgcgttttacccgtgtgttgagtttacttgtaaagatgcttcttcgttgtaatcttcagttctgcgggaaatcaacaccagcatagaaattgatagattagtcactgtgttgtcaatttgttcaaatctccaagcggtgaagtttttatttatctatttatttttttcgcacaactagagtggtaagttcatgaatattagttcaaagcatctgtatcctactttataaatccgtacatatctgagaagttttaaaacttaatctcaaggttgatataaaat

SEQ ID NO: 58326 - DNA, 3418 bp, Zea Mays
gacaaggttggtagaggacgcgcacccggggtggagctgagagcaacaggagctcctgcggcgaattcgggccccgagtacgccggttcaggcggccgccgccggtggaattgtgccagtcgaggtggcctgctggtgcggcgggagtttgcgagtagggcggttccggttttgagtgagcgaaggtgttgttgggggcgtggatctggccggcggcgggcgatgggaaggagggactagggctcgattggagggaaaggcgtgatccatgggcggatgcttctcgcaggaggagcaccggctccagagcaggccagctgaagctgctggaccagacggactgcagaagtcaaaatctgattctaaagctacagcaagtgttcttgctccaccaaaagctgtggtggatctgcaagtggaaggatatggaaatgtgaatattttcacatatgacgaattgagcgcagccacaaaaaacttccgaccagatcaaattcttggagagggtgggtttggagttgtttacaaaggtgtaattgatgaaaatgttagagcaggtttcccatccaggcaggttgctgtgaaagaactaaacccagagggttttcaaggggacaaggagtggctggcagaagtcaactatcttgggcaacttagtcatccaaatcttgttgaactgattggctattgctgtgagggttcacatagactgcttgtgtatgagtacatggcttgtggaagcctcgaaaagcacctttttcggcgggtttgccttaatatgccatggtcaacacgcatgaagattgcattgggtgctgcaagggggctcgagtaccttcacagagctgagagatccatcatttatcgagatttcaagacatcaaacatcttgctagatgcggattataatgctaagctttcagactttggtctcgcaagaacaggtcctagtggagaccaaacccacgtgtcaactcgtgttatgggaacttatggatacgcggctccagaatatgtcatgactggccatctgacagcacgaagtgatgtttatggctttggagtcgtgcttctagagatgattattggaagaagggctgtggacgatagccggccgagccgtgagcataacctagttgactgggcacggcccctcctcgtccataacaggaagctgttccggataatcgatccaagaatggaagggcagtactccaccaaggctgccaccgaggtggcaagccttgcataccgctgcctgagccagaaccccaaaggacgaccaaccatgagccaagttgttgagacctttgaggccgtgcagaacatgcctgaatgccaggacatactcctccagaacggcatcacaggtgccgtgacgctctacgaggtcccaaaggagcctgcagacagagttgagctggagaaggccaagcaggaaccggcagtaaagaccgccgcaatcccgcccgtgaacggaaagccggccccccagagcaggcgaacgcggcctgggaatggccggagcaagagcgagccatcgttggagtgtaagatgtacatcccatcaccagactctgacgaacagcagctcggcctggaggcactggcgtccccaaatggcagcatgaaggaccatcctgacgaggatttgtacaagatataaaatcagatcagttttttttttttcaaacaacatgagccctcgttgctcgccttttgcgccgccaccccagctctcaaagatcggtcagttacaattttttctctgatagccaccggcctcgctagggttcttattcttccgattagcaattgtatgtagagggagagttgtgatggaaagcatgtgtgtgcttgccatgacgatgctgtagagatctgatacacttctttctggggaatttccactccaaaaatggaagttgagagatgtgtcctgacgattgaacacatccgctcaaactttcagcacatgctcaccaagttccgtcccctcatggcgacggcggcgaaggcaagggctccgccggccgtgacggcttccaaagcggcggcggcagcggtggagctggaggagcacgtgcactacaagcacactgatgcgtgccaccaactccggtggacagccaaggaaagctatgagtacatgtacgcgcggccgtggagcagggtggtcgacttttatgccgagctcgtgcgcgccggcgccggcgcagcggggctcgccaaattatttgggaatgatgagaaagattacacactttatactgctggagaaaattatctaacaccatcagaaaaaccaacgacaactaccttctccaaaggtcgtggaggaagatgggaaagagtaacatttaaagttgttatttcataccatggggggtcgttcgatggctggcagaaacagcctggccttaatactgttcaagggttagtggagaaacatctcggacaatttgttgatgagcgaaaagctaaacagcttgaagcaagatctttgccgatagaaggctgtgcaattgttgctggacgcactgacaaagggacacctggagaaaggatgtgaaatctggagatataaaaggtgcaataaatgaggctgctccagataaactaaaacctctgcatgtgtcagaggtttcgcgtgagtttcatcctaattttgcagcgaaatggaggaggtacatgtatattttccctcttgatgaggatgctgacttgattttaggggaagcacagtcctcaaaaacactagagaattctgaacacaacataaagcctcaaagctttgatgtgtccaaggttgatgaaattctcaaaccacttgctggaaagacattatcctacaagatgtttgcacgtgatacacaggcttcacgaagtgttggcccacctacagaatgtttcatgttccattcccgagctgcagtggccaaactacattctgctaatgaggatcacaaaggaggcatggtggtcatgtgcgtcgagctagtcgcaaacaggttcctgcgcaagatggtcagggttcttgtggccactgccataagagaggctgctgccggtgctggcgccgatgctttgctgaacctaatggaagccacggacaggcgtgccacggcgcccccggcaccgccagaaggcctgtgcctcgtagacgttggttatgaagattttgataagcagaggtgcttcatagtcgattgaaagaagtattctttgtagggaaaaaaatacaagatgcatgattcagcaattgaggggtctgtttagagaaacatacttcatgtcatgaagtgaccaagccatgcagctgctattagtcggctatttttggttgctatgagtcgcctatttataatctgtgggttttttttaaatgatttggtagttgtacttttgatgctctgtc

SEQ ID NO: 58327 - DNA, 1287 bp, Zea Mays
aagaacacatccgctcaaactttcagcacatgctcaccaagttccgtcccctcatggcgacggcggcgaaggcaagggctccgccggccgtgacggcttccaaagcggcggcggcagcggtggagctggaggagcacgtgcactacaagcacactgatgcgtgccaccaactccggtggacagccaaggaaagctatgagtacatgtacgcgcggccgtggagcagggtggtcgacttttatgccgagctcgtgcgcgccggcgccggcgcagcggggctcgccaaattatttgggaatgatgaggttagtggagaaacatctcggacaatttgttgatgagcgaaaagctaaacagcttgaagcaagatctttgccgatagaaggctgtgcaattgttgctggacgcactgacaaagggacacctggagaaaggatgtgaaatctggagatataaaaggtgcaataaatgaggctgctccagataaactaaaacctctgcatgtgtcagaggtttcgcgtgagtttcatcctaattttgcagcgaaatggaggaggtacatgtatattttccctcttgatgaggatgctgacttgattttaggggaagcacagtcctcaaaaacactagagaattctgaacacaacataaagcctcaaagctttgatgtgtccaaggttgatgaaattctcaaaccacttgctggaaagacattatcctacaagatgtttgcacgtgatacacaggcttcacgaagtgttggcccacctacagaatgtttcatgttccattcccgagctgcagtggccaaactacattctgctaatgaggatcacaaaggaggcatggtggtcatgtgcgtcgagctagtcgcaaacaggttcctgcgcaagatggtcagggttcttgtggccactgccataagagaggctgctgccggtgctggcgccgatgctttgctgaacctaatggaagccacggacaggcgtgccacggcgcccccggcaccgccagaaggcctgtgcctcgtagacgttggttatgaagattttgataagcagaggtgcttcatagtcgattgaaagaagtattctttgtagggaaaaaaatacaagatgcatgattcagcaattgaggggtctgtttagagaaacatacttcatgtcatgaagtgaccaagccatgcagctgctattagtcggctatttttggttgctatgagtcgcctatttataatctgtgggttttttttaaatgatttggtagttgtacttttgatgctctgtc

SEQ ID NO: 58328 - DNA, 1365 bp, Zea Mays
catacagatatctatatttgcatttttaatgaatatgaatacgaacaattcaaatttccggacacccaaattcatccctacacgagagtagagagtagaggacgcttctttttcgacaaagagactttattaaacccaacggttcgcatcaagacgatacaagcacatagaaatgacacgcttctgatcaggtgaaagtgcatcattgaaagaaaaaaaaaagacgcttcagcatccgcctgttgcctcgcatcagaacatccgtcatgccatcgaccgtacccaagcccaaagggcacaggaaggtattacatgctaacctgcagcgcctgtggcgctgaaggagagtattattcatcattggccgcgatgaattctcacagcctgtggtgcgctgcggcacgaaagaaagcggaggccaataccaagaaggcagcggccgccgcccaccggaagccccaccgagaaaagaaggccaaaaaaaatggtggaacttggaagtcaggaaatccaaaatatggcaagtgaagtcttcagctgagatttttggtggggtcaaaagactcttgttagctgaagttttcagttctcatattttgtctgcaattcagtgtgatgtccaaaaaacctgtctgttacatggtgtcttctggcccatgtctatgcttgtatcgccttgttaaagacgatgtctccttcgctttgattctggtatagtgctttgggctatgttgggtggggtcattctctcacctctactaagcatgctcgattaggaaggtttgtcctgcctcttccctgacatttatgagttactgatagaagttgaatgcataactgcatataaatttgtgtgatccaggaacaaattggtaaatatgtgcccaggtttgtgcatgtgtgccaaccaggtacagctcctgcagctgtggtaagaaactgtagaaggttcaggtagtggagaagcattccacttaaatcaaagtacttcaagtttgaacaaagacacaatatctgtggatgatatcttcaagaaaagtgtgttttatgattttgcgttaagaaatgttcgagaggatgggatattgccatatatttgtatgtaacagtgaagtacgccctctcaaatttgatattgctttcattttgtactatcaatctgtctttcaatcttccaatggctagaactatactaggttattttgcttattttctttgcttgacaatcctataacaattaaaacatctataaatcaacatcaaccgtgagacttaacaaattgagattcatctgcatctatatgccaaatacatgctagaagataaataagaaaaagagaaagtgtgtggtgtgccattttgtac

SEQ ID NO: 58329 - DNA, 3173 bp, Zea Mays
aacgactactattttagaacggagtgtgttttacgatatctcgaaaaatgtaattcgcttttactattgactagaaaaaactcaacctatggggctaacatagtactatagtagtattctataaagatcccacgtagatcgagaaacacagagaaaccaacaaatcatgtcactgcattattctttaagctattagctcataccagcaatggaacacacatacgatagctctcttgttgcttgtgaggtgaggccagaaatgcgacattttctacgcatgtttcccctgtgagttacctcaacgttcacaattcttagggcttttttgacctacaatggaacacaaaacagtaacgcagcaccaactaagcataaaccgaagttgctatcaagtaggtaaggtaatgattcaaaccttcacgcgatcagaatcagacaatggtctaactgaggtatatttattaaaaatttacagtgacatgatttaactggttttctttcaagaaaaaatatgctcacgctatttctcagcggaaagctctaactgaattcttaccaagcattaatgaatctgctctctaggtccctgtgttgtgctttaaaataggaaaacctctaaagccaacggacccatcacatatgtactcagcaagatcctgtccacaatgtaaaattgtttataattatctgcaaactatgcaacaggcaggtgtttcctaagacagcaccaaaatcatgagcaaatgtcctagctggctttacctaagaaattcagtctattgcaaaaatcagaaaatatcatacatcacctatggacattttagcaacaaaacaaatctctaaacaagcatccaatttttggtgaatagtaaaaaaaatacaatggccatgattattaaggattaagggggacatactactcgtgcagccacatgcaagaatatggaaggcaagtctgtaagggctaaaaaactatggttgatccacataaaaacacgttttggacagtggactcactgagaaacgacaataacaagtctgaagcacatgatgatagtaatagggaaatcttaaatggagtcacactccagctggatcatagggctagcaatgagttgctgccgagaagcatggccaccaatgtaccacagctgcccactcagtcatgccatattcccccaatgatgtctgtgagggattattttcctgcatgccctgacataaacatcccaagtgttcgaggaagaagtgtgcatcccattaatatttcaagtgtttctcataccatagaagcatttgaaatcggtgaaagatttacatgccaaaaggctagcccctgtcgtggctggaaagttgtgaagatggctatggcgtcctcatcatctgagtcaggttataggcttatagcattattcaagttccttgcatatttaccgcgaactgtacatcacttgttattaaattcttgcgaaattttgtacaggaaaagacactacctctaaaaatgtatctttgaagtatgttttggcatgtagaagttatctatgtaaagcacaaaagaagatagtaatgaagggattaacaaatgtggttggtcagccgagcccataggacactgtcaactggaaggtggacagatgatactacgatttcttaattaaaaaccattgctttaaattttttctctctcctcgataaattacaagccagtatgccacatacgtggcaagctaattaacagagacagaaatattgctgctttctgctctgggagggccttaatatcacaagttcacaactgtaagtattaattattaacttaatatactataagctaataatcattgtttgccttatgactgatcaagatcaggtaagggagagggtggtgtcagcttctagttgttcggcataagtgcgtgtgagagtttggtaacagaaaattgtaggtagatatccaatgagtttttgtcgcgttttggaatctactaatcacctcttctttaattgcctgtggctatctttgtctggagggtggtgcaagtggccctggatctgaaaagatgtcctcagggctttgactccctttttggtgattggctgagtaattttggtcatgatgttaaaaatttaatcacgctcagggtgggggatgttctctgggctatttggaagcttagaaatgaagtttgttttaacaacaggagcattattgaacctgctgatgtgatttttgcttgttgcttctgattggattcttgggctattctgcagaaaagaaggccaaaaaaaatggtggaacttggaagtcaggaaatccaaaatatggcaagtgaagtcttcagctgagatttttggtggggtcaaaagactcttgttagctgaagttttcagttctcatattttgtctgcaattcagtgtgatgtccaaaaaacctgtctgttacatggtgtcttctggcccatgtctatgcttgtatcgccttgttaaagacgatgtctccttcgctttgattctggtatagtgctttgggctatgttgggtggggtcattctctcacctctactaagcatgctcgattaggaaggtttgtcctgcctcttccctgacatttatgagttactgatagaagttgaatgcataactgcatataaatttgtgtgatccaggaacaaattggtaaatatgtgcccaggtttgtgcatgtgtgccaaccaggtacagctcctgcagctgtggtaagaaactgtagaaggttcaggtagtggagaagcattccacttaaatcaaagtacttcaagtttgaacaaagacacaatatctgtggatgatatcttcaagaaaagtgtgttttatgattttgcgttaagaaatgttcgagaggatgggatattgccatatatttgtatgtaacagtgaagtacgccctctcaaatttgatattgctttcattttgtactatcaatctgtctttcaatcttccaatggctagaactatactaggttattttgcttattttctttgcttgacaatcctataacaattaaaacatctataaatcaacatcaaccgtgagacttaacaaattgagattcatctgcatctatatgccaaatacatgctagaagataaataagaaaaagagaaagtgtgtggtgtgccattttgtac

SEQ ID NO: 58330 - DNA, 2758 bp, Zea Mays
gttcttcacttctcctcggcgtcgtcgtgcgaatgttctccagcgcctgcagctttcgcgcgtactcgtcgcgtgtagccaccacatgtacttttctacgcaaaggctgcaattggaaacccatcaccaggtatcatctgccaccacaagaaacaagcagcaacagccaggacccaagagcgagccagccagcttccacctctagttgtccaacccaactgagagcataggcatagcagcacatcacatctagtgccagttctagcttaattaatccttttcttttaacagtaccgcttccccctcccccgtgggctgagcctcgccccgcctcaactccacctccgcctccaaatccgatcgatctccgaggcctccagatccccggcggccggaagacggcgagctcaaggcggtggacacccctcgcagcgctcgtctcctctcgctctcccaatccccttaccagttctacaatgagtatctcattgcgggatcgtattagaaagaggagggaagaagaagaagaagatgacatgatgatatttattgggaagcaaagtattggaaaaaactgcatttagttgatgatccactagaagtttaagctatgtcccactcgagtctttatacagtggtgatgtctcttgttatgctatgttcactgcatgatttttgtttttggcatgtctacaactggttcagctgttcagctgctcattgtggttgcagtcaaccataagattgttgtcttagcacctttgatatgtcttagcaaaaactcccagttcactctttgatatgtctagattgaaccagttcactctttaatatgtcttagcattgaacttgttttagattcaacaaatattcttgtcacggtgccagcaatatattaaatctacattgtgtaatatattgtcaaacaaggcttgggttgctagctttaactgcatggaatggaattagtccaggctgaaacgaacgaactttagtggccaccaggtttcatttcagagccggatctataacagaccaggttccagtgaaccacccggatccactctatatggaccagaaataaatacatgtctgttttcaaaccaaagcaaacgaacgcggccttaaagttcttcaggccctggtgtagcagctgaactacctagtttgatggtgaagaaagagctctaggtgatctaaagatggtgatgagataaaagcaccaaaaagtgtacagtgggatagcaaggatatgactgtcatgatgcctcagcgccaccgggctacggccaagaagcccatgtggataatcgtgctcttgtctatggtttgcatcatgttgattggggcttacgtcttcccaccacggcgcttctctaagtgctacctctctgcttcaagtttattagggatatcctttcaatgcccatgcctatgtcaaaaaatccaaagatcgcccttatgttcttgacaccaggttcattgccctttgagaaattgtgggagacgttcttacagggacatgagggaagatactccatctatgtgcacgcatcacgtgaaaagcctgttcatactagttctttgtttgctggtcgggatattcacagtgatgcgatagtatggggattgatttcaatggttgatgctgagaagagactattagcaaatgcactggaagatgttgataatcaagtttttgtcttgctttctgacagctgtgttccgctgcattcatttgattatgtgtataactacctgatgggaacgaatgttagcttcattgattgtttcaaggatccaggtccacatggcagtggaaggtaccctattgagatgtatcctgaaatagacgagagtgattttagaaagggtgcccagtggtttgcagttacgaggagacatgctttaatgattctggctgacagcctgtactacaagaagttcaagctatactgcaagccagcagaagggcgcaactgtattgcagatgagcattatttgccaacgctgttcaatatggtagatcctggtggcatctccaattggtctgttacacatgtggattggtccgagggaaaatggcatccaaggtcatatagtgctgacgatgtcacttatgatctcttgaagaatattacaacaactgatgagaacttccatgtgacaagtgatgacaagaaacttgtgatgcagaagccgtgtttgtggaatggatcgaagagaccgtgctatcttttcgccaggaagtttaatcctgaagcactcgataacctactgaagctgtttacaagttatacatctgtttgagcctatgagtcctacctgattctttgccttgggctttctaatcccacatttttttctgtttatatgtaaattgggaagcccgtatttattgggatctgggcctaaagatatcggtacaactgcaacagctgtgatggcttggagtacagtcctgggtaaatggccacaacaatgtttatagaatgacactgccctgagtgtaatttgtcgtgttcaatgtatgtctccatagtcttccagccaactcctaactcattagttctctattcttggagaacagttttttttttgtcagaatgttatatgatccattctttgtagacacagagattacaacagatgtaccacaaatgcagtcttaattttgtcactattaaatcttttatcaggcgttcaactgtgattatattttcagcaaattaaggccccccttcggaacaaaggaaat

SEQ ID NO: 58331 - DNA, 3772 bp, Zea Mays
gttcttcacttctcctcggcgtcgtcgtgcgaatgttctccagcgcctgcagctttcgcgcgtactcgtcgcgtgtagccaccacatgtacttttctacgcaaaggctgcaattggaaacccatcaccaggtatcatctgccaccacaagaaacaagcagcaacagccaggacccaagagcgagccagccagcttccacctctagttgtccaacccaactgagagcataggcatagcagcacatcacatctagtgccagttctagcttaattaatccttttcttttaacagtaccgcttccccctcccccgtgggctgagcctcgccccgcctcaactccacctccgcctccaaatccgatcgatctccgaggcctccagatccccggcggccggaagacggcgagctcaaggcggtggacacccctcgcagcgctcgtctcctctcgctctcccaatccccttaccagcagcaggggaaaaaacatcgccttaggcctcgttcgttttcagcggatcagcccattccagatcttgttccgagtggaacgaataggcctggtttggaatttggtacagcccattgaaattgttcgtttcggtccgaattgaaatcgtaaccggcctggattaaaatttcacttcaccccacggcccggaaccaacccttctgtcgtaccctctggatcgaagcctggacgacgcgaccgtgcggcggcgactcgacgcaaccagcacggcggcggcgcacagccccgacgacgactctccccactgccttctctccggtgtggccgccgccagtcgcctgcgtcgttgaagcagttgctgttgaggttgaggtcctcctgggggagacgcgcgacgcagccgaggcgcagcgcggtcaggttcgggtatggcctgcatagctactcccagaacttcgacgatggcgttgcctagtcagcccggcggccacggctagcttcttcagtacgtgtagctagctaggagtctaggatattcgtgtaactagctatggccaggatattagtgtggctttaattagtgctttttgtcctgatcactgagatttcagtccagtgtaaacttccgatgattatctgtgctctctagctggttcatccagttatattgtataaagaaattacttcatcttataattaggtttgcacaggaaagcaattattctatgcttgccatagatcaacgataagcagactgtgatttggtacgtcagctgttggaatggatggcttcgttgattttccagctgctcgatcgatctgcgtgttgacagatctgttgttgcaaaatgttgctttgttggaacagcagcctttcaacctatacatagtttgctttagtccgtagtaatttgctttagtccttattacttgtacttttcaatctatacatggtttgctttaattctgtttttatattcagcttatatctgacaacaagtctatattatttagttctacaatgagtatctcattgcgggatcgtattagaaagaggagggaagaagaagaagaagatgacatgatgatatttattgggaagcaaagtattggaaaaaactgcatttagttgatgatccactagaagtttaagctatgtcccactcgagtctttatacagtggtgatgtctcttgttatgctatgttcactgcatgatttttgtttttggcatgtctacaactggttcagctgttcagctgctcattgtggttgcagtcaaccataagattgttgtcttagcacctttgatatgtcttagcaaaaactcccagttcactctttgatatgtctagattgaaccagttcactctttaatatgtcttagcattgaacttgttttagattcaacaaatattcttgtcacggtgccagcaatatattaaatctacattgtgtaatatattgtcaaacaaggcttgggttgctagctttaactgcatggaatggaattagtccaggctgaaacgaacgaactttagtggccaccaggtttcatttcagagccggatctataacagaccaggttccagtgaaccacccggatccactctatatggaccagaaataaatacatgtctgttttcaaaccaaagcaaacgaacgcggccttaaagttcttcaggccctggtgtagcagctgaactacctagtttgatggtgaagaaagagctctaggtgatctaaagatggtgatgagataaaagcaccaaaaagtgtacagtgggatagcaaggatatgactgtcatgatgcctcagcgccaccgggctacggccaagaagcccatgtggataatcgtgctcttgtctatggtttgcatcatgttgattggggcttacgtcttcccaccacggcgcttctctaagtgctacctctctgcttcaagtttattagggatatcctttcaatgcccatgcctatgtcaaaaaatccaaagatcgcccttatgttcttgacaccaggttcattgccctttgagaaattgtgggagacgttcttacagggacatgagggaagatactccatctatgtgcacgcatcacgtgaaaagcctgttcatactagttctttgtttgctggtcgggatattcacagtgatgcgatagtatggggattgatttcaatggttgatgctgagaagagactattagcaaatgcactggaagatgttgataatcaagtttttgtcttgctttctgacagctgtgttccgctgcattcatttgattatgtgtataactacctgatgggaacgaatgttagcttcattgattgtttcaaggatccaggtccacatggcagtggaaggtaccctattgagatgtatcctgaaatagacgagagtgattttagaaagggtgcccagtggtttgcagttacgaggagacatgctttaatgattctggctgacagcctgtactacaagaagttcaagctatactgcaagccagcagaagggcgcaactgtattgcagatgagcattatttgccaacgctgttcaatatggtagatcctggtggcatctccaattggtctgttacacatgtggattggtccgagggaaaatggcatccaaggtcatatagtgctgacgatgtcacttatgatctcttgaagaatattacaacaactgatgagaacttccatgtgacaagtgatgacaagaaacttgtgatgcagaagccgtgtttgtggaatggatcgaagagaccgtgctatcttttcgccaggaagtttaatcctgaagcactcgataacctactgaagctgtttacaagttatacatctgtttgagcctatgagtcctacctgattctttgccttgggctttctaatcccacatttttttctgtttatatgtaaattgggaagcccgtatttattgggatctgggcctaaagatatcggtacaactgcaacagctgtgatggcttggagtacagtcctgggtaaatggccacaacaatgtttatagaatgacactgccctgagtgtaatttgtcgtgttcaatgtatgtctccatagtcttccagccaactcctaactcattagttctctattcttggagaacagttttttttttgtcagaatgttatatgatccattctttgtagacacagagattacaacagatgtaccacaaatgcagtcttaattttgtcactattaaatcttttatcaggcgttcaactgtgattatattttcagcaaattaaggccccccttcggaacaaaggaaat

SEQ ID NO: 58332 - DNA, 1794 bp, Zea Mays
tggaaacccatcaccaggtatcatctgccaccacaagaaacaagcagcaacagccaggacccaagagcgagccagccagcttccacctctagttgtccaacccaactgagagcataggcatagcagcacatcacatctagtgccagttctagcttaattaatccttttcttttaacagtaccgcttccccctcccccgtgggctgagcctcgccccgcctcaactccacctccgcctccaaatccgatcgatctccgaggcctccagatccccggcggccggaagacggcgagctcaaggcggtggacacccctcgcagcgctcgtctcctctcgctctcccaatccccttaccagcagcaggggaaaaaacatcgccttaggcctcgttcgttttcagcggatcagcccattccagatcttgttccgagtggaacgaataggcctggtttggaatttgcctggacgacgcgaccgtgcggcggcgactcgacgcaaccagcacggcggcggcgcacagccccgacgacgactctccccactgccttctctccgggacatgagggaagatactccatctatgtgcacgcatcacgtgaaaagcctgttcatactagttctttgtttgctggtcgggatattcacagtgatgcgatagtatggggattgatttcaatggttgatgctgagaagagactattagcaaatgcactggaagatgttgataatcaagtttttgtcttgctttctgacagctgtgttccgctgcattcatttgattatgtgtataactacctgatgggaacgaatgttagcttcattgattgtttcaaggatccaggtccacatggcagtggaaggtaccctattgagatgtatcctgaaatagacgagagtgattttagaaagggtgcccagtggtttgcagttacgaggagacatgctttaatgattctggctgacagcctgtactacaagaagttcaagctatactgcaagccagcagaagggcgcaactgtattgcagatgagcattatttgccaacgctgttcaatatggtagatcctggtggcatctccaattggtctgttacacatgtggattggtccgagggaaaatggcatccaaggtcatatagtgctgacgatgtcacttatgatctcttgaagaatattacaacaactgatgagaacttccatgtgacaagtgatgacaagaaacttgtgatgcagaagccgtgtttgtggaatggatcgaagagaccgtgctatcttttcgccaggaagtttaatcctgaagcactcgataacctactgaagctgtttacaagttatacatctgtttgagcctatgagtcctacctgattctttgccttgggctttctaatcccacatttttttctgtttatatgtaaattgggaagcccgtatttattgggatctgggcctaaagatatcggtacaactgcaacagctgtgatggcttggagtacagtcctgggtaaatggccacaacaatgtttatagaatgacactgccctgagtgtaatttgtcgtgttcaatgtatgtctccatagtcttccagccaactcctaactcattagttctctattcttggagaacagttttttttttgtcagaatgttatatgatccattctttgtagacacagagattacaacagatgtaccacaaatgcagtcttaattttgtcactattaaatcttttatcaggcgttcaactgtgattatattttcagcaaattaaggccccccttcggaacaaaggaaat

SEQ ID NO: 58333 - DNA, 4144 bp, Zea Mays
cctcgccccgcctcaactccacctccgcctccaaatccgatcgatctccgaggcctccagatccccggcggccggaagacggcgagctcaaggcggtggacacccctcgcagcgctcgtctcctctcgctctcccaatccccttaccagcaggggaaaaaacatcgccttaggcctcgttcgttttcagcggatcagcccattccagatcttgttccgagtggaacgaataggcctggtttggaatttggtacagcccattgaaattgttcgtttcggtccgaattgaaatcgtaaccggcctggattaaaatttcacttcaccccacggcccggaaccaacccttctgtcgtaccctctggatcgaagcctggacgacgcgaccgtgcggcggcgactcgacgcaaccagcacggcggcggcgcacagccccgacgacgactctccccactgccttctctccggtgaggatctgctctcttccttccctctcctatcctctgctctcgctgcccccaaactctcgccctcaatctcgctcctctacgctctcgcaccgcggcgctttgttcaaggtgtggccgccgccagtcgcctgcgtcgttgaagcagttgctgttgaggttgaggtcctcctgggggagacgcgcgacgcagccgaggcgcagcgcggtcaggttcgggtatggcctgcatagctactcccagaacttcgacgatggcgttgcctagtcagcccggcggccacggctagcttcttcagtacgtgtagctagctaggagtctaggatattcgtgtaactagctatggccaggatattagtgtggctttaattagtgctttttgtcctgatcactgagatttcagtccagtgtaaacttccgatgattatctgtgctctctagctggttcatccagttatattgtataaagaaattacttcatcttataattaggtttgcacaggaaagcaattattctatgcttgccatagatcaacgataagcagactgtgatttggtacgtcagctgttggaatggatggcttcgttgattttccagctgctcgatcgatctgcgtgttgacagatctgttgttgcaaaatgttgctttgttggaacagcagcctttcaacctatacatagtttgctttagtccgtagtaatttgctttagtccttattacttgtacttttcaatctatacatggtttgctttaattctgtttttatattcagcttatatctgacaacaagtctatattatttagttctacaatgagtatctcattgcgggatcgtattagaaagaggagggaagaagaagaagaagatgacatgatgatatttattgggaagcaaagtattggaaaaaactgcatttagttgatgatccactagaagtttaagctatgtcccactcgagtctttatacagtggtgatgtctcttgttatgctatgttcactgcatgatttttgtttttggcatgtctacaactggttcagctgttcagctgctcattgtggttgcagtcaaccataagattgttgtcttagcacctttgatatgtcttagcaaaaactcccagttcactctttgatatgtctagattgaaccagttcactctttaatatgtcttagcattgaacttgttttagattcaacaaatattcttgtcacggtgccagcaatatattaaatctacattgtgtaatatattgtcaaacaaggcttgggttgctagctttaactgcatggaatggaattagtccaggctgaaacgaacgaactttagtggccaccaggtttcatttcagagccggatctataacagaccaggttccagtgaaccacccggatccactctatatggaccagaaataaatacatgtctgttttcaaaccaaagcaaacgaacgcggccttaaagttcttcaggccctggtgtagcagctgaactacctagtttgatggtgaagaaagagctctaggtgatctaaagatggtgatgagataaaagcaccaaaaagtgtacagtgggatagcaaggatatgactgtcatgatgcctcagcgccaccgggctacggccaagaagcccatgtggataatcgtgctcttgtctatggtttgcatcatgttgattggggcttacgtcttcccaccacggcgcttctctaagtgctacctctctgcttcaagtgtatgtacgtctttcaaggattggctcccttccatgggccatcgggagcgtgctgacgaggagattatttcatctgtagttattagggatatcctttcaatgcccatgcctatgtcaaaaaatccaaagatcgcccttatgttcttgacaccaggttcattgccctttgagaaattgtgggagacgttcttacaggttggtcaaaatgctacttgtctttgtgccacttaagatgtacttgctatttttgaaccacttaaggagtataagtctttcaagggtctttctgtctctttaaactgcaatgcatcatgtccgtcaaatgtagtggatatacttgttttcactgtgtattattgaaatatgagtatatagcattaggccaacatgttgattcccctatgaaccttcattagatagaggtaacaatgctcctagtaagtagtagcctgcataaatattaaatagattacacttatgtaccttcatttgcacatatgttgttttatctgtataaatatgttaagcctacgtataggtaccaaagccggtaatattcctagcaagtagtagcctgtacccactgtaatctcatcccttgttgatactaatcctctgtgtgtttatgtgacataatacttccatatcttatatgattcattgacttagaaaattgaatctctgtgccttcttcgaacagggacatgagggaagatactccatctatgtgcacgcatcacgtgaaaagcctgttcatactagttctttgtttgctggtcgggatattcacagtgatgcgatagtatggggattgatttcaatggttgatgctgagaagagactattagcaaatgcactggaagatgttgataatcaagtttttgtcttgctttctgacagctgtgttccgctgcattcatttgattatgtgtataactacctgatgggaacgaatgttagcttcattgattgtttcaaggatccaggtccacatggcagtggaaggtaccctattgagatgtatcctgaaatagacgagagtgattttagaaagggtgcccagtggtttgcagttacgaggagacatgctttaatgattctggctgacagcctgtactacaagaagttcaagctatactgcaagccagcagaagggcgcaactgtattgcagatgagcattatttgccaacgctgttcaatatggtagatcctggtggcatctccaattggtctgttacacatgtggattggtccgagggaaaatggcatccaaggtcatatagtgctgacgatgtcacttatgatctcttgaagaatattacaacaactgatgagaacttccatgtgacaagtgatgacaagaaacttgtgatgcagaagccgtgtttgtggaatggatcgaagagaccgtgctatcttttcgccaggaagtttaatcctgaagcactcgataacctactgaagctgtttacaagttatacatctgtttgagcctatgagtcctacctgattctttgccttgggctttctaatcccacatttttttctgtttatatgtaaattgggaagcccgtatttattgggatctgggcctaaagatatcggtacaactgcaacagctgtgatggcttggagtacagtcctgggtaaatggccacaacaatgtttatagaatgacactgccctgagtgtaatttgtcgtgttcaatgtatgtctccatagtcttccagccaactcctaactcattagttctctattcttggagaacagttttttttttgtcagaatgttatatgatccattctttgtagacacagagattacaacagatgtaccacaaatgcagtcttaattttgtcactattaaatcttttatcaggcgttcaactgtgattatattttcagcaaattaaggccccccttcggaacaaaggaaat

SEQ ID NO: 58334 - DNA, 2502 bp, Zea Mays
cgcctcaactccacctccgcctccaaatccgatcgatctccgaggcctccagatccccggcggccggaagacggcgagctcaaggcggtggacacccctcgcagcgctcgtctcctctcgctctcccaatccccttaccagttctacaatgagtatctcattgcgggatcgtattagaaagaggagggaagaagaagaagaagatgacatgatgatatttattgggaagcaaagtattggaaaaaactgcatttagttgatgatccactagaagtttaagctatgtcccactcgagtctttatacagtggtgatgtctcttgttatgctatgttcactgcatgatttttgtttttggcatgtctacaactggttcagctgttcagctgctcattgtggttgcagtcaaccataagattgttgtcttagcacctttgatatgtcttagcaaaaactcccagttcactctttgatatgtctagattgaaccagttcactctttaatatgtcttagcattgaacttgttttagattcaacaaatattcttgtcacggtgccagcaatatattaaatctacattgtgtaatatattgtcaaacaaggcttgggttgctagctttaactgcatggaatggaattagtccaggctgaaacgaacgaactttagtggccaccaggtttcatttcagagccggatctataacagaccaggttccagtgaaccacccggatccactctatatggaccagaaataaatacatgtctgttttcaaaccaaagcaaacgaacgcggccttaaagttcttcaggccctggtgtagcagctgaactacctagtttgatggtgaagaaagagctctaggtgatctaaagatggtgatgagataaaagcaccaaaaagtgtacagtgggatagcaaggatatgactgtcatgatgcctcagcgccaccgggctacggccaagaagcccatgtggataatcgtgctcttgtctatggtttgcatcatgttgattggggcttacgtcttcccaccacggcgcttctctaagtgctacctctctgcttcaagtgtatgtacgtctttcaaggattggctcccttccatgggccatcgggagcgtgctgacgaggagattatttcatctgtagttattagggatatcctttcaatgcccatgcctatgtcaaaaaatccaaagatcgcccttatgttcttgacaccaggttcattgccctttgagaaattgtgggagacgttcttacagggacatgagggaagatactccatctatgtgcacgcatcacgtgaaaagcctgttcatactagttctttgtttgctggtcgggatattcacagtgatgcgatagtatggggattgatttcaatggttgatgctgagaagagactattagcaaatgcactggaagatgttgataatcaagtttttgtcttgctttctgacagctgtgttccgctgcattcatttgattatgtgtataactacctgatgggaacgaatgttagcttcattgattggatccaggtccacatggcagtggaaggtaccctattgagatgtatcctgaaatagacgagagtgattttagaaagggtgcccagtggtttgcagttacgaggagacatgctttaatgattctggctgacagcctgtactacaagaagttcaagctatactgcaagccagcagaagggcgcaactgtattgcagatgagcattatttgccaacgctgttcaatatggtagatcctggtggcatctccaattggtctgttacacatgtggattggtccgagggaaaatggcatccaaggtcatatagtgctgacgatgtcacttatgatctcttgaagaatattacaacaactgatgagaacttccatgtgacaagtgatgacaagaaacttgtgatgcagaagccgtgtttgtggaatggatcgaagagaccgtgctatcttttcgccaggaagtttaatcctgaagcactcgataacctactgaagctgtttacaagttatacatctgtttgagcctatgagtcctacctgattctttgccttgggctttctaatcccacatttttttctgtttatatgtaaattgggaagcccgtatttattgggatctgggcctaaagatatcggtacaactgcaacagctgtgatggcttggagtacagtcctgggtaaatggccacaacaatgtttatagaatgacactgccctgagtgtaatttgtcgtgttcaatgtatgtctccatagtcttccagccaactcctaactcattagttctctattcttggagaacagttttttttttgtcagaatgttatatgatccattctttgtagacacagagattacaacagatgtaccacaaatgcagtcttaattttgtcactattaaatcttttatcaggcgttcaactgtgattatattttcagcaaattaaggccccccttcggaacaaaggaaat

SEQ ID NO: 58335 - DNA, 1422 bp, Zea Mays
cgcctcaactccacctccgcctccaaatccgatcgatctccgaggcctccagatccccggcggccggaagacggcgagctcaaggcggtggacacccctcgcagcgctcgtctcctctcgctctcccaatccccttaccaggttcattgccctttgagaaattgtgggagacgttcttacagggacatgagggaagatactccatctatgtgcacgcatcacgtgaaaagcctgttcatactagttctttgtttgctggtcgggatattcacagtgatgcgatagtatggggattgatttcaatggttgatgctgagaagagactattagcaaatgcactggaagatgttgataatcaagtttttgtcttgctttctgacagctgtgttccgctgcattcatttgattatgtgtataactacctgatgggaacgaatgttagcttcattgattgtttcaaggatccaggtccacatggcagtggaaggtaccctattgagatgtatcctgaaatagacgagagtgattttagaaagggtgcccagtggtttgcagttacgaggagacatgctttaatgattctggctgacagcctgtactacaagaagttcaagctatactgcaagccagcagaagggcgcaactgtattgcagatgagcattatttgccaacgctgttcaatatggtagatcctggtggcatctccaattggtctgttacacatgtggattggtccgagggaaaatggcatccaaggtcatatagtgctgacgatgtcacttatgatctcttgaagaatattacaacaactgatgagaacttccatgtgacaagtgatgacaagaaacttgtgatgcagaagccgtgtttgtggaatggatcgaagagaccgtgctatcttttcgccaggaagtttaatcctgaagcactcgataacctactgaagctgtttacaagttatacatctgtttgagcctatgagtcctacctgattctttgccttgggctttctaatcccacatttttttctgtttatatgtaaattgggaagcccgtatttattgggatctgggcctaaagatatcggtacaactgcaacagctgtgatggcttggagtacagtcctgggtaaatggccacaacaatgtttatagaatgacactgccctgagtgtaatttgtcgtgttcaatgtatgtctccatagtcttccagccaactcctaactcattagttctctattcttggagaacagttttttttttgtcagaatgttatatgatccattctttgtagacacagagattacaacagatgtaccacaaatgcagtcttaattttgtcactattaaatcttttatcaggcgttcaactgtgattatattttcagcaaattaaggccccccttcggaacaaaggaaat

SEQ ID NO: 58336 - DNA, 1381 bp, Zea Mays
cgcctcaactccacctccgcctccaaatccgatcgatctccgaggcctccagatccccggcggccggaagacggcgagctcaaggcggtggacacccctcgcagcgctcgtctcctctcgctctcccaatccccttaccagggacatgagggaagatactccatctatgtgcacgcatcacgtgaaaagcctgttcatactagttctttgtttgctggtcgggatattcacagtgatgcgatagtatggggattgatttcaatggttgatgctgagaagagactattagcaaatgcactggaagatgttgataatcaagtttttgtcttgctttctgacagctgtgttccgctgcattcatttgattatgtgtataactacctgatgggaacgaatgttagcttcattgattgtttcaaggatccaggtccacatggcagtggaaggtaccctattgagatgtatcctgaaatagacgagagtgattttagaaagggtgcccagtggtttgcagttacgaggagacatgctttaatgattctggctgacagcctgtactacaagaagttcaagctatactgcaagccagcagaagggcgcaactgtattgcagatgagcattatttgccaacgctgttcaatatggtagatcctggtggcatctccaattggtctgttacacatgtggattggtccgagggaaaatggcatccaaggtcatatagtgctgacgatgtcacttatgatctcttgaagaatattacaacaactgatgagaacttccatgtgacaagtgatgacaagaaacttgtgatgcagaagccgtgtttgtggaatggatcgaagagaccgtgctatcttttcgccaggaagtttaatcctgaagcactcgataacctactgaagctgtttacaagttatacatctgtttgagcctatgagtcctacctgattctttgccttgggctttctaatcccacatttttttctgtttatatgtaaattgggaagcccgtatttattgggatctgggcctaaagatatcggtacaactgcaacagctgtgatggcttggagtacagtcctgggtaaatggccacaacaatgtttatagaatgacactgccctgagtgtaatttgtcgtgttcaatgtatgtctccatagtcttccagccaactcctaactcattagttctctattcttggagaacagttttttttttgtcagaatgttatatgatccattctttgtagacacagagattacaacagatgtaccacaaatgcagtcttaattttgtcactattaaatcttttatcaggcgttcaactgtgattatattttcagcaaattaaggccccccttcggaacaaaggaaat

SEQ ID NO: 58337 - DNA, 2434 bp, Zea Mays
cgcctcaactccacctccgcctccaaatccgatcgatctccgaggcctccagatccccggcggccggaagacggcgagctcaaggcggtggacacccctcgcagcgctcgtctcctctcgctctcccaatccccttaccagttctacaatgagtatctcattgcgggatcgtattagaaagaggagggaagaagaagaagaagatgacatgatgatatttattgggaagcaaagtattggaaaaaactgcatttagttgatgatccactagaagtttaagctatgtcccactcgagtctttatacagtggtgatgtctcttgttatgctatgttcactgcatgatttttgtttttggcatgtctacaactggttcagctgttcagctgctcattgtggttgcagtcaaccataagattgttgtcttagcacctttgatatgtcttagcaaaaactcccagttcactctttgatatgtctagattgaaccagttcactctttaatatgtcttagcattgaacttgttttagattcaacaaatattcttgtcacggtgccagcaatatattaaatctacattgtgtaatatattgtcaaacaaggcttgggttgctagctttaactgcatggaatggaattagtccaggctgaaacgaacgaactttagtggccaccaggtttcatttcagagccggatctataacagaccaggttccagtgaaccacccggatccactctatatggaccagaaataaatacatgtctgttttcaaaccaaagcaaacgaacgcggccttaaagttcttcaggccctggtgtagcagctgaactacctagtttgatggtgaagaaagagctctaggtgatctaaagatggtgatgagataaaagcaccaaaaagtgtacagtgggatagcaaggatatgactgtcatgatgcctcagcgccaccgggctacggccaagaagcccatgtggataatcgtgctcttgtctatggtttgcatcatgttgattggggcttacgtcttcccaccacggcgcttctctaagtgctacctctctgcttcaagtgtatttattagggatatcctttcaatgcccatgcctatgtcaaaaaatccaaagatcgcccttatgttcttgacaccaggttcattgccctttgagaaattgtgggagacgttcttacagggacatgagggaagatactccatctatgtgcacgcatcacgtgaaaagcctgttcatactagttctttgtttgctggtcgggatattcacagtgatgcgatagtatggggattgatttcaatggttgatgctgagaagagactattagcaaatgcactggaagatgttgataatcaagtttttgtcttgctttctgacagctgtgttccgctgcattcatttgattatgtgtataactacctgatgggaacgaatgttagcttcattgattgtttcaaggatccaggtccacatggcagtggaaggtaccctattgagatgtatcctgaaatagacgagagtgattttagaaagggtgcccagtggtttgcagttacgaggagacatgctttaatgattctggctgacagcctgtactacaagaagttcaagctatactgcaagccagcagaagggcgcaactgtattgcagatgagcattatttgccaacgctgttcaatatggtagatcctggtggcatctccaattggtctgttacacatgtggattggtccgagggaaaatggcatccaaggtcatatagtgctgacgatgtcacttatgatctcttgaagaatattacaacaactgatgagaacttccatgtgacaagtgatgacaagaaacttgtgatgcagaagccgtgtttgtggaatggatcgaagagaccgtgctatcttttcgccaggaagtttaatcctgaagcactcgataacctactgaagctgtttacaagttatacatctgtttgagcctatgagtcctacctgattctttgccttgggctttctaatcccacatttttttctgtttatatgtaaattgggaagcccgtatttattgggatctgggcctaaagatatcggtacaactgcaacagctgtgatggcttggagtacagtcctgggtaaatggccacaacaatgtttatagaatgacactgccctgagtgtaatttgtcgtgttcaatgtatgtctccatagtcttccagccaactcctaactcattagttctctattcttggagaacagttttttttttgtcagaatgttatatgatccattctttgtagacacagagattacaacagatgtaccacaaatgcagtcttaattttgtcactattaaatcttttatcaggcgttcaactgtgattatattttcagcaaattaaggccccccttcggaacaaaggaaat

SEQ ID NO: 58338 - DNA, 1497 bp, Zea Mays
cgcctcaactccacctccgcctccaaatccgatcgatctccgaggcctccagatccccggcggccggaagacggcgagctcaaggcggtggacacccctcgcagcgctcgtctcctctcgctctcccaatccccttaccagttattagggatatcctttcaatgcccatgcctatgtcaaaaaatccaaagatcgcccttatgttcttgacaccaggttcattgccctttgagaaattgtgggagacgttcttacagggacatgagggaagatactccatctatgtgcacgcatcacgtgaaaagcctgttcatactagttctttgtttgctggtcgggatattcacagtgatgcgatagtatggggattgatttcaatggttgatgctgagaagagactattagcaaatgcactggaagatgttgataatcaagtttttgtcttgctttctgacagctgtgttccgctgcattcatttgattatgtgtataactacctgatgggaacgaatgttagcttcattgattgtttcaaggatccaggtccacatggcagtggaaggtaccctattgagatgtatcctgaaatagacgagagtgattttagaaagggtgcccagtggtttgcagttacgaggagacatgctttaatgattctggctgacagcctgtactacaagaagttcaagctatactgcaagccagcagaagggcgcaactgtattgcagatgagcattatttgccaacgctgttcaatatggtagatcctggtggcatctccaattggtctgttacacatgtggattggtccgagggaaaatggcatccaaggtcatatagtgctgacgatgtcacttatgatctcttgaagaatattacaacaactgatgagaacttccatgtgacaagtgatgacaagaaacttgtgatgcagaagccgtgtttgtggaatggatcgaagagaccgtgctatcttttcgccaggaagtttaatcctgaagcactcgataacctactgaagctgtttacaagttatacatctgtttgagcctatgagtcctacctgattctttgccttgggctttctaatcccacatttttttctgtttatatgtaaattgggaagcccgtatttattgggatctgggcctaaagatatcggtacaactgcaacagctgtgatggcttggagtacagtcctgggtaaatggccacaacaatgtttatagaatgacactgccctgagtgtaatttgtcgtgttcaatgtatgtctccatagtcttccagccaactcctaactcattagttctctattcttggagaacagttttttttttgtcagaatgttatatgatccattctttgtagacacagagattacaacagatgtaccacaaatgcagtcttaattttgtcactattaaatcttttatcaggcgttcaactgtgattatattttcagcaaattaaggccccccttcggaacaaaggaaat

SEQ ID NO: 58339 - DNA, 2499 bp, Zea Mays
cgcctcaactccacctccgcctccaaatccgatcgatctccgaggcctccagatccccggcggccggaagacggcgagctcaaggcggtggacacccctcgcagcgctcgtctcctctcgctctcccaatccccttaccagttctacaatgagtatctcattgcgggatcgtattagaaagaggagggaagaagaagaagaagatgacatgatgatatttattgggaagcaaagtattggaaaaaactgcatttagttgatgatccactagaagtttaagctatgtcccactcgagtctttatacagtggtgatgtctcttgttatgctatgttcactgcatgatttttgtttttggcatgtctacaactggttcagctgttcagctgctcattgtggttgcagtcaaccataagattgttgtcttagcacctttgatatgtcttagcaaaaactcccagttcactctttgatatgtctagattgaaccagttcactctttaatatgtcttagcattgaacttgttttagattcaacaaatattcttgtcacggtgccagcaatatattaaatctacattgtgtaatatattgtcaaacaaggcttgggttgctagctttaactgcatggaatggaattagtccaggctgaaacgaacgaactttagtggccaccaggtttcatttcagagccggatctataacagaccaggttccagtgaaccacccggatccactctatatggaccagaaataaatacatgtctgttttcaaaccaaagcaaacgaacgcggccttaaagttcttcaggccctggtgtagcagctgaactacctagtttgatggtgaagaaagagctctaggtgatctaaagatggtgatgagataaaagcaccaaaaagtgtacagtgggatagcaaggatatgactgtcatgatgcctcagcgccaccgggctacggccaagaagcccatgtggataatcgtgctcttgtctatggtttgcatcatgttgattggggcttacgtcttcccaccacggcgcttctctaagtgctacctctctgcttcaagtgtatgtacgtctttcaaggattggctcccttccatgggccatcgggagcgtgctgacgaggagattatttcatctgtagttattagggatatcctttcaatgcccatgcctatgtcaaaaaatccaaagatcgcccttatgttcttgacaccaggttcattgccctttgagaaattgtgggagacgttcttacagggacatgagggaagatactccatctatgtgcacgcatcacgtgaaaagcctgttcatactagttctttgtttgctggtcgggatattcacagtgatgcgatagtatggggattgatttcaatggttgatgctgagaagagactattagcaaatgcactggaagatgttgataatcaagtttttgtcttgctttctgacagctgtgttccgctgcattcatttgattatgtgtataactacctgatgggaacgaatgttagcttcattgattgtttcaaggatccaggtccacatggcagtggaaggtaccctattgagatgtatcctgaaatagacgagagtgattttagaaagggtgcccagttacgaggagacatgctttaatgattctggctgacagcctgtactacaagaagttcaagctatactgcaagccagcagaagggcgcaactgtattgcagatgagcattatttgccaacgctgttcaatatggtagatcctggtggcatctccaattggtctgttacacatgtggattggtccgagggaaaatggcatccaaggtcatatagtgctgacgatgtcacttatgatctcttgaagaatattacaacaactgatgagaacttccatgtgacaagtgatgacaagaaacttgtgatgcagaagccgtgtttgtggaatggatcgaagagaccgtgctatcttttcgccaggaagtttaatcctgaagcactcgataacctactgaagctgtttacaagttatacatctgtttgagcctatgagtcctacctgattctttgccttgggctttctaatcccacatttttttctgtttatatgtaaattgggaagcccgtatttattgggatctgggcctaaagatatcggtacaactgcaacagctgtgatggcttggagtacagtcctgggtaaatggccacaacaatgtttatagaatgacactgccctgagtgtaatttgtcgtgttcaatgtatgtctccatagtcttccagccaactcctaactcattagttctctattcttggagaacagttttttttttgtcagaatgttatatgatccattctttgtagacacagagattacaacagatgtaccacaaatgcagtcttaattttgtcactattaaatcttttatcaggcgttcaactgtgattatattttcagcaaattaaggccccccttcggaacaaaggaaat

SEQ ID NO: 58340 - DNA, 2707 bp, Zea Mays
cgcctcaactccacctccgcctccaaatccgatcgatctccgaggcctccagatccccggcggccggaagacggcgagctcaaggcggtggacacccctcgcagcgctcgtctcctctcgctctcccaatccccttaccagcagcaggggaaaaaacatcgccttaggcctcgttcgttttcagcggatcagcccattccagatcttgttccgagtggaacgaataggcctggtttggaatttgcctggacgacgcgaccgtgcggcggcgactcgacgcaaccagcacggcggcggcgcacagccccgacgacgactctccccactgccttctctccgttctacaatgagtatctcattgcgggatcgtattagaaagaggagggaagaagaagaagaagatgacatgatgatatttattgggaagcaaagtattggaaaaaactgcatttagttgatgatccactagaagtttaagctatgtcccactcgagtctttatacagtggtgatgtctcttgttatgctatgttcactgcatgatttttgtttttggcatgtctacaactggttcagctgttcagctgctcattgtggttgcagtcaaccataagattgttgtcttagcacctttgatatgtcttagcaaaaactcccagttcactctttgatatgtctagattgaaccagttcactctttaatatgtcttagcattgaacttgttttagattcaacaaatattcttgtcacggtgccagcaatatattaaatctacattgtgtaatatattgtcaaacaaggcttgggttgctagctttaactgcatggaatggaattagtccaggctgaaacgaacgaactttagtggccaccaggtttcatttcagagccggatctataacagaccaggttccagtgaaccacccggatccactctatatggaccagaaataaatacatgtctgttttcaaaccaaagcaaacgaacgcggccttaaagttcttcaggccctggtgtagcagctgaactacctagtttgatggtgaagaaagagctctaggtgatctaaagatggtgatgagataaaagcaccaaaaagtgtacagtgggatagcaaggatatgactgtcatgatgcctcagcgccaccgggctacggccaagaagcccatgtggataatcgtgctcttgtctatggtttgcatcatgttgattggggcttacgtcttcccaccacggcgcttctctaagtgctacctctctgcttcaagtgtatgtacgtctttcaaggattggctcccttccatgggccatcgggagcgtgctgacgaggagattatttcatctgtagttattagggatatcctttcaatgcccatgcctatgtcaaaaaatccaaagatcgcccttatgttcttgacaccaggttcattgccctttgagaaattgtgggagacgttcttacagggacatgagggaagatactccatctatgtgcacgcatcacgtgaaaagcctgttcatactagttctttgtttgctggtcgggatattcacagtgatgcgatagtatggggattgatttcaatggttgatgctgagaagagactattagcaaatgcactggaagatgttgataatcaagtttttgtcttgctttctgacagctgtgttccgctgcattcatttgattatgtgtataactacctgatgggaacgaatgttagcttcattgattgtttcaaggatccaggtccacatggcagtggaaggtaccctattgagatgtatcctgaaatagacgagagtgattttagaaagggtgcccagtggtttgcagttacgaggagacatgctttaatgattctggctgacagcctgtactacaagaagttcaagctatactgcaagccagcagaagggcgcaactgtattgcagatgagcattatttgccaacgctgttcaatatggtagatcctggtggcatctccaattggtctgttacacatgtggattggtccgagggaaaatggcatccaaggtcatatagtgctgacgatgtcacttatgatctcttgaagaatattacaacaactgatgagaacttccatgtgacaagtgatgacaagaaacttgtgatgcagaagccgtgtttgtggaatggatcgaagagaccgtgctatcttttcgccaggaagtttaatcctgaagcactcgataacctactgaagctgtttacaagttatacatctgtttgagcctatgagtcctacctgattctttgccttgggctttctaatcccacatttttttctgtttatatgtaaattgggaagcccgtatttattgggatctgggcctaaagatatcggtacaactgcaacagctgtgatggcttggagtacagtcctgggtaaatggccacaacaatgtttatagaatgacactgccctgagtgtaatttgtcgtgttcaatgtatgtctccatagtcttccagccaactcctaactcattagttctctattcttggagaacagttttttttttgtcagaatgttatatgatccattctttgtagacacagagattacaacagatgtaccacaaatgcagtcttaattttgtcactattaaatcttttatcaggcgttcaactgtgattatattttcagcaaattaaggccccccttcggaacaaaggaaat

SEQ ID NO: 58341 - DNA, 1542 bp, Zea Mays
aaaaaacatcgccttaggcctcgttcgttttcagcggatcagcccattccagatcttgttccgagtggaacgaataggcctggtttggaatttggtacagcccattgaaattgttcgtttcggtccgaattgaaatcgtaaccggcctggattaaaatttcacttcaccccacggcccggaaccaacccttctgtcgtaccctctggatcgaagcctggacgacgcgaccgtgcggcggcgactcgacgcaaccagcacggcggcggcgcacagccccgacgacgactctccccactgccttctctccgggacatgagggaagatactccatctatgtgcacgcatcacgtgaaaagcctgttcatactagttctttgtttgctggtcgggatattcacagtgatgcgatagtatggggattgatttcaatggttgatgctgagaagagactattagcaaatgcactggaagatgttgataatcaagtttttgtcttgctttctgacagctgtgttccgctgcattcatttgattatgtgtataactacctgatgggaacgaatgttagcttcattgattggatccaggtccacatggcagtggaaggtaccctattgagatgtatcctgaaatagacgagagtgattttagaaagggtgcccagtggtttgcagttacgaggagacatgctttaatgattctggctgacagcctgtactacaagaagttcaagctatactgcaagccagcagaagggcgcaactgtattgcagatgagcattatttgccaacgctgttcaatatggtagatcctggtggcatctccaattggtctgttacacatgtggattggtccgagggaaaatggcatccaaggtcatatagtgctgacgatgtcacttatgatctcttgaagaatattacaacaactgatgagaacttccatgtgacaagtgatgacaagaaacttgtgatgcagaagccgtgtttgtggaatggatcgaagagaccgtgctatcttttcgccaggaagtttaatcctgaagcactcgataacctactgaagctgtttacaagttatacatctgtttgagcctatgagtcctacctgattctttgccttgggctttctaatcccacatttttttctgtttatatgtaaattgggaagcccgtatttattgggatctgggcctaaagatatcggtacaactgcaacagctgtgatggcttggagtacagtcctgggtaaatggccacaacaatgtttatagaatgacactgccctgagtgtaatttgtcgtgttcaatgtatgtctccatagtcttccagccaactcctaactcattagttctctattcttggagaacagttttttttttgtcagaatgttatatgatccattctttgtagacacagagattacaacagatgtaccacaaatgcagtcttaattttgtcactattaaatcttttatcaggcgttcaactgtgattatattttcagcaaattaaggccccccttcggaacaaaggaaat

SEQ ID NO: 58342 - DNA, 3029 bp, Zea Mays
gcggatcagcccattccagatcttgttccgagtggaacgaataggcctggtttggaatttgcctggacgacgcgaccgtgcggcggcgactcgacgcaaccagcacggcggcggcgcacagccccgacgacgactctccccactgccttctctccgttctacaatgagtatctcattgcgggatcgtattagaaagaggagggaagaagaagaagaagatgacatgatgatatttattgggaagcaaagtattggaaaaaactgcatttagttgatgatccactagaagtttaagctatgtcccactcgagtctttatacagtggtgatgtctcttgttatgctatgttcactgcatgatttttgtttttggcatgtctacaactggttcagctgttcagctgctcattgtggttgcagtcaaccataagattgttgtcttagcacctttgatatgtcttagcaaaaactcccagttcactctttgatatgtctagattgaaccagttcactctttaatatgtcttagcattgaacttgttttagattcaacaaatattcttgtcacggtgccagcaatatattaaatctacattgtgtaatatattgtcaaacaaggcttgggttgctagctttaactgcatggaatggaattagtccaggctgaaacgaacgaactttagtggccaccaggtttcatttcagagccggatctataacagaccaggttccagtgaaccacccggatccactctatatggaccagaaataaatacatgtctgttttcaaaccaaagcaaacgaacgcggccttaaagttcttcaggccctggtgtagcagctgaactacctagtttgatggtgaagaaagagctctaggtgatctaaagatggtgatgagataaaagcaccaaaaagtgtacagtgggatagcaaggatatgactgtcatgatgcctcagcgccaccgggctacggccaagaagcccatgtggataatcgtgctcttgtctatggtttgcatcatgttgattggggcttacgtcttcccaccacggcgcttctctaagtgctacctctctgcttcaagtgtatgtacgtctttcaaggattggctcccttccatgggccatcgggagcgtgctgacgaggagattatttcatctgtagttattagggatatcctttcaatgcccatgcctatgtcaaaaaatccaaagatcgcccttatgttcttgacaccaggttcattgccctttgagaaattgtgggagacgttcttacaggttggtcaaaatgctacttgtctttgtgccacttaagatgtacttgctatttttgaaccacttaaggagtataagtctttcaagggtctttctgtctctttaaactgcaatgcatcatgtccgtcaaatgtagtggatatacttgttttcactgtgtattattgaaatatgagtatatagcattaggccaacatgttgattcccctatgaaccttcattagatagaggtaacaatgctcctagtaagtagtagcctgcataaatattaaatagattacacttatgtaccttcatttgcacatatgttgttttatctgtataaatatgttaagcctacgtataggtaccaaagccggtaatattcctagcaagtagtagcctgtacccactgtaatctcatcccttgttgatactaatcctctgtgtgtttatgtgacataatacttccatatcttatatgattcattgacttagaaaattgaatctctgtgccttcttcgaacagggacatgagggaagatactccatctatgtgcacgcatcacgtgaaaagcctgttcatactagttctttgtttgctggtcgggatattcacagtgatgcgatagtatggggattgatttcaatggttgatgctgagaagagactattagcaaatgcactggaagatgttgataatcaagtttttgtcttgctttctgacagctgtgttccgctgcattcatttgattatgtgtataactacctgatgggaacgaatgttagcttcattgattgtttcaaggatccaggtccacatggcagtggaaggtaccctattgagatgtatcctgaaatagacgagagtgattttagaaagggtgcccagtggtttgcagttacgaggagacatgctttaatgattctggctgacagcctgtactacaagaagttcaagctatactgcaagccagcagaagggcgcaactgtattgcagatgagcattatttgccaacgctgttcaatatggtagatcctggtggcatctccaattggtctgttacacatgtggattggtccgagggaaaatggcatccaaggtcatatagtgctgacgatgtcacttatgatctcttgaagaatattacaacaactgatgagaacttccatgtgacaagtgatgacaagaaacttgtgatgcagaagccgtgtttgtggaatggatcgaagagaccgtgctatcttttcgccaggaagtttaatcctgaagcactcgataacctactgaagctgtttacaagttatacatctgtttgagcctatgagtcctacctgattctttgccttgggctttctaatcccacatttttttctgtttatatgtaaattgggaagcccgtatttattgggatctgggcctaaagatatcggtacaactgcaacagctgtgatggcttggagtacagtcctgggtaaatggccacaacaatgtttatagaatgacactgccctgagtgtaatttgtcgtgttcaatgtatgtctccatagtcttccagccaactcctaactcattagttctctattcttggagaacagttttttttttgtcagaatgttatatgatccattctttgtagacacagagattacaacagatgtaccacaaatgcagtcttaattttgtcactattaaatcttttatcaggcgttcaactgtgattatattttcagcaaattaaggccccccttcggaacaaaggaaat

SEQ ID NO: 58343 - DNA, 1622 bp, Zea Mays
tacagcccattgaaattgttcgtttcggtccgaattgaaatcgtaaccggcctggattaaaatttcacttcaccccacggcccggaaccaacccttctgtcgtaccctctggatcgaagcctggacgacgcgaccgtgcggcggcgactcgacgcaaccagcacggcggcggcgcacagccccgacgacgactctccccactgccttctctccgttctacaatgagtatctcattgcgggatcgtattagaaagaggagggaagaagaagaagaagatgacatgatgatatttattgggaagcaaagtattggaaaaaactgcatttagttgatgatccactagaagtttaagctatgtcccactcgagtctttatacagtgggacatgagggaagatactccatctatgtgcacgcatcacgtgaaaagcctgttcatactagttctttgtttgctggtcgggatattcacagtgatgcgatagtatggggattgatttcaatggttgatgctgagaagagactattagcaaatgcactggaagatgttgataatcaagtttttgtcttgctttctgacagctgtgttccgctgcattcatttgattatgtgtataactacctgatgggaacgaatgttagcttcattgattgtttcaaggatccaggtccacatggcagtggaaggtaccctattgagatgtatcctgaaatagacgagagtgattttagaaagggtgcccagtggtttgcagttacgaggagacatgctttaatgattctggctgacagcctgtactacaagaagttcaagctatactgcaagccagcagaagggcgcaactgtattgcagatgagcattatttgccaacgctgttcaatatggtagatcctggtggcatctccaattggtctgttacacatgtggattggtccgagggaaaatggcatccaaggtcatatagtgctgacgatgtcacttatgatctcttgaagaatattacaacaactgatgagaacttccatgtgacaagtgatgacaagaaacttgtgatgcagaagccgtgtttgtggaatggatcgaagagaccgtgctatcttttcgccaggaagtttaatcctgaagcactcgataacctactgaagctgtttacaagttatacatctgtttgagcctatgagtcctacctgattctttgccttgggctttctaatcccacatttttttctgtttatatgtaaattgggaagcccgtatttattgggatctgggcctaaagatatcggtacaactgcaacagctgtgatggcttggagtacagtcctgggtaaatggccacaacaatgtttatagaatgacactgccctgagtgtaatttgtcgtgttcaatgtatgtctccatagtcttccagccaactcctaactcattagttctctattcttggagaacagttttttttttgtcagaatgttatatgatccattctttgtagacacagagattacaacagatgtaccacaaatgcagtcttaattttgtcactattaaatcttttatcaggcgttcaactgtgattatattttcagcaaattaaggccccccttcggaacaaaggaaat

SEQ ID NO: 58344 - DNA, 1355 bp, Zea Mays
tacagcccattgaaattgttcgtttcggtccgaattgaaatcgtaaccggcctggattaaaatttcacttcaccccacggcccggaaccaacccttctgtcgtaccctctggatcgaagcctggacgacgcgaccgtgcggcggcgactcgacgcaaccagcacggcggcggcgcacagccccgacgacgactctccccactgccttctctccgatagtatggggattgatttcaatggttgatgctgagaagagactattagcaaatgcactggaagatgttgataatcaagtttttgtcttgctttctgacagctgtgttccgctgcattcatttgattatgtgtataactacctgatgggaacgaatgttagcttcattgattgtttcaaggatccaggtccacatggcagtggaaggtaccctattgagatgtatcctgaaatagacgagagtgattttagaaagggtgcccagtggtttgcagttacgaggagacatgctttaatgattctggctgacagcctgtactacaagaagttcaagctatactgcaagccagcagaagggcgcaactgtattgcagatgagcattatttgccaacgctgttcaatatggtagatcctggtggcatctccaattggtctgttacacatgtggattggtccgagggaaaatggcatccaaggtcatatagtgctgacgatgtcacttatgatctcttgaagaatattacaacaactgatgagaacttccatgtgacaagtgatgacaagaaacttgtgatgcagaagccgtgtttgtggaatggatcgaagagaccgtgctatcttttcgccaggaagtttaatcctgaagcactcgataacctactgaagctgtttacaagttatacatctgtttgagcctatgagtcctacctgattctttgccttgggctttctaatcccacatttttttctgtttatatgtaaattgggaagcccgtatttattgggatctgggcctaaagatatcggtacaactgcaacagctgtgatggcttggagtacagtcctgggtaaatggccacaacaatgtttatagaatgacactgccctgagtgtaatttgtcgtgttcaatgtatgtctccatagtcttccagccaactcctaactcattagttctctattcttggagaacagttttttttttgtcagaatgttatatgatccattctttgtagacacagagattacaacagatgtaccacaaatgcagtcttaattttgtcactattaaatcttttatcaggcgttcaactgtgattatattttcagcaaattaaggccccccttcggaacaaaggaaat

SEQ ID NO: 58345 - DNA, 1858 bp, Zea Mays
ctgaaacgaacgaactttagtggccaccaggtttcatttcagagccggatctataacagaccaggttccagtgaaccacccggatccactctatatggaccagaaataaatacatgtctgttttcaaaccaaagcaaacgaacgcggccttaaagttcttcaggccctggtgtagcagctgaactacctagtttgatggtgaagaaagagctctaggtgatctaaagatggtgatgagataaaagcaccaaaaagtgtacagtgggatagcaaggatatgactgtcatgatgcctcagcgccaccgggctacggccaagaagcccatgtggataatcgtgctcttgtctatggtttgcatcatgttgattggggcttacgtcttcccaccacggcgcttctctaagtgctacctctctgcttcaagtgtatgtacgtctttcaaggattggctcccttccatgggccatcgggagcgtgctgacgaggagattatttcatctgtagttattagggatatcctttcaatgcccatgcctatgtcaaaaaatccaaagatcgcccttatgttcttgacaccaggttcattgccctttgagaaattgtgggagacgttcttacagggacatgagggaagatactccatctatgtgcacgcatcacgtgaaaagcctgttcatactagttctttgtttgctggtcgggatattcacagtgatgcgtatggggattgatttcaatggttgatgctgagaagagactattagcaaatgcactggaagatgttgataatcaagtttttgtcttgctttctgacagctgtgttccgctgcattcatttgattatgtgtataactacctgatgggaacgaatgttagcttcattgattgtttcaaggatccaggtccacatggcagtggaaggtaccctattgagatgtatcctgaaatagacgagagtgattttagaaagggtgcccagtggtttgcagttacgaggagacatgctttaatgattctggctgacagcctgtactacaagaagttcaagctatactgcaagccagcagaagggcgcaactgtattgcagatgagcattatttgccaacgctgttcaatatggtagatcctggtggcatctccaattggtctgttacacatgtggattggtccgagggaaaatggcatccaaggtcatatagtgctgacgatgtcacttatgatctcttgaagaatattacaacaactgatgagaacttccatgtgacaagtgatgacaagaaacttgtgatgcagaagccgtgtttgtggaatggatcgaagagaccgtgctatcttttcgccaggaagtttaatcctgaagcactcgataacctactgaagctgtttacaagttatacatctgtttgagcctatgagtcctacctgattctttgccttgggctttctaatcccacatttttttctgtttatatgtaaattgggaagcccgtatttattgggatctgggcctaaagatatcggtacaactgcaacagctgtgatggcttggagtacagtcctgggtaaatggccacaacaatgtttatagaatgacactgccctgagtgtaatttgtcgtgttcaatgtatgtctccatagtcttccagccaactcctaactcattagttctctattcttggagaacagttttttttttgtcagaatgttatatgatccattctttgtagacacagagattacaacagatgtaccacaaatgcagtcttaattttgtcactattaaatcttttatcaggcgttcaactgtgattatattttcagcaaattaaggccccccttcggaacaaaggaaat

SEQ ID NO: 58346 - DNA, 1492 bp, Zea Mays
atgactgtcatgatgcctcagcgccaccgggctacggccaagaagcccatgtggataatcgtgctcttgtctatggtttgcatcatgttgattggggcttacgtcttcccaccacggcgcttctctaagtgctacctctctgcttcaagtttattagggatatcctttcaatgcccatgcctatgtcaaaaaatccaaagatcgcccttatgttcttgacaccaggttcattgccctttgagaaattgtgggagacgttcttacagggacatgagggaagatactccatctatgtgcacgcatcacgtgaaaagcctgttcatactagttctttgtttgctggtcgggatattcacagtgatgcgatagtatggggattgatttcaatggttgatgctgagaagagactattagcaaatgcactggaagatgttgataatcaagtttttgtcttgctttctgacagctgtgttccgctgcattcatttgattatgtgtataactacctgatgggaacgaatgttagcttcattgattggtccacatggcagtggaaggtaccctattgagatgtatcctgaaatagacgagagtgattttagaaagggtgcccagtggtttgcagttacgaggagacatgctttaatgattctggctgacagcctgtactacaagaagttcaagctatactgcaagccagcagaagggcgcaactgtattgcagatgagcattatttgccaacgctgttcaatatggtagatcctggtggcatctccaattggtctgttacacatgtggattggtccgagggaaaatggcatccaaggtcatatagtgctgacgatgtcacttatgatctcttgaagaatattacaacaactgatgagaacttccatgtgacaagtgatgacaagaaacttgtgatgcagaagccgtgtttgtggaatggatcgaagagaccgtgctatcttttcgccaggaagtttaatcctgaagcactcgataacctactgaagctgtttacaagttatacatctgtttgagcctatgagtcctacctgattctttgccttgggctttctaatcccacatttttttctgtttatatgtaaattgggaagcccgtatttattgggatctgggcctaaagatatcggtacaactgcaacagctgtgatggcttggagtacagtcctgggtaaatggccacaacaatgtttatagaatgacactgccctgagtgtaatttgtcgtgttcaatgtatgtctccatagtcttccagccaactcctaactcattagttctctattcttggagaacagttttttttttgtcagaatgttatatgatccattctttgtagacacagagattacaacagatgtaccacaaatgcagtcttaattttgtcactattaaatcttttatcaggcgttcaactgtgattatattttcagcaaattaaggccccccttcggaacaaaggaaat

SEQ ID NO: 58347 - DNA, 830 bp, Zea Mays
aaacatgtgaagcttaagaggggcatacattcaaccagcagaagggcgcaactgtattgcagatgagcattatttgccaacgctgttcaatatggtagatcctggtggcatctccaattggtctgttacacatgtggattggtccgagggaaaatggcatccaaggtcatatagtgctgacgatgtcacttatgatctcttgaagaatattacaacaactgatgagaacttccatgtgacaagtgatgacaagaaacttgtgatgcagaagccgtgtttgtggaatggatcgaagagaccgtgctatcttttcgccaggaagtttaatcctgaagcactcgataacctactgaagctgtttacaagttatacatctgtttgagcctatgagtcctacctgattctttgccttgggctttctaatcccacatttttttctgtttatatgtaaattgggaagcccgtatttattgggatctgggcctaaagatatcggtacaactgcaacagctgtgatggcttggagtacagtcctgggtaaatggccacaacaatgtttatagaatgacactgccctgagtgtaatttgtcgtgttcaatgtatgtctccatagtcttccagccaactcctaactcattagttctctattcttggagaacagttttttttttgtcagaatgttatatgatccattctttgtagacacagagattacaacagatgtaccacaaatgcagtcttaattttgtcactattaaatcttttatcaggcgttcaactgtgattatattttcagcaaattaaggccccccttcggaacaaaggaaat

SEQ ID NO: 58348 - DNA, 299 bp, Zea Mays
gcggcggacccgtacccggcctcgtcgtccggcggcgggggtcccgcggccgcgaggcggagctgagcggtgctacgtaggttaggtccttcgcttcgcctctgttttgcggtcctgcacctcgcgctcggctctctcgtgctgctctgctgtccgctgcagcgctttgtgagaagagcgagggtagattccttggagcttggaggtgaggtgatggatggtcgatggtggaaacggttggctatactagagctcggcgcggcgcgtatttaaggaggagaggaggaggccgggagtgg

SEQ ID NO: 58349 - DNA, 699 bp, Zea Mays
atggactcgggcggtggcggagaggaagaatgcggtgggggaggtggatgcggcgcttgtatcgattgtgaaggtggagaaagcggcgcctgtatcggcggcggcggcggcggcgaacgcggcgcctgtatcatcggtggcgatgggggcgccaacgaggcagggggagacggcgggggtggggaaggtgaaggtgacatatgtatcactggcggcgagggcgcggatggttgtgacggtgatagtaacggagcaagtggcggcgaaaccgtcgtagctgtccggatcgctggggacgggagccaggtgaggcggttcacggagagcgcccgcggggaggcattggaacggaggaggagagggagcacgagcgggaggatgaacgggacagaggccaatgcggctgcgatcgggacggcgaggcgccaggggagccacggcgtggacggcatcggggaagccggcaaccggtgcggtgtgagctgtccccggcccgcggcgggggtgcgaatggggtggatcttgcgagggcgatgggatgggacggtcgagaagggtggcgggactcgcgcctgccagttgacttccggtgacagtgaaatttttatgtgggccccagagatcgtggctcgttacagaatgcagagtgctcatggctccaattgtgtcgatgtcgacgggccgacctctggcctgtga

SEQ ID NO: 58350 - DNA, 3442 bp, Zea Mays
cccgcccggccgccgcagcgagcagcacgtccaccttctccatctacacgccgctcatgctccaccgcctcgcccacacccgcgtgtgccacttcttcatcatccccacaccccgcgcgttctccaacgctcccgctgccactccacccgctgcgccgccgctctcggccgcggacctcgagcaactcctccgccgctgtcactactctgcctccagccaccgcttccactctcttctccccctcctctcgcacccctccgtcctcctctcctgcgcgctccacctaagccaccgcgcgcacccatccctccccgtcccgccccagcccccaccaatcaccattgccgccgctgccgccgcgttctcatccccatcatcccacctccgcctcctcctcccgtcccgcatcaagggccagccgcttcccgtccccacgctaccgctccgcctcgctttgcgctgcgccgcctccgtcctcgacgccgtgttcgccccgcgcgcagccaccttcgcttaccgcggccgccacacagctgtccgatacctcaagtccattcccagcgcgtcctggttcttccgtgtcgccatcccgcggcagcccttcgcccctcgccacgtttgccgtctgctcggtgccatctccagtaaggtcgatgatcccgggttcctggagttcctgaacgaactgttcgtctctgatgcggtcgcatttgagcttggtggttgcgagctcggacgcgggctgccacaggaatcagagctcactagcacgctagtgaacatattcttcaatcgtgtggatggagagataatggccctccgtgaggaagtgcacaaaaaacatcctagaatgaaagatgacagcgttcggcatacacctgtgagagtatatgcgattcgatatctagatgatattctggttgtgacgtccgggtcgaagatgctcacaattgagatcaggaacaggataattgcagtcttggagagggatttagaggtgagggtggacagattggggagctcaatccacagcgctgtatcagagaagattgagttcctggggatagaattccaagctgtgccaccgtcagtgttgcacccacccatgtcagagaaagcaaagagagcaaggaagaagtatctgaagatgaaggcggaaaaggcgcaggagctgaaaaatgcacgggagacgaggcggaagaagcttggcttgaagatactgaaccacttgtccaagaggatgaggaggggcgaggagtttgaatttgatttccggatcgagaaagaggtgcagcaagtgttcagggactgggcagaggagacagtggccgaatacttcgaatcacgtgagcattgccgatattggcaccgactgctagcatcaggtgatttcttgtcattgaacagggtgagagatcaattgccacctgctttggtggactcatatgataaatttcaagagacaatcgacaagtttttgatgcccatgaaaggtcatgacctgacagaagaagaggagattctagctgaggaggaagaagaggaacaatatgagaaacggattgtcgaggacttgacagagcttaagatgagggccaatgtgccgatagatcttgtaaggaaggaggtaaagcttgctggattcacaaattccatgggccggccacggccaattaagctacttctctgtttggatgatgcagatatcatcaaatggtatgctggcgtagggaggaggtggctagatttcttctgctgttgccgtaacttcaagatggtcaagactgttgtcacttaccacttgaggttctcctgctttttgacattagcagagaagcacgagtgcactaagaagcaagcaattagccatttcacaaaggatttaaaggtagcaaatgataatggaatggcagaagtgcacttcccaatggaacgcgagatcaaaatgatgggtgataaaaacttgtctgacccaaagcctgtggatggtgccttgacgatgacattagtaagattagcagttgatgacgcctcctatccatgcctagcacatttttgtgctaaaacagaaactgtgctttacagaatacgtttgttgcaaaatcgcctaaatgttgatccattgaatgaaaagaaatgggtccatggattaggtgccattcatgagagcctgaacaagaaatgtctccccttgtgctatatgcacgcaagtgatctctttcttggcaagatcacacttcaagatattgactgcactcaatttgttgatgtggaatgagagaaaagcttatttgcgcaatacttcttgcagattatagctcatgtagtattgcaggacttcttgcagattatagctcatgtagtattgcaggtcctgcccagtgcattggatattagtttttttactaatgcttcatcatgtctgtttcaatacattgtagaagaaatgttgctttgtccccaaagatactagcttttcatgtatatatatgtaggggtctcgagagccttctaggcatcagaacattacaaattgaaatactgcatgcagtgtgtggacttcaagcaaactatgtatatatatatcatgatatcaacaatactcacttcagggaggtgcctcatagagcccccgcttgatctgtggtcgggatcggattagccgctatgcatctcatggtgtatgctgttgaagcctgtgaaattgttgtccacgtaatatgtcattcgatgtagttttcttttcagttcaagttgctcaggcacacgttcattttggagtcatatgggagcaaatagaacccacattcctaccattgactccagtacagtgtgctgtcgtggggtgaataaaagcagctaaacagacaatgttttgtaagatctaagttgtatcgtttgtattctgatgagaagaagaaaaaggcttgcacacctgacaacagatgaagttaggttacctcagaagtcatcaacctgtgcatcagggtttcttatatgtctgctgctgattacagtcaccttctcgtaggtttctactcagctaggcagatacgttatcactatgatgagcagtggtgttgtacttggggttggatttcatctgtcatgttagccatatacttatgcctctcgtttcatttcacttttggtataacctgaaattgcaatctaattaaataggctattgtttatccccatttaagtggagacagtcaaatgaacaaactaatttggtacagctagcttggtgggggtgattatcggcacaatgataggtgcaaacagtgtcctagaggaacactgcaaagctagactagacctcacaatattgtcataactagaaggtaatttgtaaacattgatgttgtgtgtcatatctcctaactatatatgtgttgttttctgaatccagactagattgtttgtgtaatagcctgg

SEQ ID NO: 58351 - DNA, 3011 bp, Zea Mays
atgctccaccgcctcgcccacacccgcgtgtgccacttcttcatcatccccacaccccgcgcgttctccaacgctcccgctgccactccacccgctgcgccgccgctctcggccgcggacctcgagcaactcctccgccgctgtcactactctgcctccagccaccgcttccactctcttctccccctcctctcgcacccctccgtcctcctctcctgcgcgctccacctaagccaccgcgcgcacccatccctccccgtcccgccccagcccccaccaatcaccattgccgccgctgccgccgcgttctcatccccatcatcccacctccgcctcctcctcccgtcccgcatcaagggccagccgcttcccgtccccacgctaccgctccgcctcgctttgcgctgcgccgcctccgtcctcgacgccgtgttcgccccgcgcgcagccaccttcgcttaccgcggccgccacacagctgtccgatacctcaagtccattcccagcgcgtcctggttcttccgtgtcgccatcccgcggcagcccttcgcccctcgccacgtttgccgtctgctcggtgccatctccagtaaggtcgatgatcccgggttcctggagttcctgaacgaactgttcgtctctgatgcggtcgcatttgagcttggtggttgcgagctcggacgcgggctgccacaggaatcagagctcactagcacgctagtgaacatattcttcaatcgtgtggatggagagataatggccctccgtgaggaagtgcacaaaaaacatcctagaatgaaagatgacagcgttcggcatacacctgtgagagtatatgcgattcgatatctagatgatattctggttgtgacgtccgggtcgaagatgctcacaattgagatcaggaacaggataattgcagtcttggagagggatttagaggtgagggtggacagattggggagctcaatccacagcgctgtatcagagaagattgagttcctggggatagaattccaagctgtgccaccgtcagtgttgcacccacccatgtcagagaaagcaaagagagcaaggaagaagtatctgaagatgaaggcggaaaaggcgcaggagctgaaaaatgcacgggagacgaggcggaagaagcttggcttgaagatactgaaccacttgtccaagaggatgaggaggggcgaggagtttgaatttgatttccggatcgagaaagaggtgcagcaagtgttcagggactgggcagaggagacagtggccgaatacttcgaatcacgtgagcattgccgatattggcaccgactgctagcatcaggtcatgacctgacagaagaagaggagattctagctgaggaggaagaagaggaacaatatgagaaacggattgtcgaggacttgacagagcttaagatgagggccaatgtgccgatagatcttgtaaggaaggagatatcatcaaatggtatgctggcgtagggaggaggtggctagatttcttctgctgttgccgtaacttcaagatggtcaagactgttgtcacttaccacttgaggttctcctgctttttgacattagcagagaagcacgagtgcactaagaagcaagcaattagccatttcacaaaggatttaaaggtagcaaatgataatggaatggcagaagtgcacttcccaatggaacgcgagatcaaaatgatgggtgataaaaacttgtctgacccaaagcctgtggatggtgccttgacgatgacattagtaagattagcagttgatgacgcctcctatccatgcctagcacatttttgtgctaaaacagaaactgtgctttacagaatacgtttgttgcaaaatcgcctaaatgttgatccattgaatgaaaagaaatgggtccatggattaggtgccattcatgagagcctgaacaagaaatgtctccccttgtgctatatgcacgcaagtgatctctttcttggcaagatcacacttcaagatattgactgcactcaatttgttgatgtggaatgagagaaaagcttatttgcgcaatacttcttgcagattatagctcatgtagtattgcaggacttcttgcagattatagctcatgtagtattgcaggggtctcgagagccttctaggcatcagaacattacaaattgaaatactgcatgcagtgtgtggacttcaagcaaactatgtatatatatatcatgatatcaacaatactcacttcaggtgtatgctgttgaagcctgtgaaattgttgtccacgtaatatgtcattcgatgtagttttcttttcagttcaagttgctcaggcacacgttcattttggagtcatatgggagcaaatagaacccacattcctaccattgactccagtacagtgtgctgtcgtggggtgaataaaagcagctaaacagacaatgttttgtaagatctaagttgtatcgtttgtattctgatgagaagaagaaaaaggcttgcacacctgacaacagatgaagttaggttacctcagaagtcatcaacctgtgcatcagggtttcttatatgtctgctgctgattacagtcaccttctcgtaggtttctactcagctaggcagatacgttatcactatgatgagcagtggtgttgtacttggggttggatttcatctgtcatgttagccatatacttatgcctctcgtttcatttcacttttggtataacctgaaattgcaatctaattaaataggctattgtttatccccatttaagtggagacagtcaaatgaacaaactaatttggtacagctagcttggtgggggtgattatcggcacaatgataggtgcaaacagtgtcctagaggaacactgcaaagctagactagacctcacaatattgtcataactagaaggtaatttgtaaacattgatgttgtgtgtcatatctcctaactatatatgtgttgttttctgaatccagactagattgtttgtgtaatagcctgg

SEQ ID NO: 58352 - DNA, 4433 bp, Zea Mays
atgctccaccgcctcgcccacacccgcgtgtgccacttcttcatcatccccacaccccgcgcgttctccaacgctcccgctgccactccacccgctgcgccgccgctctcggccgcggacctcgagcaactcctccgccgctgtcactactctgcctccagccaccgcttccactctcttctccccctcctctcgcacccctccgtcctcctctcctgcgcgctccacctaagccaccgcgcgcacccatccctccccgtcccgccccagcccccaccaatcaccattgccgccgctgccgccgcgttctcatccccatcatcccacctccgcctcctcctcccgtcccgcatcaagggccagccgcttcccgtccccacgctaccgctccgcctcgctttgcgctgcgccgcctccgtcctcgacgccgtgttcgccccgcgcgcagccaccttcgcttaccgcggccgccacacagctgtccgatacctcaagtccattcccagcgcgtcctggttcttccgtgtcgccatcccgcggcagcccttcgcccctcgccacgtttgccgtctgctcggtgccatctccagtaaggtcgatgatcccgggttcctggagttcctgaacgaactgttcgtctctgatgcggtcgcatttgagcttggtggttgcgagctcggacgcgggctgccacaggaatcagagctcactagcacgctagtgaacatattcttcaatcgtgtggatggagagataatggccctccgtgaggaagtgcacaaaaaacatcctagaatgaaagatgacagcgttcggcatacacctgtgagagtatatgcgattcgatatctagatgatattctggttgtgacgtccgggtcgaagatgctcacaattgagatcaggaacaggataattgcagtcttggagagggatttagaggtgagggtggacagattggggagctcaatccacagcgctgtatcagagaagattgagttcctggggatagaattccaagctgtgccaccgtcagtgttgcacccacccatgtcagagaaagcaaagagagcaaggaagaagtatctgaagatgaaggcggaaaaggcgcaggagctgaaaaatgcacgggagacgaggcggaagaagcttggcttgaagatactgaaccacttgtccaagaggatgaggaggggcgaggagtttgaatttgatttccggatcgagaaagaggtgcagcaagtgttcagggactgggcagaggagacagtggccgaatacttcgaatcacgtgagcattgccgatattggcaccgactgctagcatcaggtcatgacctgacagaagaagaggagattctagctgaggaggaagaagaggaacaatatgagaaacggattgtcgaggacttgacagagcttaagatgagggccaatgtgccgatagatcttgtaaggaaggagatatcatcaaatggtatgctggcgtagggaggaggtggctagatttcttctgctgttgccgtaacttcaagatggtcaagactgttgtcacttaccacttgaggttctcctgctttttgacattagcagagaagcacgagtgcactaagaagcaagcaattagccatttcacaaaggatttaaaggtagcaaatgataatggaatggcagaagtgcacttcccaatggaacgcgagatcaaaatgatgggtgataaaaacttgtctgacccaaagcctgtggatggtgccttgacgatgacattagtaagattagcagttgatgacgcctcctatccatgcctagcacatttttgtgctaaaacagaaactgtgctttacagaatacgtttgttgcaaaatcgcctaaatgttgatccattgaatgaaaagaaatgggtccatggattaggtgccattcatgagagcctgaacaagaaatgtctccccttgtgctatatgcacgcaagtgatctctttcttggcaagatcacacttcaagatattgactgcactcaatttgttgatgtggaatgagagaaaagcttatttgcgcaatacttcttgcagattatagctcatgtagtattgcaggacttcttgcagattatagctcatgtagtattgcaggggtctcgagagccttctaggcatcagaacattacaaattgaaatactgcatgcagtgtgtggacttcaagcaaactatgtatatatatatcatgatatcaacaatactcacttcaggtaattcttccattccgtctgttcttaaattatttatatatgttccagaaacaaatgaaatttagttatatgccaagtagcctattcttcctctgttgtttcgtcttcacttctgaatcattttgtttagtattagtcaattctgtttcttacttatgaatcaaatacttgttaactctaaaaaaatggatgccttctgaatctcttatgagttaaatacttaaatggtctcattgcttcctctttttttgtcagaataatataatttaccttagtgccactaaaactggtttcttaaactttaaatctttctgcacagtgactgtaccaatatttttttttctaaatactaattccgttatgaaatattttaaaaggaaaaccagctaccttttgctaatcagtcaagggtaagtttttcccgaaacaagattttggtctccagaattgaaatatggcttttgtttcttgggtgactaccttttttttaaaaaaaaacaggaatatactctataataaatactaccacctgacacggagcttgatcctcgtgtgagctttccttgtgtagggcttcaagagctttccttgtgtagggcttcaacgagaatctctactaagtctgcaagggtagcataccattctttgttctgcatgtcattccttgttctgccatccctattctgcgattcagattcccattcctattccctgttatgcgattcccattctcgtttgtgcggcgtccgctgctccctcctcccttcaccacgcgacgcagcgacacgacgactgttctctcctccctcactcgccctctcctcccttccccatggcgtcttcgcgtctccgatcgatccaagccaccatggattttttcaaatccatcctcgccgagctcgatccgccacagatttctccgatcgatctgaaccgtagcctccccacaggtggagcaggagccagaacttgtcaaattcacctcctccagcggcgacgggtggggcttcgatgacctgctgaagacgctaacccgatcgatgtcctgtatagccgcttcgaggcgcagatgcgcacgctccaggcagatctggccacattcacatccgaccctgaggatgtcgactctgcatcgtcgctgaggacaggtcactactcgatcgtcgtaggtcggcggaggcaggggaggagacacaacgcacacacgccggtggcagggccgacccccacacgccgggtctaacccgatcctcgtcgtctgtggttacttcagtgtcatcacggccaccaccgtgcttctctgtgttgccgtcaacgtcgtctccgccacccagtccttccacgctggctatgacggaggtgcctcatagagcccccgcttgatctgtggtcgggatcggattagccgctatgcatctcatggtgtatgctgttgaagcctgtgaaattgttgtccacgtaatatgtcattcgatgtagttttcttttcagttcaagttgctcaggcacacgttcattttggagtcatatgggagcaaatagaacccacattcctaccattgactccagtacagtgtgctgtcgtggggtgaataaaagcagctaaacagacaatgttttgtaagatctaagttgtatcgtttgtattctgatgagaagaagaaaaaggcttgcacacctgacaacagatgaagttaggttacctcagaagtcatcaacctgtgcatcagggtttcttatatgtctgctgctgattacagtcaccttctcgtaggtttctactcagctaggcagatacgttatcactatgatgagcagtggtgttgtacttggggttggatttcatctgtcatgttagccatatacttatgcctctcgtttcatttcacttttggtataacctgaaattgcaatctaattaaataggctattgtttatccccatttaagtggagacagtcaaatgaacaaactaatttggtacagctagcttggtgggggtgattatcggcacaatgataggtgcaaacagtgtcctagaggaacactgcaaagctagactagacctcacaatattgtcataactagaaggtaatttgtaaacattgatgttgtgtgtcatatctcctaactatatatgtgttgttttctgaatccagactagattgtttgtgtaatagcctgg

SEQ ID NO: 58353 - DNA, 4424 bp, Zea Mays
atgctccaccgcctcgcccacacccgcgtgtgccacttcttcatcatccccacaccccgcgcgttctccaacgctcccgctgccactccacccgctgcgccgccgctctcggccgcggacctcgagcaactcctccgccgctgtcactactctgcctccagccaccgcttccactctcttctccccctcctctcgcacccctccgtcctcctctcctgcgcgctccacctaagccaccgcgcgcacccatccctccccgtcccgccccagcccccaccaatcaccattgccgccgctgccgccgcgttctcatccccatcatcccacctccgcctcctcctcccgtcccgcatcaagggccagccgcttcccgtccccacgctaccgctccgcctcgctttgcgctgcgccgcctccgtcctcgacgccgtgttcgccccgcgcgcagccaccttcgcttaccgcggccgccacacagctgtccgatacctcaagtccattcccagcgcgtcctggttcttccgtgtcgccatcccgcggcagcccttcgcccctcgccacgtttgccgtctgctcggtgccatctccagtaaggtcgatgatcccgggttcctggagttcctgaacgaactgttcgtctctgatgcggtcgcatttgagcttggtggttgcgagctcggacgcgggctgccacaggaatcagagctcactagcacgctagtgaacatattcttcaatcgtgtggatggagagataatggccctccgtgaggaagtgcacaaaaaacatcctagaatgaaagatgacagcgttcggcatacacctgtgagagtatatgcgattcgatatctagatgatattctggttgtgacgtccgggtcgaagatgctcacaattgagatcaggaacaggataattgcagtcttggagagggatttagaggtgagggtggacagattggggagctcaatccacagcgctgtatcagagaagattgagttcctggggatagaattccaagctgtgccaccgtcagtgttgcacccacccatgtcagagaaagcaaagagagcaaggaagaagtatctgaagatgaaggcggaaaaggcgcaggagctgaaaaatgcacgggagacgaggcggaagaagcttggcttgaagatactgaaccacttgtccaagaggatgaggaggggcgaggagtttgaatttgatttccggatcgagaaagaggtgcagcaagtgttcagggactgggcagaggagacagtggccgaatacttcgaatcacgtgagcattgccgatattggcaccgactgctagcatcaggtcatgacctgacagaagaagaggagattctagctgaggaggaagaagaggaacaatatgagaaacggattgtcgaggacttgacagagcttaagatgagggccaatgtgccgatagatcttgtaaggaaggagatatcatcaaatggtatgctggcgtagggaggaggtggctagatttcttctgctgttgccgtaacttcaagatggtcaagactgttgtcacttaccacttgaggttctcctgctttttgacattagcagagaagcacgagtgcactaagaagcaagcaattagccatttcacaaaggatttaaaggtagcaaatgataatggaatggcagaagtgcacttcccaatggaacgcgagatcaaaatgatgggtgataaaaacttgtctgacccaaagcctgtggatggtgccttgacgatgacattagtaagattagcagttgatgacgcctcctatccatgcctagcacatttttgtgctaaaacagaaactgtgctttacagaatacgtttgttgcaaaatcgcctaaatgttgatccattgaatgaaaagaaatgggtccatggattaggtgccattcatgagagcctgaacaagaaatgtctccccttgtgctatatgcacgcaagtgatctctttcttggcaagatcacacttcaagatattgactgcactcaatttgttgatgtggaatgagagaaaagcttatttgcgcaatacttcttgcagattatagctcatgtagtattgcaggacttcttgcagattatagctcatgtagtattgcaggggtctcgagagccttctaggcatcagaacattacaaattgaaatactgcatgcagtgtgtggacttcaagcaaactatgtatatatatatcatgatatcaacaatactcacttcaggtaattcttccattccgtctgttcttaaattatttatatatgttccagaaacaaatgaaatttagttatatgccaagtagcctattcttcctctgttgtttcgtcttcacttctgaatcattttgtttagtattagtcaattctgtttcttacttatgaatcaaatacttgttaactctaaaaaaatggatgccttctgaatctcttatgagttaaatacttaaatggtctcattgcttcctctttttttgtcagaataatataatttaccttagtgccactaaaactggtttcttaaactttaaatctttctgcacagtgactgtaccaatatttttttttctaaatactaattccgttatgaaatattttaaaaggaaaaccagctaccttttgctaatcagtcaagggtaagtttttcccgaaacaagattttggtctccagaattgaaatatggcttttgtttcttgggtgactaccttttttttaaaaaaaaacaggaatatactctataataaatactaccacctgacacggagcttgatcctcgtgtgagctttccttgtgtagggcttcaagagctttccttgtgtagggcttcaacgagaatctctactaagtctgcaagggtagcataccattctttgttctgcatgtcattccttgttctgccatccctattctgcgattcagattcccattcctattccctgttatgcgattcccattctcgtttgtgcggcgtccgctgctccctcctcccttcaccacgcgacgcagcgacacgacgactgttctctcctccctcactcgccctctcctcccttccccatggcgtcttcgcgtctccgatcgatccaagccaccatggattttttcaaatccatcctcgccgagctcgatccgccacagatttctccgatcgatctgaaccgtagcctccccacaggtggagcaggagccagaacttgtcaaattcacctcctccagcggcgacgggtggggcttcgatgacctgctgaagacgctaacccgatcgatgtcctgtatagccgcttcgaggcgcagatgcgcacgctccaggcagatctggccacattcacatccgaccctgaggatgtcgactctgcatcgtcgctgaggacaggtcactactcgatcgtcgtaggtcggcggaggcaggggaggagacacaacgcacacacgccggtggcagggccgacccccacacgccgggtctaacccgatcctcgtcgtctgtggttacttcagtgtcatcacggccaccaccgtgcttctctgtgttgccgtcaacgtcgtctccgccacccagtccttccacgctggctatgacgtgcgtggaacgccccgcttgccctgttccattccagtgcaactttccctctcctggatccggctggttcggggaggtgcctcatagagcccccgcttgatctgtggtcgggatcggattagccgctatgcatctcatggtgtatgctgttgaagcctgtgaaattgttgtccacgtaatatgtcattcgatgtagttttcttttcagttcaagttgctcaggcacacgttcattttggagtcatatgggagcaaatagaacccacattcctaccattgactccagtacagtgtgctgtcgtggggtgaataaaagcagctaaacagacaatgttttgtaagatctaagttgtatcgtttgtattctgatgagaagaagaaaaaggcttgcacacctgacaacagatgaagtttctactcagctaggcagatacgttatcactatgatgagcagtggtgttgtacttggggttggatttcatctgtcatgttagccatatacttatgcctctcgtttcatttcacttttggtataacctgaaattgcaatctaattaaataggctattgtttatccccatttaagtggagacagtcaaatgaacaaactaatttggtacagctagcttggtgggggtgattatcggcacaatgataggtgcaaacagtgtcctagaggaacactgcaaagctagactagacctcacaatattgtcataactagaaggtaatttgtaaacattgatgttgtgtgtcatatctcctaactatatatgtgttgttttctgaatccagactagattgtttgtgtaatagcctgg

SEQ ID NO: 58354 - DNA, 212 bp, Zea Mays
cctatatatggcttgtgccatctggtgcttcattctcatatgaagttctgagcttaggttgcccagagcttggtgcgctgcttaacttcagtctgaattactcatctgtcgtgtgcctttgttcttggcatgtacgcctagcgatgtggaaaggccggtgcatccgtagctcttgtggagcattatttctgaagaaattggctaagaccttg

SEQ ID NO: 58355 - DNA, 1610 bp, Zea Mays
cttttctctctctctctctctcactctctactaaattgacagtacaatgaaaaataggcaagaatcctggtcatgacaatcattcctgaccactagcacgatcaaacttgcccctgtatgtaaggtaacatgcatgcatcatgacagcgcctgaagaagtggtcatcggactgtgagagtgagatctgcagtcttcactgattcactctaactgtccagaccttaaacccctcctgtcctccaattcctctcgcgctctctatatctacgtgccacacgccgtgcggtaccagtgcttgcgcgtgtacgtacgtacgtgtatcggcgcacgcatgatggctcctaccacctccttgctcgcgctcgtgttcctcttcctcctgcccgccgccgccgtcgccgccccaccggctaccggcgacgccgccgccttcaacgtgacggagatcctcagccggtacccggagttcaagctcttcaacctcctcctcagcaagacccgcgtcgcgcgcgaggtgaaccgccggagcgccgtcaccgtgctggtcccggacaactcggcggtggactggctcctgcgccgcagcgccaggctgccgcgcgccgcgctcgtggagcttgtctccgtccacgttgcgctcgactacatcgacgcggccaagctggccgcgctgccccggagcggccagcccgccgtggtcaccacgctgttccagaccacgggggccgcgctgaaccgcacggggttcctgaacgtcaccgcagtagggcgcgccggcgctgtcttcgtatcggccgcgcccgggtcgctggtcagcgccacgttcaggagggcggtgaccgcccggccgtacaacatatcggtgctccagatcagcaacttcgtcgtgccgccgggcgtcatcaccaggccgcggccgccgctgccgtcgccgcccgcgccgaggatgaggcagatggccatcgcgcccagccctgcgccgacgttagcttcgttgaggccatctccgacgacgctaccgtcctcggagggcgatgccgcggaggctccggacactactgctgaagcgccgacgccgtcgcatggtcatgtggcggaagtgaccagttggtggattggtgcggccgtgggggtggcatccatgctcgggtacttgtagattgctccatctgcctgcaactgatcgatcgggagggaatcgtcacatgcatttttgtaatagctcatgttgcgcaccctagtaagtaattcttatatcgcctttttctttagtcgatatttgcacttttttgttttcttatattattaggcttcttggaattatagagagtagaaatacaaattaaaggccacaaaaacaagtcgagtatgtcgagacaaggactccgtctgcatgtcatttctgatccatggattccctaccacaccaacacacgattcacttgggtccgtgtgtcacttggtttgcccgcgcaccacattgacatctggtttgaggttttgaacaattttgcatgaaccgatcatattttaggattcatttttacttgtttctggggaccaggtatgacatataatgctaagttggagaaccactattatattctac

SEQ ID NO: 58356 - DNA, 2753 bp, Zea Mays
agcgccaccacgcacgcctgcgccgccgccaccgtcgtcgcgaacgtcgcgtacgcgcacgcctgcggccacagagacagaggttgaaacttgtgtaggtacgtacgtacgacgacgagtacggcgtttatttatggtgggctgttcctgccgctgacttgctgtgtccttcctttgtggttagtagccgacgccgtactgttcgagcgctctctgtgatgaaggcagctgttgctgcggttgttggcgacaccgacacggagcggccagttgcattgcattgcatgcgggtccttctccggccgccgtgtgtagtaataatagctcgaggtgtttcctacggctaaccaactgcgatcactagtactagtattcactccgcacaaggcgatgtcgcactcgctccaccatatccaatccaaatgacaactgcatagcacgcaaaagccgctgttttgttaattaattaattaatggatggacggatggtgaagagtccagcctccgcttggatcggaaccgccgccgcctccattgatggcgatcatcccgaattcttgacgcgcttaatgacgacacacgcatcaaacgctatcttattaaatcccaaacatgctgagcactgattcggccgccaaacacaggaacgaactgcttagcagtagggatgaaaacggtttcggaatttttcggaattccggaaaccaatttcgaaatttttcgatcggattcaccggtaacggtatttttcgaaaacggaatcggttttcggaattttctaccggaatcggtatcggaatcggcgtggtgttttaccgaccgtttccatcggttaccggttttttgtcggaaattaccggatttgtgtctcggaaatttccggaattgtgtctcagaattttttcggaattttttcggaattttacagtatgtgattttttcgcatcgcctgtacatttctgaataaggattacttatttttgtattttttggacgctttaagatttttttggggttagatgatgttggaaggcaattgagattaacgatttggtctctcgaacgaatccatcattttctatgcacatgttatgtattagtaatatataatgatagagagccgacagtctgtctttttcacacactagattttagggttttcctgtgaggctatgaaaaaaccttttatgtgaggaaaaaatattttatgagtaagcatgtcatgtcaactaaatcgagtggatattgtgaattgtgaactttgagtctgtgaacttgtgatctttatgaacttgttatattgtgaacttgtgatctttgtaaactttttatattataaatttgtgatccttgtgaacttgttatattgtgaacttgttatatcatgaattgtgaacttgtgatatttgtgatcttttgtcaattttgttttattgtgaagtttgatacgtttaccgatcgtattttagatttcgaccgttaccggtgtattttccgcaccgagctttcttttccgatgtttccgaaataccgatatcgttttcgtttccggagttaccgttttcgattttgtttccgataaaaaatatgaaaacggtaatggttttagtgtttaccgaccgtttccgaccgttttcatccctacttagcagggctctctacaaaggcgtggattatccgcggcatagagcctgacggtccgcgacatagagcaggagcagctccttctctacacacttccggacggtccacgtctaggaccaaacggtccacaataacgtggagggtcttcttctccgcgaagaaccttagaactcatcccgggagagatcccgggaaagagttccaaagggttgctccgagtcggcaggtcattcggtactcctctaattggcgtagagccgagtagagattgttgtgaaagactaaactagatctaattctaaggctaaattacttctattcctaagaattggaagaacgaaaaggtaaaactgataaatagatttgatttaattgattgtgaggttttaatcggtcgtaaccctttatctatataaaggaagagctacaaattgttttccgaattaatcccacgattttagctaacaaacgtagcaagaaactcaaaacccgtgcgcacgagaaccggctggatcgtccgccttgcctattttagtgctcaatacacacgcttgcttgccctgtgcgccgatgagcacatttattaggaattcccatttattattcgttgaattgtctatctagctagtaaatcccaatcacgcagcagcatgtatggatggggcctgacaagtcacaagtgtacgactggagtagcgcagtagagtggctgccgtgtgcagcttataggcaggcaggcaggcaggcagcctatataggtaacgcagctgtcgaatggaaggcgcaaatccctaattccagaatgaaccagcaagcacaactggttgcggagggaggcgtacgatgagcttgagccacttaccttgtcgagcaggaggcacgtccaggccagagccctgccgctgcggcggcggccgaggtagaggcacttgagcagctgcagcaggtggtagcccgccgccgacgcggccgccatcgccagcaccctgcggcagcagcagcgcgcgcgtacaaccatcgatcgatcagcgcacccgtgctttgcagtgcagaagaatggttgggctcggctgctagctagctagcttaccagagcgcctggacgtcct

SEQ ID NO: 58357 - DNA, 3190 bp, Zea Mays
ctgggttttctgcagggtgtttgcacggtagatacgcatgttcccaagaatgccagacaaagcattggcaaattgatcacaaattcaagtgcaaacaaatgaaatcattggatcttgccgacaagttatcctgtggaggtgaggccaacagtaagaaaacatcaggtttcggtcgcatctcattggtgcctgcctgtaaaaagataagcaagggtcaggtcctctttccttatgatgagttcttaaagttgtacaactggaaagaccttgatgttgtaccttgtgggcttatgaactgtggcaacagttgctttgctaatgtggttttacaatgtctctcatgcacgagaccacttgtggcctatctgttaggaaaggaccatagcagggaatgttctgtgaggcatgaagattggtgttttttgtgtgagctacaatgtcatattcagagagctagtggaagtttgcacccatttgctcctacaaacattctttctcatctgccaaatattggtggcaatcttggcgttggtaggcaagaggatgctcatgaattcatgaggtttgcaattgataagatgcaatctgcttgccttgatgaatatggaggtgagaaggctgtagatcttagcatccaagagacaaccattattcagcacatatttggtgggcggctgcaatcacaggttcaatgcaccacatgtggaatggtctcaaaccgctatgataatatgatggatttgactgttgaaattcaaggtgatgctgaatcattggaacggtgcttggatcagttcactgctgttgagtggcttgatggggataataagtacaaatgcgatggatgcaacgactatgtgaaagcacggaagcacctttcagttcagcaagctccaaatatacttactatcactctcaaaagattccagactggtagatttgggaaactaaataagagagttacattccctatggagttagatctgacaccatacatgagttgcactgatggaagtgacctgtatgatctctatgctgtagtcgttcatctggatatgctgaacgcatcattctttggacattatatatgctatatcaaaggttatcaaggaaggtggtataaaattgatgactgcaaggttatggttgttgatgaggaggaagtacatgctcaaggcgcttatatgcttttatatagcaggagaacagctcgtcctaggtcacttcttacagttgatgagtccgtgaaacagcaacaacagtgcaaatcgctcctttccaatgggcaaagccacatgatactagcagatacaacattgaactgtgaatcatctttgaagattccagaagatatgttacaacaggattgtgaatccaataatgaatccttgcatgaaatgggtattaaggaccaggagtcagacatggatctacgtacaagcattgaagatgacaaattcattagcaatggaaatctacgtttaccaggttcactagtatcacatgttcttgaagatactagagctccagattctgtattagaaggctctgtgcaacttggccctcctttagaaggtggtcctactacgatgagctctgtgcagtttggcaactgcacaagtgaagcatcttcggaacattcctttgcagagcaatgtgaggtgcctgcctcatgtattgattcagttgactatatggatgttgatactgaagctggtgcagaagttgagagatgcgacgaacaaagacctgtcttaaatgattcagttggaaggccgaataataacacagcaaccccaactgcgaatggggtgccaggagaacccaaaccatcattttcctctggtttttttgataagccctcaagaaaaagatcttcctttacagaagaggctagtgccggttctcctcgaaagttaaatggctattgcaatggacatatcagcagtctagagcaagaagttctttgcaactctggaagtgaaaagtgcaatggagatgcacccgttacatccagtaatggcaaattctgtgcagctaatgttgatatgcaatctatcgatgattcgttgcatgaagacaagcgagatgtgccttctgtttctcatggctttgagccaagaccttacaagctacaatcagacagcaacaacaattgcggtaggacatgcaatgggaaacctaaagcttgccaaggggacatgtcatttttacctcggggcttccttggaaggcctagttctagaggaatttcagtcaaagcagatgatagcttgccatttagcactgacgcatcatcatcctttgggaatggaaacagtaagtcaagtaacaactcatcttctatgggtggcttgtctcctggtttccttacaagacaccgcagggaatccacagtcataggcacaagctctgacattccaatggataaaaaatctaatggcgccacagtagtgccagatcatgcagaaaaaaaggtttcagattgtacgacgaatggctcttcattccaaataagagcagcctccgaccaccttgattgaaatggccttgcaattttgaccacaaaaaacaacagctgtggacaagaaaatgacagtaatggagccccaggcatgagttatgatgggtctgaacatgatggactgagccgacgaataacctcaatttttttagctggatggtattgatgcccaataaaagcatgactgcattgttatagaatagaggccatttcgagcacacaagtgagaactgagagcctgtgtgatcatgtcatggctggtatataaactgatgaagggctgtgagctacgaagtaaatgctatgcaattagggcaagcattgtttgcttgatagaaatttttcctctttcgccacgtggctccctcatatcagatgggtagaggggtatctgggtttccacacaatttgcagaaacccagatgctcccctaatgccacgctattttgttggcattagcgttaggtacatagctgagcgtaggcctactaccgtccccttaattcatagcttaaataaactggaactgctgactcctccggtgtcctgaaagctgaatcaattgcagagtgataagaggaaattctcatggctttcacctttatattttacattcctttgcctcgcatgatatattttgctggtgtttactgtgcgatgatggat

SEQ ID NO: 58358 - DNA, 3394 bp, Zea Mays
cttcaatgcatcacggcttactgatttcccccctctgagtcttatttgttgaaactaaggaaacaaagagttgaaaacagtgctgaactaatgaccggatggcagtgctctgtccttgatgttttctgactgtttcaatctgtcaaggtggaggcaaaagctatattttcagttcctatacaaacgttgatttaatgatagtgtgtactccacatcaaacaatatcaaatccattttctaaaagttcccaagaatgccagacaaagcattggcaaattgatcacaaattcaagtgcaaacaaatgaaatcattggatcttgccgacaagttatcctgtggaggtgaggccaacagtaagaaaacatcaggtttcggtcgcatctcattggtgcctgcctgtaaaaagataagcaagggtcaggtcctctttccttatgatgagttcttaaagttgtacaactggaaagaccttgatgttgtaccttgtgggcttatgaactgtggcaacagttgctttgctaatgtggttttacaatgtctctcatgcacgagaccacttgtggcctatctgttaggaaaggaccatagcagggaatgttctgtgaggcatgaagattggtgttttttgtgtgagctacaatgtcatattcagagagctagtggaagtttgcacccatttgctcctacaaacattctttctcatctgccaaatattggtggcaatcttggcgttggtaggcaagaggatgctcatgaattcatgaggtttgcaattgataagatgcaatctgcttgccttgatgaatatggaggtgagaaggctgtagatcttagcatccaagagacaaccattattcagcacatatttggtgggcggctgcaatcacaggttcaatgcaccacatgtggaatggtctcaaaccgctatgataatatgatggatttgactgttgaaattcaaggtgatgctgaatcattggaacggtgcttggatcagttcactgctgttgagtggcttgatggggataataagtacaaatgcgatggatgcaacgactatgtgaaagcacggaagcacctttcagttcagcaagctccaaatatacttactatcactctcaaaagattccagactggtagatttgggaaactaaataagagagttacattccctatggagttagatctgacaccatacatgagttgcactgatggaagtgacctgtatgatctctatgctgtagtcgttcatctggatatgctgaacgcatcattctttggacattatatatgctatatcaaaggttatcaaggaaggtggtataaaattgatgactgcaaggttatggttgttgatgaggaggaagtacatgctcaaggcgcttatatgcttttatatagcaggagaacagctcgtcctaggtcacttcttacagttgatgagtccgtgaaacagcaacaacagtgcaaatcgctcctttccaatgggcaaagccacatgatactagcagatacaacattgaactgtgaatcatctttgaagattccagaagatatgttacaacaggattgtgaatccaataatgaatccttgcatgaaatgggtattaaggaccaggagtcagacatggatctacgtacaagcattgaagatgacaaattcattagcaatggaaatctacgtttaccaggttcactagtatcacatgttcttgaagatactagagctccagattctgtattagaaggctctgtgcaacttggccctcctttagaaggtggtcctactacgatgagctctgtgcagtttggcaactgcacaagtgaagcatcttcggaacattcctttgcagagcaatgtgaggtgcctgcctcatgtattgattcagttgactatatggatgttgatactgaagctggtgcagaagttgagagatgcgacgaacaaagacctgtcttaaatgattcagttggaaggccgaataataacacagcaaccccaactgcgaatggggtgccaggagaacccaaaccatcattttcctctggtttttttgataagccctcaagaaaaagatcttcctttacagaagaggctagtgccggttctcctcgaaagttaaatggctattgcaatggacatatcagcagtctagagcaagaagttctttgcaactctggaagtgaaaagtgcaatggagatgcacccgttacatccagtaatggcaaattctgtgcagctaatgttgatatgcaatctatcgatgattcgttgcatgaagacaagcgagatgtgccttctgtttctcatggctttgagccaagaccttacaagctacaatcagacagcaacaacaattgcggtaggacatgcaatgggaaacctaaagcttgccaaggggacatgtcatttttacctcggggcttccttggaaggcctagttctagaggaatttcagtcaaagcagatgatagcttgccatttagcactgacgcatcatcatcctttgggaatggaaacagtaagtcaagtaacaactcatcttctatgggtggcttgtctcctggtttccttacaagacaccgcagggaatccacagtcataggcacaagctctgacattccaatggataaaaaatctaatggcgccacagtagtgccagatcatgcagaaaaaaaggtttcagattgtacgacgaatggctcttcattccaaataagagcagcctccgaccaccttgattgaaatggccttgcaattttgaccacaaaaaacaacagctgtggacaagaaaatgacagtaatggagccccaggcatgagttatgatgggtctgaacatgatggactgagccgacgaataacctcaatttttttagctggatggtattgatgcccaataaaagcatgactgcattgttatagaatagaggccatttcgagcacacaagtgagaactgagagcctgtgtgatcatgtcatggctggtatataaactgatgaagggctgtgagctacgaagtaaatgctatgcaattagggcaagcattgtttgcttgatagaaatttttcctctttcgccacgtggctccctcatatcagatgggtagaggggtatctgggtttccacacaatttgcagaaacccagatgctcccctaatgccacgctattttgttggcattagcgttaggtacatagctgagcgtaggcctactaccgtccccttaattcatagcttaaataaactggaactgctgactcctccggtgtcctgaaagctgaatcaattgcagagtgataagaggaaattctcatggctttcacctttatattttacattcctttgcctcgcatgatatattttgctggtgtttactgtgcgatgatggat

SEQ ID NO: 58359 - DNA, 2091 bp, Zea Mays
agacattcatgttattacacccggcaagacgaccaaacttcctacgaaggcagaaccgcattctcgcgtcggcttgcttttaactgaatccagcccaccgcttctcgcacgtcgccatggacgcggtcgattctgtggtggatcccctccgcgacttcgccaaggacagcgtccgcctcgtcaagcgctgccacaagcctgaccgcaaggatctgacggtttttctctgtgatctgcgcttgcagagttcaccaaggtggcagcgcggacggcgatagggttcgtcgtcatgggcttcgtcggcttcttcgtcaagctcatcttcattcccatcaacaacattatcgtcggttccggctaggctcagggcgcgactagcatgggagtagtgcgatacttttgagagcaagggatagcgaggatcttggtctttggaatagtattgttaatgacattttttttccggttgtgtttctggagtaaatcgttgaacgacaaggcttcaggatgtctggatgtggattctgagtagaccttgaatccttgatgaagcagccagtcttggaaagaaagttccattttgttgttccattaagctatttttgttgttgtctacagctctctcggcgatggaacttgatcttatattgcaaacttcaagatgttctctgctccaggcaacaattatttggctcttgtagcctcacgaccagggatggagctggctaattttcaacaacaaccaaaccaggctcctggtcctggaggaaaacagcgcacatccagcctggaggcaccaataatgctacttactggtcaccagagtgctatatactgcatgaagttcaatcctgcaggaactgtgatagcatcaggttcccatgacaaggatatcttcttatggcttgcccatggtgaatgtaagaacttcatggtactgagagggcacaagaatgctattcttgatcttcagtggactactgatgggacccagatcatctctgcaagccctgacaagactctgagggtctgggacgttgagactggcaaacaagttaagaagatggctgagcactcatcattcgtcaactcatgctgcccagcgcggaagtggccacctcttgtggttagcggttcagacgatggtacagcaaagctgtgggacttgcgtcagagaggtgcaatacaaactctccccgacaaatatcagatcacagctgttagcttctcagaggcagcagataaggtattcactggtggcctggacaacgatgtcaagtggtgggatcttcgcaagaacgaagtgacagaacatctcaaagggcatcaggacatgatcactgggatgcagcttagccctgatggatcttacctcctgaccaatgcgatggataacgagctcaagatctgggatctgcgcccttacgcgccagagaaccggaacatcaaaactcttacaggtcaccagcataactttgagaagaacctgttgaagtgtagctggtcacccgataaccgcaaggtcactgccgggagcgcggaccgcatggtctacatctgggacacaacgtcaaggcgcatcctgtacaagcttcctgggcacaacggttctgtcaatgagactgcgttccatcccactgagccgatcattggatcctgcggcagcgacaaacagatcttccttggggaactttaagtgactatggcagtggctggcagacccaatgccagaggctcccacatcactgggatgttcttgtgacactttgatgaggagaaaaagaggcactgacatccccattccttcgcctgaaaatcggaatactcagtttggctgatcaggatttgtcatttgtagattgtcttagcctgtttagcccagttgttgacaaaccgctccatggctttgtactctctgactttccgaccttaaacttgatgcggtgcttgaagatcaccgattgaatgtactgtgtctagaacctcactctctggagcttgcctgctgtagttatgtacggctctgccatattgttaatctttcctagtcacctgaaactagctggagaagtgatcttttctagttgcctg

SEQ ID NO: 58360 - DNA, 1568 bp, Zea Mays
gtcaacccgaccccgttccccagctcaccgcgcgcgctctctcagtctctccttctcttgtggccacgacgagcgacattcgctactcgctaccgtcctacgccaggtgccccaggtcttcttcggttccttcgccggcgacgaacgctaccaggcaacaattatttggctcttgtagcctcacgaccagggatggagctggctaattttcaacaacaaccaaaccaggctcctggtcctggaggaaaacagcgcacatccagcctggaggcaccaataatgctacttactggtcaccagagtgctatatactgcatgaagttcaatcctgcaggaactgtgatagcatcaggttcccatgacaaggatatcttcttatggcttgcccatggtgaatgtaagaacttcatggtactgagagggcacaagaatgctattcttgatcttcagtggactactgatgggacccagatcatctctgcaagccctgacaagactctgagggtctgggacgttgagactggcaaacaagttaagaagatggctgagcactcatcattcgtcaactcatgctgcccagcgcggaagtggccacctcttgtggttagcggttcagacgatggtacagcaaagctgtgggacttgcgtcagagaggtgcaatacaaactctccccgacaaatatcagatcacagctgttagcttctcagaggcagcagataaggtattcactggtggcctggacaacgatgtcaagtggtgggatcttcgcaagaacgaagtgacagaacatctcaaagggcatcaggacatgatcactgggatgcagcttagccctgatggatcttacctcctgaccaatgcgatggataacgagctcaagatctgggatctgcgcccttacgcgccagagaaccggaacatcaaaactcttacaggtcaccagcataactttgagaagaacctgttgaagtgtagctggtcacccgataaccgcaaggtcactgccgggagcgcggaccgcatggtctacatctgggacacaacgtcaaggcgcatcctgtacaagcttcctgggcacaacggttctgtcaatgagactgcgttccatcccactgagccgatcattggatcctgcggcagcgacaaacagatcttccttggggaactttaagtgactatggcagtggctggcagacccaatgccagaggctcccacatcactgggatgttcttgtgacactttgatgaggagaaaaagaggcactgacatccccattccttcgcctgaaaatcggaatactcagtttggctgatcaggatttgtcatttgtagattgtcttagcctgtttagcccagttgttgacaaaccgctccatggctttgtactctctgactttccgaccttaaacttgatgcggtgcttgaagatcaccgattgaatgtactgtgtctagaacctcactctctggagcttgcctgctgtagttatgtacggctctgccatattgttaatctttcctagtcacctgaaactagctggagaagtgatcttttctagttgcctg

SEQ ID NO: 58361 - DNA, 2576 bp, Zea Mays
gctaaccgcggaccgaactttgaccttccgcgcaatccgccgcttctattctatcgtcgccgacgagcgacgacttcctccttccacagttccacttcctcttcctcctgcccggcgcgctcccacctcctctcacaatcacaagccacacccatggcgacgacggcccatccggcgctccccttgctcatcgtcctagcatgtgccggcgccgccagcgggttctacctccccggcgtcgcccccgccgacttccgcaagaacgacttgctcgccgtgaaggtgaaccagctgagctccatcaagacgcagctgccatactcctactactccctccccttctgcaggccggacaccatcgtcaacagcgccgagaacctcggccaggtcctccgcggcgaccgaatcgagaactcaccctacgtgttcgagatgatggagcctaaactgtgtcagatcgcgtgcaaggttgttctgaccgagcagggagcaaaggacatcatggagaaaatccacgacgagtaccgtgtaaacatgattcttgacaacctccctatggtcgtcccgattgagagattggatagagacgcgcctccattctatcagcaaggtgtgcacgtgggtgtcaagggccactacgctgggtgcagagtaatgaattcaagtatttcatccacaaccactactcatttctcgtgaagtataacaaggatgcacaaacagatctcgctaggattgtggcctttgaggttaaaccgttcagtcttaaacatgaattcgatggtgattggaaggggaatgcaactcgacttaaaacctgtaatacacaatctgagcatctaatagtgaactccgatgggcctgaagaagtaaaggcaaacaaagagatcattttcacctatgatgttaactttgaggaaagcagtatccagtggtcatcccgctgggacacctacctccgcacgcctgacgatcattggttttccatcgtgaattctctgaccacggtcctcttcctgtctgtgatggttgccatgatcatgctccgaactctgtaccgcgatatttccaagtacaaccagctagaggaccaggaggaggcccaagaggagtctggatggaagcttctccatggcgatgtgttcaggcctcctgccaatgccgacctgctgtgcgtgtacgtgggcacaggtgtacaattctttgggatgctgctggtcaccttgctgattgccatcctggggctcctgtcaccttcaaaccgtggagggttcatgacagccatgatcctgctctgggtcttcatgggcctgcttgcagggtactccattgcacgtcttcacaagatgttcggggggctggaatgggagaaggtcgccatcaagacggtcttggtattccctggagtcgtcttcgtgatattctttgccctgaacaggctcctctggggcgtgaaatcatctggggctgtgccattcaccaccatgttggcactggttttcctgtggctcggaatctcaatgccactcatcttcgtcggcagctaccttgggtttaggaagcctgccatacagggcccagtgaggacaaacaagatcccacgcctgataccgcagcagccatggtatatgaacccagccgtctcggtgttggtcggaggtatcctaccctttggtgcagtgttcatggagctcttcttcatcctgacaacgatctggatgcaccagttctactacatcttcgggttcctgttcctcgtctttgtgatcctgatagtgacctgcgccgagatcaccatcgtgctttgctatttccagctgtgcagtgaggactaccagtggtggtggaggtcctacctgacacccggctcgtcggctctgtacctcttcctgtatgcagcattctatttcttcacgaaactgcagatcacgaaggcggtctccggcgtgctctacttcggctacatgctcatcgcggcttatgccttctttgtactcaccggcaccattggcttttatgcctgcttctggttcaccaggcttatatactcttcggtgaagattgactaggaagctagaatgccatcgtttcatggtcggcaagagaaatcagaggtcaatgttgtgaaagaatacatgaaatgatgaaaatgtagcatggtttatgcacaaaagtaaggtgtccatagggtatctattcgtctgataattcagttacacttttgcgttcagtaaaacttgaggtatgtgcgctcattattatcacgcagtatacagaattgagatggtacttctagcctgaaatgctgagcatttcatgttgacatgttgtactccttctctttcatacaaaagatgagtcgtcatttggggcaggggcatgaccacagtctacaaaagataatactttcactatgttttctatgaggaagtaatatttcaattaaaagactgtacgatattgtaatattttttcatcataagtctagtaaaaatgattgtggtgtcattctatgtattatgtaaactaattgttaatgttgatggtgcaagaacttattgaaatcttttttaggg

SEQ ID NO: 58362 - DNA, 2570 bp, Zea Mays
gctaaccgcggaccgaactttgaccttccgcgcaatccgccgcttctattctatcgtcgccgacgagcgacgacttcctccttccacagttccacttcctcttcctcctgcccggcgcgctcccacctcctctcacaatcacaagccacacccatggcgacgacggcccatccggcgctccccttgctcatcgtcctagcatgtgccggcgccgccagcgggttctacctccccggcgtcgcccccgccgacttccgcaagaacgacttgctcgccgtgaaggtgaaccagctgagctccatcaagacgcagctgccatactcctactactccctccccttctgcaggccggacaccatcgtcaacagcgccgagaacctcggccaggtcctccgcggcgaccgaatcgagaactcaccctacgtgttcgagatgatggagcctaaactgtgtcagatcgcgtgcaaggttgttctgaccgagcagggagcaaaggacatcatggagaaaatccacgacgagtaccgtgtaaacatgattcttgacaacctccctatggtcgtcccgattgagagattggatagagacgcgcctccattctatcagcaaggtgtgcacgtgggtgtcaagggccactacgctgggagtaatgaattcaagtatttcatccacaaccactactcatttctcgtgaagtataacaaggatgcacaaacagatctcgctaggattgtggcctttgaggttaaaccgttcagcttaaacatgaattcgatggtgattggaaggggaatgcaactcgacttaaaacctgtaatacacaatctgagcatctaatagtgaactccgatgggcctgaagaagtaaaggcaaacaaagagatcattttcacctatgatgttaactttgaggaaagcagtatccagtggtcatcccgctgggacacctacctccgcacgcctgacgatcattggttttccatcgtgaattctctgaccacggtcctcttcctgtctgtgatggttgccatgatcatgctccgaactctgtaccgcgatatttccaagtacaaccagctagaggaccaggaggaggcccaagaggagtctggatggaagcttctccatggcgatgtgttcaggcctcctgccaatgccgacctgctgtgcgtgtacgtgggcacaggtgtacaattctttgggatgctgctggtcaccttgctgattgccatcctggggctcctgtcaccttcaaaccgtggagggttcatgacagccatgatcctgctctgggtcttcatgggcctgcttgcagggtactccattgcacgtcttcacaagatgttcggggggctggaatgggagaaggtcgccatcaagacggtcttggtattccctggagtcgtcttcgtgatattctttgccctgaacaggctcctctggggcgtgaaatcatctggggctgtgccattcaccaccatgttggcactggttttcctgtggctcggaatctcaatgccactcatcttcgtcggcagctaccttgggtttaggaagcctgccatacagggcccagtgaggacaaacaagatcccacgcctgataccgcagcagccatggtatatgaacccagccgtctcggtgttggtcggaggtatcctaccctttggtgcagtgttcatggagctcttcttcatcctgacaacgatctggatgcaccagttctactacatcttcgggttcctgttcctcgtctttgtgatcctgatagtgacctgcgccgagatcaccatcgtgctttgctatttccagctgtgcagtgaggactaccagtggtggtggaggtcctacctgacacccggctcgtcggctctgtacctcttcctgtatgcagcattctatttcttcacgaaactgcagatcacgaaggcggtctccggcgtgctctacttcggctacatgctcatcgcggcttatgccttctttgtactcaccggcaccattggcttttatgcctgcttctggttcaccaggcttatatactcttcggtgaagattgactaggaagctagaatgccatcgtttcatggtcggcaagagaaatcagaggtcaatgttgtgaaagaatacatgaaatgatgaaaatgtagcatggtttatgcacaaaagtaaggtgtccatagggtatctattcgtctgataattcagttacacttttgcgttcagtaaaacttgaggtatgtgcgctcattattatcacgcagtatacagaattgagatggtacttctagcctgaaatgctgagcatttcatgttgacatgttgtactccttctctttcatacaaaagatgagtcgtcatttggggcaggggcatgaccacagtctacaaaagataatactttcactatgttttctatgaggaagtaatatttcaattaaaagactgtacgatattgtaatattttttcatcataagtctagtaaaaatgattgtggtgtcattctatgtattatgtaaactaattgttaatgttgatggtgcaagaacttattgaaatcttttttaggg

SEQ ID NO: 58363 - DNA, 2536 bp, Zea Mays
gctaaccgcggaccgaactttgaccttccgcgcaatccgccgcttctattctatcgtcgccgacgagcgacgacttcctccttccacagttccacttcctcttcctcctgcccggcgcgctcccacctcctctcacaatcacaagccacacccatggcgacgacggcccatccggcgctccccttgctcatcgtcctagcatgtgccggcgccgccagcgggttctacctccccggcgtcgcccccgccgacttccgcaagaacgacttgctcgccgtgaaggtgaaccagctgagctccatcaagacgcagctgccatactcctactactccctccccttctgcaggccggacaccatcgtcaacagcgccgagaacctcggccaggtcctccgcggcgaccgaatcgagaactcaccctacgtgttcgagatgatggagcctaaactgtgtcagatcgcgtgcaaggttgttctgaccgagcagggagcaaaggacatcatggagaaaatccacgacgagtaccgtgtaaacatgattcttgacaacctccctatggtcgtcccgattgagagattggatagagacgcgcctccattctatcagcaagagtaatgaattcaagtatttcatccacaaccactactcatttctcgtgaagtataacaaggatgcacaaacagatctcgctaggattgtggcctttgaggttaaaccgttcagtcttaaacatgaattcgatggtgattggaaggggaatgcaactcgacttaaaacctgtaatacacaatctgagcatctaatagtgaactccgatgggcctgaagaagtaaaggcaaacaaagagatcattttcacctatgatgttaactttgaggaaagcagtatccagtggtcatcccgctgggacacctacctccgcacgcctgacgatcattggttttccatcgtgaattctctgaccacggtcctcttcctgtctgtgatggttgccatgatcatgctccgaactctgtaccgcgatatttccaagtacaaccagctagaggaccaggaggaggcccaagaggagtctggatggaagcttctccatggcgatgtgttcaggcctcctgccaatgccgacctgctgtgcgtgtacgtgggcacaggtgtacaattctttgggatgctgctggtcaccttgctgattgccatcctggggctcctgtcaccttcaaaccgtggagggttcatgacagccatgatcctgctctgggtcttcatgggcctgcttgcagggtactccattgcacgtcttcacaagatgttcggggggctggaatgggagaaggtcgccatcaagacggtcttggtattccctggagtcgtcttcgtgatattctttgccctgaacaggctcctctggggcgtgaaatcatctggggctgtgccattcaccaccatgttggcactggttttcctgtggctcggaatctcaatgccactcatcttcgtcggcagctaccttgggtttaggaagcctgccatacagggcccagtgaggacaaacaagatcccacgcctgataccgcagcagccatggtatatgaacccagccgtctcggtgttggtcggaggtatcctaccctttggtgcagtgttcatggagctcttcttcatcctgacaacgatctggatgcaccagttctactacatcttcgggttcctgttcctcgtctttgtgatcctgatagtgacctgcgccgagatcaccatcgtgctttgctatttccagctgtgcagtgaggactaccagtggtggtggaggtcctacctgacacccggctcgtcggctctgtacctcttcctgtatgcagcattctatttcttcacgaaactgcagatcacgaaggcggtctccggcgtgctctacttcggctacatgctcatcgcggcttatgccttctttgtactcaccggcaccattggcttttatgcctgcttctggttcaccaggcttatatactcttcggtgaagattgactaggaagctagaatgccatcgtttcatggtcggcaagagaaatcagaggtcaatgttgtgaaagaatacatgaaatgatgaaaatgtagcatggtttatgcacaaaagtaaggtgtccatagggtatctattcgtctgataattcagttacacttttgcgttcagtaaaacttgaggtatgtgcgctcattattatcacgcagtatacagaattgagatggtacttctagcctgaaatgctgagcatttcatgttgacatgttgtactccttctctttcatacaaaagatgagtcgtcatttggggcaggggcatgaccacagtctacaaaagataatactttcactatgttttctatgaggaagtaatatttcaattaaaagactgtacgatattgtaatattttttcatcataagtctagtaaaaatgattgtggtgtcattctatgtattatgtaaactaattgttaatgttgatggtgcaagaacttattgaaatcttttttaggg

SEQ ID NO: 58364 - DNA, 466 bp, Zea Mays
cccactctatccaatccatacgaagagaatatgcttggcctgaacagtggacatccgtcacgtttgaacggagcgaaaaaatcggagcaatggaggcggcatcttcggccacggatccaccgcccatggcggcgcgtttcgtttctccgttaccttgtcaaaatatatcaaccgccatgccctcctccctccatcgccgccggctcctcctcctcgtcgtcgctgccgccgcgctgcggggggcgccgttggcggacgccggcgcggacacctgcaaggcgtggttggtgcagtccatccccacggacatgccgcacctgagccgcatccccggggtcctatccacgggttcgtctctctctctctctctctctctctctcgtctatgggggtttgccagtttggggaatggggagtaggcgtatgctgaattggtgatacatagctggtgatggtggtagtgggg

SEQ ID NO: 58365 - DNA, 1059 bp, Zea Mays
aaacagtgtgtccatgtagagatttcgtttctctattgacaagctgtggtatcatttcaggattgtccagcactctggatttgctcctgattttgaccaagagagcgcagacctggctgcaggaagaccaaatgttgagaacgcaaccgttcttttcgaggactggtggggatctggtgttgtgcacgcaaaggtctggatatcagataagaaggatgtgtatataggttccgcaaacaacgactggaaatcccttactcaggttaaggagcttgggatttattttgctggttgcccacagatagcaaaaactgtggaggtctattttcaaaacctgtggacgctttcaaccctcaactcaactttttacaccaaacaagcctgggatacgcagtggcaagtttctagaaaggttccatgctggtctcatttcctacagcccaaagaaagatgcaggtcacccataccactttcagttgacatcccatatgtagatggatatccagctcttgcaaatcctgaaatgattgatgtttcgtttgaaacccctgggtacaagaaacctactcaggagcactacttgagctacctttcctttgcgccacctgagtgtgcgaggatgccaagtttgtttgtctacatcatctggttggcctaagaaaaaagtcatctgactgaccttgtgacatttggcagattccaagcagatgagcaggggtgggttgacaccatcaagtctgttaagcttgggggaattgtaagaatgaataccatggattggcttgggcagtcacagtatgctacccaaacagtctactggtcatctttatcgtcagcaatctcagaggtagtattctcaaagaacgcgaccgtgaggctactcgtcgcctactgggcgcatctcatcccaaacaccgagaaatacctgaagagcctactgtactccaacgttctctgcgcgtcttcggcgtacaaccactgtggcggcaaggtcgagatcaagtactacgtggttcctgggcacaacgagaccggacctgctctgtcccagggcggcga

SEQ ID NO: 58366 - DNA, 1064 bp, Zea Mays
agatttcgtttctctattgacaagctgtggtatcatttcaggattgtccagcactctggatttgctcctgattttgaccaagagagcgcagacctggctgcaggaagaccaaatgttgagaacgcaaccgttcttttcgaggactggtggggatctggtgttgtgcacgcaaaggtctggatatcagataagaaggatgtgtatataggttccgcaaacaacgactggaaatcccttactcaggttaaggagcttgggatttattttgctggttgcccacagatagcaaaaactgtggaggtctattttcaaaacctgtggacgctttcaaccctcaactcaactttttacaccaaacaagcctgggatacgcagtggcaagtttctagaaaggttccatgctggtctcatttcctacagcccaaagaaagatgcaggtcacccataccactttcagttgacatcccatatgtagatggatatccagctcttgcaaatcctgaaatgattgatgtttcgtttgaaacccctgggtacaagaaacctactcaggagcactacttgagctacctttcctttgcgccacctgagtgcatattcaatggaatttttcagtgtgcgaggatgccaagtttgtttgtctacatcatctggttggcctaagaaaaaagtcatctgactgaccttgtgacatttggcagattccaagcagatgagcaggggtgggttgacaccatcaagtctgttaagcttgggggaattgtaagaatgaataccatggattggcttgggcagtcacagtatgctacccaaacagtctactggtcatctttatcgtcagcaatctcagaggtagtattctcaaagaacgcgaccgtgaggctactcgtcgcctactgggcgcatctcatcccaaacaccgagaaatacctgaagagcctactgtactccaacgttctctgcgcgtcttcggcgtacaaccactgtggcggcaaggtcgagatcaagtactacgtggttcctgggcacaacgagaccggacctgctctgtcccagggcggcga

SEQ ID NO: 58367 - DNA, 1006 bp, Zea Mays
agatttcgtttctctattgacaagctgtggtatcatttcaggattgtccagcactctggatttgctcctgattttgaccaagagagcgcagacctggctgcaggaagaccaaatgttgagaacgcaaccgttcttttcgaggactggtggggatctggtgttgtgcacgcaaaggtctggatatcagataagaaggatgtgtatataggttccgcaaacaacgactggaaatcccttactcaggttaaggagcttgggatttattttgctggttgcccacagatagcaaaaactgtggaggtctattttcaaaacctgtggacgctttcaaccctcaactcaactttttacaccaaacaagcctgggatacgcagtggcaagtttctagaaaggttccatgctggtctcatttcctacagcccaaagaaagatgcaggtcacccataccactttcagttgacatcccatatgtagatggatatccagctcttgcaaatcctgaaatgattgatgtttcgtttgaaacccctgggtacaagaaacctactcaggagcactacttgagctacctttcctttgcgccacctgagtgtgcgaggatgccaagtttgtttgtctacatcatctggtgacatttggcagattccaagcagatgagcaggggtgggttgacaccatcaagtctgttaagcttgggggaattgtaagaatgaataccatggattggcttgggcagtcacagtatgctacccaaacagtctactggtcatctttatcgtcagcaatctcagaggtagtattctcaaagaacgcgaccgtgaggctactcgtcgcctactgggcgcatctcatcccaaacaccgagaaatacctgaagagcctactgtactccaacgttctctgcgcgtcttcggcgtacaaccactgtggcggcaaggtcgagatcaagtactacgtggttcctgggcacaacgagaccggacctgctctgtcccagggcggcga

SEQ ID NO: 58368 - DNA, 1404 bp, Zea Mays
agatttcgtttctctattgacaagctgtggtatcatttcaggattgtccagcactctggatttgctcctgattttgaccaagagagcgcagacctggctgcaggaagaccaaatgttgagaacgcaaccgttcttttcgaggactggtggggatctggtgttgtgcacgcaaaggtctggatatcagataagaaggatgtgtatataggttccgcaaacaacgactggaaatcccttactcaggttaaggagcttgggatttattttgctggttgcccacagatagcaaaaactgtggaggtctattttcaaaacctgtggacgctttcaaccctcaactcaactttttacaccaaacaagcctgggatacgcagtggcaagtttctagaaaggttccatgctggtctcatttcctacagcccaaagaaagatgcaggtcacccataccactttcagttgacatcccatatgtagatggatatccagctcttgcaaatcctgaaatgattgatgtttcgtttgaaacccctgggtacaagaaacctactcaggagcactacttgagctacctttcctttgcgccacctgagtgtgcgaggatgccaagtttgtttgtctacatcatctggttggcctaagaaaaaagtcatctgactgaccttgtactttcacccatacatcaacatttttcatatacatacattaagtattcatgtttcattaccttaacttatatgacataatttttcgtaaacattgaattaagacatgcaatataataaggtgttgtttggtttataatttgtaacgtaaatggtaatgggtaataggtttgaatagaccggtatcagtttttagtgtggtctctgattacggttggacttaaacaaacatgatttaacgttattggttactcatcatattacaattatgtgcagcacctaaaagataactggtcccggggactaattaatctagtaagtagtgcatttcgggacgttggtttcatcttttcttgtttcacaggtgacatttggcagattccaagcagatgagcaggggtgggttgacaccatcaagtctgttaagcttgggggaattgtaagaatgaataccatggattggcttgggcagtcacagtatgctacccaaacagtctactggtcatctttatcgtcagcaatctcagaggtagtattctcaaagaacgcgaccgtgaggctactcgtcgcctactgggcgcatctcatcccaaacaccgagaaatacctgaagagcctactgtactccaacgttctctgcgcgtcttcggcgtacaaccactgtggcggcaaggtcgagatcaagtactacgtggttcctgggcacaacgagaccggacctgctctgtcccagggcggcga

SEQ ID NO: 58369 - DNA, 1030 bp, Zea Mays
agatttcgtttctctattgacaagctgtggtatcatttcaggattgtccagcactctggatttgctcctgattttgaccaagagagcgcagacctggctgcaggaagaccaaatgttgagaacgcaaccgttcttttcgaggactggtggggatctggtgttgtgcacgcaaaggtctggatatcagataagaaggatgtgtatataggttccgcaaacaacgactggaaatcccttactcaggttaaggagcttgggatttattttgctggttgcccacagatagcaaaaactgtggaggtctattttcaaaacctgtggacgctttcaaccctcaactcaactttttacaccaaacaagcctgggatacgcagtggcaagtttctagaaaggttccatgctggtctcatttcctacagcccaaagaaagatgcaggtcacccataccactttcagttgacatcccatatgtagatggatatccagctcttgcaaatcctgaaatgattgatgtttcgtttgaaacccctgggtacaagaaacctactcaggagcactacttgagctacctttcctttgcgccacctgagtgcatattcaatggaatttttcagtgtgcgaggatgccaagtttgtttgtctacatcatctggtgacatttggcagattccaagcagatgagcaggggtgggttgacaccatcaagtctgttaagcttgggggaattgtaagaatgaataccatggattggcttgggcagtcacagtatgctacccaaacagtctactggtcatctttatcgtcagcaatctcagaggtagtattctcaaagaacgcgaccgtgaggctactcgtcgcctactgggcgcatctcatcccaaacaccgagaaatacctgaagagcctactgtactccaacgttctctgcgcgtcttcggcgtacaaccactgtggcggcaaggtcgagatcaagtactacgtggttcctgggcacaacgagaccggacctgctctgtcccagggcggcga

SEQ ID NO: 58370 - DNA, 4129 bp, Zea Mays
ggtccaaaacctaagccattatgttccccccgaagatcacctgtaaaaacattagtattgccccgcacaaaattgaaagtaagttgtttagttatagggtcaatgactattaaccaattcccaaaaacatgacgaactgaacgtagaggtctaagaccaaacaacaatggatgagacggcagaaatgataagcaaattggcagcggaagaataaatgttgtattgtttcatcatcagtcacaaaacacacatcttttattaccctgcctattacatcttactaagttatcctttgtgtgtataactccatttagtaagtaccgcacaaaaacctttatcttcaagtttccatagaactttgtggtgaaagacataactattgttaattagggtactatacatagattgtacagtaaactgactagatgtagttagcttccatctaaaaaagtcattttcgttacttagtcgcgcattacacaagttggtgattcaagtaatagaagccatgtcttgttattcatcatctttgtatgatgctactcatggtcaatatcgggacccttctgttttttatatttcagcaggtgtactctcatctcttacacattcatgatcaaattcaggacagaattggtgccataccacatcacaaatttaatcttttggattatgattatttgtatatgtatttagacttgtacagttcggtcagtaggctaacacaacagcaataaaaccaagatgaacaagtttctactcgtgcaatcaaaaggcaaattttagacacaagtatattagtatacgcaactgcatgctactttacaaacagttatattcattcatcatatgttgctggtttgcagatacatggacgtgaaacaagcagaatcttatatataaccatggacaaaaataagaaaacaatcaaatttataaggttattaagagtacatttatcaaaaaacgataaagtgtaagagcgcatgtatatggatacaatagtaccgtctctaatggcaaaaagcctgcctttctttccctgatataaaatttacacaatataatgtagaaaagacttttatactgcagtagtttagttcagtccctcaaacttttttctgactccgtcactaatctcatataatggtttcattgtcttacacacctcactttaacgaaacaggtagcctcgaatcagatgtcagtacttgaaagctatgatgcgcggatactttacaaaactcacgtacccgtgtcagataccatatcggatactcatacttcgtagatactcccggatacgtatccgatacgatacgtatccgatacgatacgtatcgaatatttttgcgattttagataaataaaaaaccggatactcctaggacaccttcttgatacctgcgggatacctaccttcttatacaaccgttcggcacattcgtgctcctatatcgagcattcaaaggcctaaagacgcctcccttgttttcaagtcgtcgactagtcggcgactagtcggcgggtcggccctgggatctcgactagtgaggtcggctcaacttttctggcaagtcgggtgatttggcaacgactggaaattctcaatctactagtcgttgatttggtctgacacgtcggccgacttgtgtcccagtttggcccaaacagcccaaaggcccattatacaagataaaccctacattccaacacttatgtgactgatcttgatttggattatcttgatttgagagatatttagggtatctagtatctatctagctacagcagattagctatctaatggagcttatttcctttcaagtttgaagtatattatcttgctatttgatttccaatttgaactatatgtctatatatggctattatgacttatgagtttatgacttatcacttatgtggctgatttggttcagtttgaggcttcaaatgaggtaatatatacttgttgtttatttcagtttcgttcaatttcaggcttcaagtgaggtaaaacttgcccctttttcatatataaatgctatattgtctatatgaagccattatataggcaaaactgccactatatcggcaagtcgacgactagacttatcgactagtcaccaagtcggtaccttgtcaactcgactcgacttatcgacttgaaaacatgggacgcctcagtgcttccattcgcctgctgccacccatcaaactatgtcgttagccaccggtcaccgatttgagccaccatgcgacgatttgtgagtttgtggttgtcaccgccacggactgcggggtgtgggtctgtggccatcgttgctgacccgtggtggtgccacccaccgatctacatattgacgtcggtgtgtcgtagccatttgtgtacccttgccacaaaccgacctacaggtccatgtctccctcttggttcaaactccttgcttctcaatctattgactgctacttctctggcttgatggaatattatggtccgttagaacctaaagactaaagttcctaggtttgatggcttgatggcctcaactttattatctttttttgattatggaaacaaagagttccggctttatgtactggtttgtaaacttgtgtggtccactattctagcaattaatttttttataacatatatttgtgtatcgccatatcggtgttttttgagaaatagcgtatgagggtatcgacgtatcacgtttctgtatcgtcgtatcatggtaacatagcttgaaagtaggcaatccattctgtgcagtcaacgacagatgctaacaaaaaaaggcttatctcatgaaatggtcttttttgcagtacatttataaaaaacaataaagtctaagagcgcatgtatggatacaatagtaccctctctaatggcaagaagcctgccattctttcctactgatttctaataaattaaatggcctagctcgaaatacaaaaaactagcattccatggaggaaaaaatagaactatttcaatttggtacaaaattagcttgcatggtcttaaattcagttcttgatattcgatcgaagacaaccagtttaatacacttgcaaccgcacacaaactactgttgtgcattctaatataatggtttcattgtctcacacacctcactttaaggaaacaggtagccccagatcagatgtcagtacttgaaagtaggcaatccattatgtgcagtcaacgacagatgctaacaaaaaaatgtgcttatctcatgaaatggtctttttgcacttaaataacttaatttgcagcccatttttttggacaacatgtgacttgtaaccgaaaaactgcaacacatcaacatccaaagctccaacaaaaacttcgtccatccaaattcagtaaacgcatgcaaccactgtaataagctacaatctacatattaattattactccctctgtccaaaattataactcgttttagcccttaaattttgtgtctatgttcaaatggatgacaataaatgtagacatataaataaaacacatagattaagtattgtatgaatctattcaaatactaaaacgactaatattttaggacggatgagtattttggaccaccaaactttatgtatcatcctcagagacagaaatagagctgagttgactagtagaaagaaaactaaagggactgtgatgcataccttggtcaagtaaaatctgcaaatgacgttccccattagttcatgatgctccctcatatccatatgctggggaggaagacgacggcgatggaaaagcagcaaagagcacaagagtcactcagcagcactttccatcagtataacgagcagcagcgtcgtcctcttctctccacccctacctcagatgcagaccagatctggcaaagggcaaggcgagtccacggtctttgccaaatttgggtcatcacatggtgccccccacgctccatttttgtgcaaacaggagcttgctagcgccggcgcgcgcaaccacccggaccgccatggccgcaggaggaaccgagcaagaactcgagagagcgagaagagaacccccgagcaagcaagagcagaaacagcgcgagctagctggaataatggctacagtgttcaaagatga

SEQ ID NO: 58371 - DNA, 1702 bp, Zea Mays
atggcctcgtcatcacattcactgatccaccccagctcttttgatatgttctgtccccggtcgtcccatgatgcttcgtctcgtctcccaagtcccacccaggtcccggaactagccgtcgctctccgcccagccagccactcatcagtccagcctccttcctccactgcctatatatttgcctgccctgctggagccacggcccctctcatccatccatgcacaagcgcgactcctcagcttcctcctctccttccttccttagctgtcccccttcccgccacctctgacccgtttcctgctcctgatcctgacgcacgtacgtctgggctgctgtactacgcgattctcgcggcggcgcccatggacccgtggatcgggcagccttccctgagcctggacctcaacgtcggccttccgacggcggcgaggccgcctgcgaccaccaccaccgccgaggtcttggtcgaggaggacttcctggccgtcaagaaagaccgagaggtgcaggtgcaggcgctcgaggcggagctccggcgagccggcgaggagaacaggcgcctcagcgacatgctccgggcggtggtggccaagtacgcggagctgcagggccaggtcaacggcatggcggcgccggtggtgtccacggcgggcaacagcgccgccgccgccgccgccaaccgccagtcctccgcgtcgtccgacgacggcggctccgcggccggctcgccgtccaggaagcggccggtccggagcgacagcctcgacaccgcgccccagcatcacaaccgcaagccgccgtcgccgtacgcggccgcccccgcccccggccccgaccagatggagtgcacgtcggccgccgtcaccatcgtcgcagccgccgccgcctaccaccacgagccggccaggcgcatccgggaggcggagcgcaagcccaaggtgtcccggcgattcgtccacgccgacccctctgacctcagcctcgtggtgaaggacgggtaccagtggcgcaagtacgggcagaaggtgaccaaggacaacccgtgcccgcgcgcctacttccggtgctcgctcgcgccgtcgtgcccggtgaagaagaaggtgcagcgcagcgcggacgacagcgccgtcctggtggccacgtacgagggcgagcacaaccacgcccgcccgccgcagcacgacggcggcgccaagaggtcgtccgcgccgccggcgggcgaggccgcgcgaccgccggcgccactgccgctgcagaagcaagaggccgggccgtcgtcggaggtcgcgaggaagaacctcgcggagcacatggcggtcacgctcacgcgggatcccgggttcaaggcggcgctagtcagcgcgctctccggccggatccttgaccagggattatagcctaataatagacgaacacgacgattaattgatacagacatttttatttcaccctgctctgttggccagtgccattgaagctgtcaattattcaagctagctctagcacgtacgccattatcatccaagtttcaagctacatgatgatagatgcctggagatgatatgattaacggcgtgcatatatgtcgccggatgcctggattgctgaagagaacaaggttgaggatgaccgagtttgtaccgctccaggcggtgtgcggcaatcaagcatctaggtccttggtgtccccgatgacggcga

SEQ ID NO: 58372 - DNA, 2451 bp, Zea Mays
gccacaccaaagaccaaacttggctcgtgtcgtgtctcagtgtctgccaccgagacaaaaatcgtcgtcagaaatttaacgacgcatattcgtctgactgacccgcccgtgcgccttcctcccgcctccccttccaccaccaagagtgacgacagagagacagacagagagaatggcggcgccagatgcccggccctcgtcagccggtccaccgccggcccgctccctcctcctgcctctcctgctcgtgctcctcctcgcggcctactcgctcccagccgactcagcagcgcgcccgtcctccaactccaacccacggcctgccttcacgccgccgctgctgaagcgccaccagctgcggcgcccgagcagcagcagcgccgagctcgtcgccgggcccgccaacgcgtcgaccaagcccttcacggcgcactacttcccgcagctgctcgaccacttcgccttcacgcccaacgcgtccacggtcttccgccacaagtacctcctcaacgacaccttctggcgccggcccggcgccggcgccggcgacgacggccccggcccgctgttcgtgtacacgggcaacgagggcgacatcgagtggttcgccaccaacaccgggttcatgttcgacatcgcgcccacgttcggcgccctcctcgtcttcatcgagcaccggttctacggggagtcgaagccgttcgggaacgactcgtacaggtcggccgagacgctgggctacctcacgtccacgcaggcgctggccgacttcgccgtcgtcatcaggggcctgaagcgggacctcggcgccgaggccgctcccgtcgtcgtcttcggcggctcctacggcggaatgctggcttcctggttcaggctcaagtacccccacgtcgccattggtgccctagcttcctccgcgccgatcctgcagttcgaccacataacgccgtggagcagcttctacgacgccgtctcgcaggacttcaagtccgagagctccaactgcttcggtgtcatcagggcagcctgggacgtcctggatgagaggggggccacagacaaagggctcctggacctcagcaaactcttcagagcctgcaagactgtgaagtacgcttattcaatccggaactggctgtggacagcattcacctacactgccatggtggactacccgaccccagccaacttcctggagaacctgcctgcctacccagtcaaggaggttgtccatttgtctgcaaaagtgaacctggactccagctctaccgatcatgaagctttcgcgtgaaaacatctgcagatgtgcaagaccatcgacgcgttccccgcgggcgcagacgtcctggagaaggcgttcgcggcggcgagcctgtactacaactacacgggagaccaggcctgcaacaagatagaggacggagacgacccgcacggcctcgatggctggcaatggcaggcctgcacagagatgatcatgcccatgacgatctccaacgagagcatgttcccgccgtccgccttcagctacgacgacaggtccgacgagtgtttccagagctggggggttcggccgaggccgcactggatcaccactgagtacggtggatataaaatcgataaggtgctcaagaggttcggcagcaacatcatcttctccaacggaatgcgagacccatggagccgtggcggggtgctcaagaacatctcgtccagcatcatcgcccttgttacagagaaaggtgagcaacagattccagaaaaaaaatgtgcccatcatttagacttgaggtcttcaacgaagggtgatccagactggctcatagaacagaggaggcaagaggttgagatcattcagggatggattgatcagtatcatcaggacatggcggaaacatcttcctgaagacagggcaagtcagtattcttcttcttacacatggtggaaacagggcgtgtatcatcaggacatggcggaaacatcttcatgaaaacaggacaccttcctgttacggtcatgtttggatccatggaaaaaaataaaggacaaaaaatcaataatttacacactaaacatcagaaattgctgaatcttacacaaagcaggcccctttgtgaattagtaaggggtggtgcaggtgctgggacttcaatccgcgccagagcagtgatcgactgatctcgcaggcctctggccagcggaccaaggcagtcttgagtcttgactcagtttctgttttttttaactgtattgtttcttcttttgttctcggcaaggaacagtcttgacatttttctctgttttatgcatgtagattagggctgggtatccatatttcgagaaaataatagtaattgcatggctatccaacatataatcgaaacttagacccatctaacttcacctggtttatgatcccaaggaactaagaaaagatcaccaagaacaac

SEQ ID NO: 58373 - DNA, 1602 bp, Zea Mays
gaagaagaggagaggaaagaaagaaacgtcgcagaaaaagaaaggcaccggttctacggggagtcgaagccgttcgggaacgactcgtacaggtcggccgagacgctgggctacctcacgtccacgcaggcgctggccgacttcgccgtcgtcatcaggggcctgaagcgggacctcggcgccgaggccgctcccgtcgtcgtcttcggcggctcctacggcggaatgctggcttcctggttcaggctcaagtacccccacgtcgccattggtgccctagcttcctccgcgccgatcctgcagttcgaccacagacaaagggctcctggacctcagcaaactcttcagagcctgcaagactgtgaagtacgcttattcaatccggaactggctgtggacagcattcacctacactgccatggtggactacccgaccccagccaacttcctggagaacctgcctgcctacccagtcaaggagatgtgcaagaccatcgacgcgttccccgcgggcgcagacgtcctggagaaggcgttcgcggcggcgagcctgtactacaactacacgggagaccaggcctgcaacaagatagaggacggagacgacccgcacggcctcgatggctggcaatggcaggcctgcacagagatgatcatgcccatgacgatctccaacgagagcatgttcccgccgtccgccttcagctacgacgacaggtccgacgagtgtttccagagctggggggttcggccgaggccgcactggatcaccactgagtacggtggatataaaatcgataaggtgctcaagaggttcggcagcaacatcatcttctccaacggaatgcgagacccatggagccgtggcggggtgctcaagaacatctcgtccagcatcatcgcccttgttacagagaaaggtgcccatcatttagacttgaggtcttcaacgaagggtgatccagactggctcatagaacagaggaggcaagaggttgagatcattcagggatggattgatcagtatcatcaggacatggcggaaacatcttcctgaagacagggcaagtcagtattcttcttcttacacatggtggaaacagggcgtgtatcatcaggacatggcggaaacatcttcatgaaaacaggacaccttcctgttacggtcatgtttggatccatggaaaaaaataaaggacaaaaaatcaataatttacacactaaacatcagaaattgctgaatcttacacaaagcaggcccctttgtgaattagtaaggggtggtgcaggtgctgggacttcaatccgcgccagagcagtgatcgactgatctcgcaggcctctggccagcggaccaaggcagtcttgagtcttgactcagtttctgttttttttaactgtattgtttcttcttttgttctcggcaaggaacagtcttgacatttttctctgttttatgcatgtagattagggctgggtatccatatttcgagaaaataatagtaattgcatggctatccaacatataatcgaaacttagacccatctaacttcacctggtttatgatcccaaggaactaagaaaagatcaccaagaacaac

SEQ ID NO: 58374 - DNA, 882 bp, Zea Mays
ctttcgctcgtctcgcctcgtctccacgcccctctcattcgcaccgctcccacccacatcctcttcgcctcccctcccactctctctctctctctctctctctctccgcacgcctccgcgtgggcttccgctcgggcggtggtccacctcgcccaggcacaggcagcgggacgcgacatgaccgcggccgacggggaggcctgcgcggtggtcgcgacggccgccgacatcatatgctctctccgtggcgcggacctcgctggctggaccccgccgtggagccagcgccagcacgagcccgatcccgcccgcgacggcgtgcaggcggagggcggggacgacgcgcgggacctggcctggccggcggtggcgcgcgggaagcgctcgcggtcccgccgcgagtccccgtcggcctcgggctccgctgcctccgcgggcgcgacgacgacggcgacgaagaagaagacggcgaggcgaggcgcccgaggcagccccgcgtcgcccctcgactacagcggcgcgtccggctccggctccggcgcgtccactagcggcggcgaggacggcgccttctgctcccggccagacccagcgctccctccggccgccgcgtgccagcagctcgcggcgcccccgcctcccagcaaggtgggtggcctcgccggacggcggacgatccccgcggtgccagtgccactgccaccacctcggcccgccggacagcgggcgcggaagaagatgaggctcccggagatccagcagatggtgcggtcgctgtcggtggagaacgacgccctccgcaaggagatgagagcgttgcagagggattgcacggcgctgtcccaagagaacggcaagctagagctaaagattaggttctga

SEQ ID NO: 58375 - DNA, 1045 bp, Zea Mays
ctcgctgattacgctcaggtgggtggcctcgccggacggcggacgatccccgcggtgccagtgccactgccaccacctcggcccgccggacagcgggcgcggaagaagatgaggctcccggagatccagcagatggtgcggtcgctgtcggtggagaacgacgccctccgcaaggagatgagagcgttgcagagggattgcacggcgctgtcccaagagaacggcaagctagagacaaggctccatcagtccattacgctgagcgaggcgatctccgtggagaacaaggggaagccacgcccactacagcctgagcaggaagctccgagcggcttcgtgctccctgacctcaacctcccggcagacgtctgatgatggctgagtttgtcggcgtggctacagtacgtcttcagatcgaactagcacgctaacctgatgattaactgtacatagaagaagctgggccgggttctggaagatcacgcttgccaggatactgaagacgaacggagattatctttttttttgtttcatatgttgttgacatttagggtttagagctgtcgtcgtcgtagtcctccggcctgaatgacgtcgtttttctgttcagggtggaggatcggttttaacgtttattacctcacgtacgttttctggtaaggttgtagatgctgccgcagtcttcactaacagctatagaagatgagagaactcgagccattggaggcccgatcggagccgtcacaggatcgacactagtggcgcggaagtgattagggatcaggtccaactacctcaatgatgatcgtcgtatcttcgactcagaccacttctttcttactcttttttgttggaggaggggaatttagcttctcgctgggaggtggaccctagggccgcttcgagaaataggttccttatcattattcttgggaatccattctagaagttggggaggtcagtacaatatcgacatctaaatcacacaaaagagtgtttaagctagagttgaataactaggaatataagcaaaagagaaagaatc

SEQ ID NO: 58376 - DNA, 868 bp, Zea Mays
attggttccggagatgccactactcctttccctcccgtaccttcaggccttcttcagacaaggctccatcagtccattacgctgagcgaggcgatctccgtggagaacaaggggaagccacgcccactacagcctgagcaggaagctccgagcggcttcgtgctccctgacctcaacctcccggcagacgtctgatgatggctgagtttgtcggcgtggctacagtacgtcttcagatcgaactagcacgctaacctgatgattaactgtacatagaagaagctgggccgggttctggaagatcacgcttgccaggatactgaagacgaacggagattatctttttttttgtttcatatgttgttgacatttagggtttagagctgtcgtcgtcgtagtcctccggcctgaatgacgtcgtttttctgttcagggtggaggatcggttttaacgtttattacctcacgtacgttttctggtaaggttgtagatgctgccgcagtcttcactaacagctatagaagatgagagaactcgagccattggaggcccgatcggagccgtcacaggatcgacactagtggcgcggaagtgattagggatcaggtccaactacctcaatgatgatcgtcgtatcttcgactcagaccacttctttcttactcttttttgttggaggaggggaatttagcttctcgctgggaggtggaccctagggccgcttcgagaaataggttccttatcattattcttgggaatccattctagaagttggggaggtcagtacaatatcgacatctaaatcacacaaaagagtgtttaagctagagttgaataactaggaatataagcaaaagagaaagaatc

SEQ ID NO: 58377 - DNA, 853 bp, Zea Mays
ctcgttcgcctgggcggtgcctcagcggagtgctgtgtcgcgacaaggctccatcagtccattacgctgagcgaggcgatctccgtggagaacaaggggaagccacgcccactacagcctgagcaggaagctccgagcggcttcgtgctccctgacctcaacctcccggcagacgtctgatgatggctgagtttgtcggcgtggctacagtacgtcttcagatcgaactagcacgctaacctgatgattaactgtacatagaagaagctgggccgggttctggaagatcacgcttgccaggatactgaagacgaacggagattatctttttttttgtttcatatgttgttgacatttagggtttagagctgtcgtcgtcgtagtcctccggcctgaatgacgtcgtttttctgttcagggtggaggatcggttttaacgtttattacctcacgtacgttttctggtaaggttgtagatgctgccgcagtcttcactaacagctatagaagatgagagaactcgagccattggaggcccgatcggagccgtcacaggatcgacactagtggcgcggaagtgattagggatcaggtccaactacctcaatgatgatcgtcgtatcttcgactcagaccacttctttcttactcttttttgttggaggaggggaatttagcttctcgctgggaggtggaccctagggccgcttcgagaaataggttccttatcattattcttgggaatccattctagaagttggggaggtcagtacaatatcgacatctaaatcacacaaaagagtgtttaagctagagttgaataactaggaatataagcaaaagagaaagaatc

SEQ ID NO: 58378 - DNA, 1674 bp, Zea Mays
aaaaatcttcacgcgcgcgagtggtaaccactgaagagcggctcgccacgcgggcacgcggccgacacaggatcagagccgtcttggccgcgtcgcctccttggcgaacgggcgcgtttggcgccacgccacgccataccgctgccacccaccgcaatccaagcaagcagccccgctatgtcggtcgctgtgctgcgagtgcgagccatggagctactggcacgacccgcagcggcagcgtcgtcctcctgcgcgcgaccctcgctacagctccccgccccgggcacatcccgtccccgtcggcccgggttccctactctccgcgcagctgcggcggcagcggcggcgatcgccgcggagccgcaatcgaacgagcagcagaatatcattatggaaactgaggtgtttgcctgccctgtctgctacgagccattgatgagaaaagggccaccaggcataaacttgccagcaatttataggtcgggattcaagtgttcaaagtgcaacaagtcatttaccagcaaagacatcttcctggacctcactgtaactgcagggacaaaagaatatagcgaacagaagcccgctagaactgagctgttcaggagtccacttgtctcatttctttatgagagagggtggcgacaaaactttaatcggagtggtttccctggtcttgacgaagagtttcaaatggctcaagactatttttcaacccattgctggtggtatccttcttgatgtcagctgtggcagtggcttgtttactaggaagtttgcaaagtctgggacatactcagctgtgatcgctttggacttctctgagaatatgctccgccaatgctatgaattcattaagcaagatgattctctcctcaatgtgtagctgaaataagccgcgtcctgaggcctggtggagtgtttgtgggaaccaccttcttatcctctcccaggaacaacccattctctgttgaagcactaaggccacttagacagattgttggaccagttaacaccagctacaactattttactgaaggagagctagaagacttgtgcaaatcctgtggccttgtcaactacagcagcaatgttcagaggtcatttatcatgttctccgggcaaaagccatactgaagaatcctgtcaaatccaaactctgttgtttcttcaggattccttgcaaaaacacgtttagaagtatttgcgtatatttgtgccatactgtgcataggttccttaatttctgtactattccttaatgtattcagtaccaaaaaaaaatgcatgctgcagactcttagaaaagccctacgtttctgtgaatcaacaaacctgaaagcctagaataatgcttgaattctattgctctcctaaaattgcacgttaaccgtgcttgctctcaagtgcttctagttagatgccctatataaaaacacaaaaatatgtgtgttctattggttagttgggttttgaaacaaccatagtttcaaatcctcattttgtgtataatttttaaccttttttaccatttaaattaccagcgagtaagggagtaataaaacgggagggaaaccgggtgacagcatgacaacaatagattgcctagtggttcaaggctgtaaaggctccgtttgggtcccccgcaagattcaggccttatgttccccacta

SEQ ID NO: 58379 - DNA, 1452 bp, Zea Mays
gtacgtgctccttctcgtcggctttacagcaatcgaacgagcagcagaatatcattatggaaactgaggtgtttgcctgccctgtctgctacgagccattgatgagaaaagggccaccaggcataaacttgccagcaatttataggtcgggattcaagtgttcaaagtgcaacaagtcatttaccagcaaagacatcttcctggacctcactgtaactgcagggacaaaagaatatagcgaacagaagcccgctagaactgagctgttcaggagtccacttgtctcatttctttatgagagagggtggcgacaaaactttaatcggagtggtttccctggtcttgacgaagagtttcaaatggctcaagactatttttcaacccattgctggtggtatccttcttgatgtcagctgtggcagtggcttgtttactaggaagtttgcaaagtctgggacatactcagctgtgatcgctttggacttctctgagaatatgctccgccaatgctatgaattcattaagcaagatgattctctcctcaatgtgaatctcgcactcgtgagagcagatatttcgaggctcccttttgcttcttgttcagtagatgccattcatgctggagcggctatccattgttggccctcaccctctaatgcggtagctgaaataagccgcgtcctgaggcctggtggagtgtttgtgggaaccaccttcttatcctctcccaggaacaacccattctctgttgaagcactaaggccacttagacagattgttggaccagttaacaccagctacaactattttactgaaggagagctagaagacttgtgcaaatcctgtggccttgtcaactacagcagcaatgttcagaggtcatttatcatgttctccgggcaaaagccatactgaagaatcctgtcaaatccaaactctgttgtttcttcaggattccttgcaaaaacacgtttagaagtatttgcgtatatttgtgccatactgtgcataggttccttaatttctgtactattccttaatgtattcagtaccaaaaaaaaatgcatgctgcagactcttagaaaagccctacgtttctgtgaatcaacaaacctgaaagcctagaataatgcttgaattctattgctctcctaaaattgcacgttaaccgtgcttgctctcaagtgcttctagttagatgccctatataaaaacacaaaaatatgtgtgttctattggttagttgggttttgaaacaaccatagtttcaaatcctcattttgtgtataatttttaaccttttttaccatttaaattaccagcgagtaagggagtaataaaacgggagggaaaccgggtgacagcatgacaacaatagattgcctagtggttcaaggctgtaaaggctccgtttgggtcccccgcaagattcaggccttatgttccccacta

SEQ ID NO: 58380 - DNA, 2043 bp, Zea Mays
atatcgatatgaatggcgacgtggcgctcaactgcagcatgaattgaaccagctgaaacgcaaataaagctagctgatggacaaatttcagccatgcatgccgaaatggccaaggcaggcagcacagcagggcagccatgggaccgtccgggtccggcagaagctggctcgtcgtcctcgtcgtcgtctctgcaaccctctgcgcccatgcgtcagctgcggcgtccgacacgacgacgaccgtgctggcggcggagcgcacgcggcggaaggaccccctggacgggctcaggtactacaccggcggctggaacatcagcaacaggcactacctggcgtcggcaggtttcagcgcggcgcccgtgttcgcgttcgccgcgctctggttcatcgcggcggcggcggcgctcgtctgctgctgctgctgcttctgctgccgcggcggcggcaacggcaacagctactcctactcgcgccgggtgttcgcgctctcgctcctgctgctgctcgccttcacagccgcagccgtcgtcgcgtgcgcggtcctgtacgacgggcagcgcaagctgagcggcagcacgacggcgacgctggactacgtggtgggccaggcggacggcgccgcggccaccatgcgcaacttcacggccctcctggaggcggcgaagacggcgggcggcggcgtggcctcgctgccccccgacgtcgcgcggggcgtcgacgacgtcgcgcgccgggtggacgcggccgccgacgccaccgccgcgcgcgcggccagcaactcccgcaggatccggacgtcgctggacgccgtaaggaaggtcctgatcggcgtcgcggccgtgatgctggccctcgtcctcgttggcttcgcgttctcgttgacggggaagaagtcgcttgtgtccacagcggtgtttcttgcatggatcataattacggcgaccctaatactgtccggcactttccttctcctgcacaacgtgataggagacacctgcgtggcgatggacgagtgggtggcccagccgcaggggcaggggcagagccacaccgcgctggacgacatcctgccctgcgccgacgcggcggtgacggcggaggcgctgcggcggagcaaggaggtgaactaccagctggtctccaagctcaaccagctgctctccaacgtgtcgaacggcaacgtgcctccgcaggccgggcccccgctctactacaaccagtcggggcctcccgtgccgctcctctgcagcccctacagcgccgacctctccgaccggccctgcgccgtcggcgaggtcaccgccgccgacgcgcagcaggtctggcagcgctacgtgtgccgcgcggcggcggggtcgggccgggaagaggtgtgctcgacggcggggcgcctgacgccggcgatgtactcgcagatggtcgccgtggccggcctcagcgacgggctgaggcggcagtccccggccctggccgacgtcgcgagctgcgtgaccgtgcggcgcgcgttccggacggtgggccagcgcggctgccccccgctgcggcgggacagccgccgggtgtaccaggcgctgctcgcggcgtcggcggccgggatgctcgccgcggccgcgtggctcgtgcactcccgggagcggcggcggcggcgggacagcgagcggttcaaggtgtcgccgtacaggctccccatcgaggacaaggtgctgctcaacagccccagacggccgtacaggcgagtgtagctgtagtgtaaacacaagcttggtcatcgaccagacgctgacggatcggatcggacctctcgagcacagtgacgacgacggtccagtgcaggtccggtaggggagaaaatggattccgagcagttttggcagtacaattctgtaaagtatataaatgtgtccttgtactgtggtaactgtacatgagtggctacgcgaataaggtaccttcttggattggatcaaaccacaccagtgtgcctgtttgataagatctggtttgattgtttgtcaaaacaaaaccatgcatggctacaac

SEQ ID NO: 58381 - DNA, 50 bp, Zea Mays
tctgcacgtacaactggagagtttaccaaatatagacgcagagaatcctg

SEQ ID NO: 58382 - DNA, 1412 bp, Zea Mays
aaacaaaacggaagtattgagaactagatcagattcaaaagtgtagatcaatgcagattaaacattttctaataacaacatgaactacaaaggacataagtaaatagtggaagaaactaagagccttttagtgagcaaaactttatgtgcatgagcatgacaaagaaatggagtgaggtcaagcacacagtaaaatattcatgttttctacacaaaaaacatagtttggccagcaatatgtgtgtcatgtagatgtccaggttctttctagtgtctatattcatagtcattagaaagtgggtttctagctaatagttaaagagaataataggcaatcatcacaagtgtaatgcactaatgcttgtactaactgaggctattacagccatgtttgctgccataactatgctatatagagagaccaaaaccagaaaagcttcaagtcattaggtagagccattaagcaagtcctaggatgtgaatgactccaaaacaaatagacctccagctcttgattcatcattgatccctcacgatatgtacaagtatggcataagattcggagaatatccaacacctcctttgcacttgcatttttgcgcggcaattttggttctacattctctcttccttggggctggctaatctttctcctgcctctaatgagtccacttttgctgactggtgggagaaggtgtgtaagcaagtgcacaaatccaaaagaagaggctttaacagtatcatcatcttgggggcttggtgtttatggctgcatcgtaataaggcggtttttgatggcgtcaggccttcctttcagggaataaaatcagtttttctggatgagtttgagtgttggaggcttgccggtgctagacatcttgaggctttgggtcctggtgctgcaattttcagatcaagggttctattgggggcttagtgaagagaagttgtgtgggtgtgcggcctgctggctcttgtgctgctgtttccatgtgcagaaggcagctgcattcctgtgcgtagcatgtattagtggtcttgtgtttggtcaggttttggtggtcttgtgtttggccttttgtgccattgtactttggtccattttggactgtttcttctcttaatttaatgatgcgcagctctcctgcgcgttcacgaaaaaaaagtatggcataagaaacaacatgcatagcatatcatgaaatatcaccacaggccatagattgaacaaactgaaggaagaaaatgaaccctccagactgaaagagagtaacgaaccatccacgggtttgatccaaaccctctgccacaaaattcccaggaaaattcttttcaaatagctctcgattctcaaatggatagtgaatgtaggcatatggcattgatccactctcaaaccagcagtcaaaaac

SEQ ID NO: 58383 - DNA, 1326 bp, Zea Mays
ctctcataagcagccttggctgagtatttgccatcttgagcaaatctgaaaatgtgtttgtcctccctttccgggtgcagctgaacggtgcttaaagtatctcaattcagctagagcatctcaagctatacctttgaaccatggaagaggttatggaaatcttgggctccacccaaatgcaaatttttttttctatagttggcaataaggaataaatgttgtacagctgatagactgcaaaagagagggttggatcatccaaaggtctgtcctttatgtgaccaggagccggagaatatccaacatctcctttgcagttgcatttttgctaaacagttttggcattgcattctatcaccgttggggcttgctaatctttctcctgcttctaatgagatttcttttgctgagtggtggaggaaggtgtgtaagcaagtgcacaaattcaaaagaagaggcattaacagtggtatcatcatgggggcttggtgtttatggcttcatcgtaataaggcggttttcgatggtgtcagtccttccataagcagaactaaaagagttttcttggaagagttagattgttggggtttagccagtggcaagcatcttgagggcttaggtctaggtgctgccattattaggtccagggagtttctgggtgagtagtggagatgtgcatgtggagattgctggcacttttgctgtttgcctcctcttgtttcgtgctgtttttcatgcgcaagagaaggctggggcactgtgctcaacaggaagttgatgggtctgtttgttctgccttttcggctttgtacttcggtctattttggactcttttcttctcttaatttaatgatgcgcagctctcatgtgcgttcaagaaaaaaaccatactattgtaaaaaataagatttatccgtttatgcaatctccaacagtacttgtgtccaacaacctaaatttagtggcaccctaaatcatcctcctacctcaaagacactacccatccaccctatcttaagaaaaataggaggttgattttaggggaactgctatgggaaaaaagaatttaaggtggatttatgtttaggatggacgctatatgagaaaataggatatctaatattatgcagacttttggaaatgctcttatgcagatcagcagatcttgatctagactataaaatttcaggtactggccacttattcctaatggttcattatgttgaacacaacagtcgagcagaagtcgccaaacaccctgcgatagcctcgattgttccattcccccctcccatccaccacgagaatgaactgtgactttgattc

SEQ ID NO: 58384 - DNA, 511 bp, Zea Mays
cccacccctccgcgctcgcccccagcgcgcacggcgtacgcagccgcgtcggtcggtcggcaaccgcccgcacctcgcccccaacgcgcgcgcacaaaaaccgcccagccgcgcttctgccgctgccccgctcggccagctcatgcccacgtcgcctcctctctcaccaatatccgccgcgcttgccgcatgtcgagtctcctcgagcagatcaccgttgtccctgcaccaagcacaccggagaactgacgtcggccacgaacctccgtcccaagacttgcttctcttgggaaactgccgtgttcactctccgccgcgccggagctccgttaagctgttgccgcgacattctccgtcgagatccgtttcgagactgcgatctgtttccgagcttcaagggatcaaaaatcgagcgttggcgaccaagagatcaagctttttgaggtctacaacattgaacaccctgagcatctgtttgatgaaggcaagtgtcctctgacccattatgtcc

SEQ ID NO: 58385 - DNA, 3799 bp, Zea Mays
ccacaaccaatttccagttccattccctttccgtttctgttcctcagactctcttttcccgtcgccgcctctcgcccccgtactcctcgccaccaccaccaccaccacttccctcccctcccggcctccccccaccccacccgcacccgcccgcgcgcccctcattcattcgcctcgatctcgccggcgatgtacggcaacgacaactggatcaacagctacctcgacgccatcctcgatgccggcaagggcgccggccccgccaggggccggggaggcggcggtggcggcggcggggaccggccctcgctgctcctgcgcgagcgcggccacttctccccggcgcgctacttcgtcgaggaggtcatcaccggctacgacgagaccgacctctacaagacctggctccgggcgaacgcgatgcggagtccgcaggagaagaacacgcgcctggagaacatgacctggaggatctggaacctcgccaggaagaagaaggaggtgcgcctttttgctcttgtttgagaaagaggaagccaatcgcttgtccaaacgccgtctagaggctgagaagccacaaaatgatgctactgcagacatgtctgaagatctttttgaaggtgtgaagggagaagacgttggtgatccatctgttgcctacggtgacagcacagctgggaacacacctaggatcagttcatttgacaagctatacatagtgttaatcagtcttcatggcctgatacgtggagagaatatggagcttggccgtgattcagatactggtggccaggtcaaatatgttgtggaacttgctaaagcattaagttcatgtcctggagtttaccgggttgatctattgacaagacaaatcatagccccaaattttgatcgtggctatggtgaaccagacgagatgctggctttgacaagtttcaagaactttaaatgcgaacgaggagagaacagtggtgcacatatcatcagaataccatttggccccaaagaaaagcatctagctaaagaaaatatctggcctttcattcaagaatttgttgatggtgcactaggtcatattgtgcggatgtcaaaaactttaggcgaagaaactggcagtgtgtgtccagtgtggcctgctgtgattcatggtcattatgccagtgcaggagttgctgctgctctactatctggagcacttaatgtcccgatggtgtttaccgggcattttcttgggaaagataagcttgaagggcttctcaagcaagggagacagacaagagaacaaataaacgtgacatacaaaataatgcgccgaattgaggcagaggagttgtctcttgatgcgtctgaaatagttatcgctagcacaaggcaagaaatagaagaacaatggaacttgtatgatggttttgaagtcatgcttgcgaggaagctccgtgcgttagtcaagcgtggtgctaactgttatggtcgttatatgcctcgtatggttataattcctccaggagttgaattcggccaattgattcatgattttgatatctatggagatgaagataacccatctccagcctctgaggatccatctatttggtttgagataatgcggttcttcacaaatcctaggaaacctatgattctggctattgcccgtccatatgctgagaagaatatcgcaacacttgtgaaggcatttggtgaatgccatccgttgagggaacttgctaaccttacattgataatgggtaaccgtgaggctatttccaagatgaacaaaatcagtgcagctgttttgacatcagtgcttacattgattgatgaatacgatttatatggtcaagtggcatacccaaagcatcacaagcactctgaagttcctgatatttatcgtttagcagcaagaacaaagggcgcttttataaatgttgcttactttgaacaatttggtgttaccttgatagaggctgccatgcacgggctgcctgttattgcaacaaaaaatggggctcctgttgaaattcatcaggttctggaaaatggtctccttgttgatccccatgatcagcatgcaatcgcagatgccctctataagatgctgtctgaaaagcaattttggtcaagatgtcgagagaatggattaaaaaatatacaccagttttcttggcctgaacattgcaagaattacttgtcaaggatattaactctaggtccaagacatcctgctttcgcatgcaaagaagaccataaagtgcctgtgaagtgcaggaagcatatattcgttattgctgtagactccgttaacaaggaagatttaattcagattatcagaaattctgttgaggctacacgctctggaactatgtcagatttgacaggttttgtgctgtcgacttcactgacaatagcagagttacagtctgtaatagtacgcacaggcatgctccctactgactttgatgcctttatatgcaatagtgggagtgacatatattatccatcacagtctagtgatgtgccaagcaattcccgtgttacatttgcatcggaccataactaccgatcacatattgagtatcgttggggtggagaaggtttaaggaagtacttagttaagtgggcctcttcagtagtagaaagaagggggagaaccgaaaagcaagtcatctttgaagattcggaacactcttcaacatattgtcttgcatttaaagtgattaatccaagtcatttgcctcctttgaaggagctgcaaaaattgatgagaatccagtcactgcgttgtcatgcactgtataaccatggcgccaccaggttatctgtaattccaattcatgcatcgcgatctcaggctctaaggtatttgtctatttgctggggcatagagttgccagatgctgtggtcattgttggtgaaactggtgattctgattacgaggaactgtttggaggtcttcacaagacagtcatccttaagggtggattcaacactcctgccaataggatccatacggttagaaggtaccctttacaggatgttgttgctcttgatagctcaaatatcattgcaattgagggatttagcactggtgacatcaggtctgctatgcaacaaaagcttggtatacccacacgatgacaccaagtgcgatctattttgttattaatagaaagaaacaaagaaaaaaatggccaatacaaatatacgatacaaacacttcgtttccattctattggaaatgcccgattttgcctgccagtcgtttaatgtatgtgtgccagtgtgtggtccctgcatgggttatgaatgacattcccttggatccctgcactggaaatttttggagcgaagagcatgtcaatggatacatccagctgtacagaagaaacaaatttgttcaaatgttgatagtgaaaacattttatggaagcattttcagcaacaaagcttccaatatacaaagctcacactttcacatcacttcaaagtggagcttatgattacagagcaaccctctaaaccttttttttccctttctaagaggggtgtcttatatttgtgtaaatactgtgtagcaccaatgcaccatcttgttttcttgtttcctgaattaatatgcgtaagcgtttactctctttctatatgtttttccaacagcctgtcttgtggttacatcatgaatacctttattcatctgctgctgtattggttatgaaattatagtagcaagcgtggtgctcccaactatgacttcatcatgcgtgtatagctttacattatctgcgtaaacatcattagttg

SEQ ID NO: 58386 - DNA, 3726 bp, Zea Mays
ccacaaccaatttccagttccattccctttccgtttctgttcctcagactctcttttcccgtcgccgcctctcgcccccgtactcctcgccaccaccaccaccaccacttccctcccctcccggcctccccccaccccacccgcacccgcccgcgcgcccctcattcattcgcctcgatctcgccggcgatgtacggcaacgacaactggatcaacagctacctcgacgccatcctcgatgccggcaagggcgccggccccgccaggggccggggaggcggcggtggcggcggcggggaccggccctcgctgctcctgcgcgagcgcggccacttctccccggcgcgctacttcgtcgaggaggtcatcaccggctacgacgagaccgacctctacaagacctggctccgggcgaacgcgatgcggagtccgcaggagaagaacacgcgcctggagaacatgacctggaggatctggaacctcgccaggaagaagaaggagtttgagaaagaggaagccaatcgcttgtccaaacgccgtctagaggctgagaagccacaaaatgatgctactgcagacatgtctgaagatctttttgaaggtgtgaagggagaagacgttggtgatccatctgttgcctacggtgacagcacagctgggaacacacctaggatcagttcatttgacaagctatacatagtgttaatcagtcttcatggcctgatacgtggagagaatatggagcttggccgtgattcagatactggtggccaggtcaaatatgttgtggaacttgctaaagcattaagttcatgtcctggagtttaccgggttgatctattgacaagacaaatcatagccccaaattttgatcgtggctatggtgaaccagacgagatgctggctttgacaagtttcaagaactttaaatgcgaacgaggagagaacagtggtgcacatatcatcagaataccatttggccccaaagaaaagcatctagctaaagaaaatatctggcctttcattcaagaatttgttgatggtgcactaggtcatattgtgcggatgtcaaaaactttaggcgaagaaactggcagtgtgtgtccagtgtggcctgctgtgattcatggtcattatgccagtgcaggagttgctgctgctctactatctggagcacttaatgtcccgatggtgtttaccgggcattttcttgggaaagataagcttgaagggcttctcaagcaagggagacagacaagagaacaaataaacgtgacatacaaaataatgcgccgaattgaggcagaggagttgtctcttgatgcgtctgaaatagttatcgctagcacaaggcaagaaatagaagaacaatggaacttgtatgatggttttgaagtcatgcttgcgaggaagctccgtgcgttagtcaagcgtggtgctaactgttatggtcgttatatgcctcgtatggttataattcctccaggagttgaattcggccaattgattcatgattttgatatctatggagatgaagataacccatctccagcctctgaggatccatctatttggtttgagataatgcggttcttcacaaatcctaggaaacctatgattctggctattgcccgtccatatgctgagaagaatatcgcaacacttgtgaaggcatttggtgaatgccatccgttgagggaacttgctaaccttacattgataatgggtaaccgtgaggctatttccaagatgaacaaaatcagtgcagctgttttgacatcagtgcttacattgattgatgaatacgatttatatggtcaagtggcatacccaaagcatcacaagcactctgaagttcctgatatttatcgtttagcagcaagaacaaaggctgccatgcacgggctgcctgttattgcaacaaaaaatggggctcctgttgaaattcatcaggttctggaaaatggtctccttgttgatccccatgatcagcatgcaatcgcagatgccctctataagatgctgtctgaaaagcaattttggtcaagatgtcgagagaatggattaaaaaatatacaccagttttcttggcctgaacattgcaagaattacttgtcaaggatattaactctaggtccaagacatcctgctttcgcatgcaaagaagaccataaagtgcctgtgaagtgcaggaagcatatattcgttattgctgtagactccgttaacaaggaagatttaattcagattatcagaaattctgttgaggctacacgctctggaactatgtcagatttgacaggttttgtgctgtcgacttcactgacaatagcagagttacagtctgtaatagtacgcacaggcatgctccctactgactttgatgcctttatatgcaatagtgggagtgacatatattatccatcacagtctagtgatgtgccaagcaattcccgtgttacatttgcatcggaccataactaccgatcacatattgagtatcgttggggtggagaaggtttaaggaagtacttagttaagtgggcctcttcagtagtagaaagaagggggagaaccgaaaagcaagtcatctttgaagattcggaacactcttcaacatattgtcttgcatttaaagtgattaatccaagtcatttgcctcctttgaaggagctgcaaaaattgatgagaatccagtcactgcgttgtcatgcactgtataaccatggcgccaccaggttatctgtaattccaattcatgcatcgcgatctcaggctctaaggtatttgtctatttgctggggcatagagttgccagatgctgtggtcattgttggtgaaactggtgattctgattacgaggaactgtttggaggtcttcacaagacagtcatccttaagggtggattcaacactcctgccaataggatccatacggttagaaggtaccctttacaggatgttgttgctcttgatagctcaaatatcattgcaattgagggatttagcactggtgacatcaggtctgctatgcaacaaaagcttggtatacccacacgatgacaccaagtgcgatctattttgttattaatagaaagaaacaaagaaaaaaatggccaatacaaatatacgatacaaacacttcgtttccattctattggaaatgcccgattttgcctgccagtcgtttaatgtatgtgtgccagtgtgtggtccctgcatgggttatgaatgacattcccttggatccctgcactggaaatttttggagcgaagagcatgtcaatggatacatccagctgtacagaagaaacaaatttgttcaaatgttgatagtgaaaacattttatggaagcattttcagcaacaaagcttccaatatacaaagctcacactttcacatcacttcaaagtggagcttatgattacagagcaaccctctaaaccttttttttccctttctaagaggggtgtcttatatttgtgtaaatactgtgtagcaccaatgcaccatcttgttttcttgtttcctgaattaatatgcgtaagcgtttactctctttctatatgtttttccaacagcctgtcttgtggttacatcatgaatacctttattcatctgctgctgtattggttatgaaattatagtagcaagcgtggtgctcccaactatgacttcatcatgcgtgtatagctttacattatctgcgtaaacatcattagttg

SEQ ID NO: 58387 - DNA, 3680 bp, Zea Mays
ccacaaccaatttccagttccattccctttccgtttctgttcctcagactctcttttcccgtcgccgcctctcgcccccgtactcctcgccaccaccaccaccaccacttccctcccctcccggcctccccccaccccacccgcacccgcccgcgcgcccctcattcattcgcctcgatctcgccggcgatgtacggcaacgacaactggatcaacagctacctcgacgccatcctcgatgccggcaagggcgccggccccgccaggggccggggaggcggcggtggcggcggcggggaccggccctcgctgctcctgcgcgagcgcggccacttctccccggcgcgctacttcgtcgaggaggtcatcaccggctacgacgagaccgacctctacaagacctggctccgggcgaacgcgatgcggagtccgcaggagaagaacacgcgcctggagaacatgacctggaggatctggaacctcgccaggaagaagaaggagtttgagaaagaggaagccaatcgcttgtccaaacgccgtctagaggctgagaagccacaaaatgatgctactgcagacatgtctgaagatctttttgaaggtgtgaagggagaagacgttggtgatccatctgttgcctacggtgacagcacagctgggaacacacctaggatcagttcatttgacaagctatacatagtgttaatcagtcttcatggcctgatacgtggagagaatatggagcttggccgtgattcagatactggtggccaggtcaaatatgttgtggaacttgctaaagcattaagttcatgtcctggagtttaccgggttgatctattgacaagacaaatcatagccccaaattttgatcgtggctatggtgaaccagacgagatgctggctttgacaagtttcaagaactttaaatgcgaacgaggagagaacagtggtgcacatatcatcagaataccatttggccccaaagaaaagcatctagctaaagaaaatatctggcctttcattcaagaatttgttgatggtgcactaggtcatattgtgcggatgtcaaaaactttaggcgaagaaactggcagtgtgtgtccagtgtggcctgctgtgattcatggtcattatgccagtgcaggagttgctgctgctctactatctggagcacttaatgtcccgatggtgtttaccgggcattttcttgggaaagataagcttgaagggcttctcaagcaagggagacagacaagagaacaaataaacgtgacatacaaaataatgcgccgaattgaggcagaggagttgtctcttgatgcgtctgaaatagttatcgctagcacaaggcaagaaatagaagaacaatggaacttgtatgatggttttgaagtcatgcttgcgaggaagctccgtgcgttagtcaagcgtggtgctaactgttatggtcgttatatgcctcgtatggttataattcctccaggagttgaattcggccaattgattcatgattttgatatctatggagatgaagataacccatctccagcctctgaggatccatctatttggtttgagataatgcggttcttcacaaatcctaggaaacctatgattctggctattgcccgtccatatgctgagaagaatatcgcaacacttgtgaaggcatttggtgaatgccatccgttgagggaacttgctaaccttacattgataatgggtaaccgtgaggctatttccaagatgaacaaaatcagtgcagctgttttgacatcagtgcttacattgattgatgaatacgatttatatggtcaagtggcatacccaaagcatcacaagcactctgaagttcctgatatttatcgtttagcagcaagaacaaagggcgcttttataaatgttgcttactttgaacaatttggtgttaccttgatagaggctgccatgcacgggctgcctgttattgcaacaaaaaatggggctcctgttgaaattcatcaggttctggaaaatggtctccttgttgatccccatgatcagcatgcaatcgcagatgccctctataagatgctgtctgaaaagcaattttggtcaagatgtcgagagaatggattaaaaaatatacaccagttttcttggcctgaacattgcaagaattacttgtcaaggatattaactctaggtccaagacatcctgctttcgcatgcaaagaagaccataaagtgcctgtgaagtgcaggaagcatatattcgttattgctgtagactccgttaacaaggaagatttaattcagattatcagaaattctgttgaggctacacgctctggaactatgtcagatttgacagtgggagtgacatatattatccatcacagtctagtgatgtgccaagcaattcccgtgttacatttgcatcggaccataactaccgatcacatattgagtatcgttggggtggagaaggtttaaggaagtacttagttaagtgggcctcttcagtagtagaaagaagggggagaaccgaaaagcaagtcatctttgaagattcggaacactcttcaacatattgtcttgcatttaaagtgattaatccaagtcatttgcctcctttgaaggagctgcaaaaattgatgagaatccagtcactgcgttgtcatgcactgtataaccatggcgccaccaggttatctgtaattccaattcatgcatcgcgatctcaggctctaaggtatttgtctatttgctggggcatagagttgccagatgctgtggtcattgttggtgaaactggtgattctgattacgaggaactgtttggaggtcttcacaagacagtcatccttaagggtggattcaacactcctgccaataggatccatacggttagaaggtaccctttacaggatgttgttgctcttgatagctcaaatatcattgcaattgagggatttagcactggtgacatcaggtctgctatgcaacaaaagcttggtatacccacacgatgacaccaagtgcgatctattttgttattaatagaaagaaacaaagaaaaaaatggccaatacaaatatacgatacaaacacttcgtttccattctattggaaatgcccgattttgcctgccagtcgtttaatgtatgtgtgccagtgtgtggtccctgcatgggttatgaatgacattcccttggatccctgcactggaaatttttggagcgaagagcatgtcaatggatacatccagctgtacagaagaaacaaatttgttcaaatgttgatagtgaaaacattttatggaagcattttcagcaacaaagcttccaatatacaaagctcacactttcacatcacttcaaagtggagcttatgattacagagcaaccctctaaaccttttttttccctttctaagaggggtgtcttatatttgtgtaaatactgtgtagcaccaatgcaccatcttgttttcttgtttcctgaattaatatgcgtaagcgtttactctctttctatatgtttttccaacagcctgtcttgtggttacatcatgaatacctttattcatctgctgctgtattggttatgaaattatagtagcaagcgtggtgctcccaactatgacttcatcatgcgtgtatagctttacattatctgcgtaaacatcattagttg

SEQ ID NO: 58388 - DNA, 3782 bp, Zea Mays
ccacaaccaatttccagttccattccctttccgtttctgttcctcagactctcttttcccgtcgccgcctctcgcccccgtactcctcgccaccaccaccaccaccacttccctcccctcccggcctccccccaccccacccgcacccgcccgcgcgcccctcattcattcgcctcgatctcgccggcgatgtacggcaacgacaactggatcaacagctacctcgacgccatcctcgatgccggcaagggcgccggccccgccaggggccggggaggcggcggtggcggcggcggggaccggccctcgctgctcctgcgcgagcgcggccacttctccccggcgcgctacttcgtcgaggaggtcatcaccggctacgacgagaccgacctctacaagacctggctccgggcgaacgcgatgcggagtccgcaggagaagaacacgcgcctggagaacatgacctggaggatctggaacctcgccaggaagaagaaggagtttgagaaagaggaagccaatcgcttgtccaaacgccgtctagaggctgagaagccacaaaatgatgctactgcagacatgtctgaagatctttttgaaggtgtgaagggagaagacgttggtgatccatctgttgcctacggtgacagcacagctgggaacacacctaggatcagttcatttgacaagctatacatagtgttaatcagtcttcatggcctgatacgtggagagaatatggagcttggccgtgattcagatactggtggccaggtgtcaaatatgttgtggaacttgctaaagcattaagttcatgtcctggagtttaccgggttgatctattgacaagacaaatcatagccccaaattttgatcgtggctatggtgaaccagacgagatgctggctttgacaagtttcaagaactttaaatgcgaacgaggagagaacagtggtgcacatatcatcagaataccatttggccccaaagaaaagcatctagctaaagaaaatatctggcctttcattcaagaatttgttgatggtgcactaggtcatattgtgcggatgtcaaaaactttaggcgaagaaactggcagtgtgtgtccagtgtggcctgctgtgattcatggtcattatgccagtgcaggagttgctgctgctctactatctggagcacttaatgtcccgatggtgtttaccgggcattttcttgggaaagataagcttgaagggcttctcaagcaagggagacagacaagagaacaaataaacgtgacatacaaaataatgcgccgaattgaggcagaggagttgtctcttgatgcgtctgaaatagttatcgctagcacaaggcaagaaatagaagaacaatggaacttgtatgatggttttgaagtcatgcttgcgaggaagctccgtgcgttagtcaagcgtggtgctaactgttatggtcgttatatgcctcgtatggttataattcctccaggagttgaattcggccaattgattcatgattttgatatctatggagatgaagataacccatctccagcctctgaggatccatctatttggtttgagataatgcggttcttcacaaatcctaggaaacctatgattctggctattgcccgtccatatgctgagaagaatatcgcaacacttgtgaaggcatttggtgaatgccatccgttgagggaacttgctaaccttacattgataatgggtaaccgtgaggctatttccaagatgaacaaaatcagtgcagctgttttgacatcagtgcttacattgattgatgaatacgatttatatggtcaagtggcatacccaaagcatcacaagcactctgaagttcctgatatttatcgtttagcagcaagaacaaagggcgcttttataaatgttgcttactttgaacaatttggtgttaccttgatagaggctgccatgcacgggctgcctgttattgcaacaaaaaatggggctcctgttgaaattcatcaggttctggaaaatggtctccttgttgatccccatgatcagcatgcaatcgcagatgccctctataagatgctgtctgaaaagcaattttggtcaagatgtcgagagaatggattaaaaaatatacaccagttttcttggcctgaacattgcaagaattacttgtcaaggatattaactctaggtccaagacatcctgctttcgcatgcaaagaagaccataaagtgcctgtgaagtgcaggaagcatatattcgttattgctgtagactccgttaacaaggaagatttaattcagattatcagaaattctgttgaggctacacgctctggaactatgtcagatttgacaggttttgtgctgtcgacttcactgacaatagcagagttacagtctgtaatagtacgcacaggcatgctccctactgactttgatgcctttatatgcaatagtgggagtgacatatattatccatcacagtctagtgatgtgccaagcaattcccgtgttacatttgcatcggaccataactaccgatcacatattgagtatcgttggggtggagaaggtttaaggaagtacttagttaagtgggcctcttcagtagtagaaagaagggggagaaccgaaaagcaagtcatctttgaagattcggaacactcttcaacatattgtcttgcatttaaagtgattaatccaagtcatttgcctcctttgaaggagctgcaaaaattgatgagaatccagtcactgcgttgtcatgcactgtataaccatggcgccaccaggttatctgtaattccaattcatgcatcgcgatctcaggctctaaggtatttgtctatttgctggggcatagagttgccagatgctgtggtcattgttggtgaaactggtgattctgattacgaggaactgtttggaggtcttcacaagacagtcatccttaagggtggattcaacactcctgccaataggatccatacggttagaaggtaccctttacaggatgttgttgctcttgatagctcaaatatcattgcaattgagggatttagcactggtgacatcaggtctgctatgcaacaaaagcttggtatacccacacgatgacaccaagtgcgatctattttgttattaatagaaagaaacaaagaaaaaaatggccaatacaaatatacgatacaaacacttcgtttccattctattggaaatgcccgattttgcctgccagtcgtttaatgtatgtgtgccagtgtgtggtccctgcatgggttatgaatgacattcccttggatccctgcactggaaatttttggagcgaagagcatgtcaatggatacatccagctgtacagaagaaacaaatttgttcaaatgttgatagtgaaaacattttatggaagcattttcagcaacaaagcttccaatatacaaagctcacactttcacatcacttcaaagtggagcttatgattacagagcaaccctctaaaccttttttttccctttctaagaggggtgtcttatatttgtgtaaatactgtgtagcaccaatgcaccatcttgttttcttgtttcctgaattaatatgcgtaagcgtttactctctttctatatgtttttccaacagcctgtcttgtggttacatcatgaatacctttattcatctgctgctgtattggttatgaaattatagtagcaagcgtggtgctcccaactatgacttcatcatgcgtgtatagctttacattatctgcgtaaacatcattagttg

SEQ ID NO: 58389 - DNA, 3441 bp, Zea Mays
aaaatgccaagcttctcaagctctatatgttggactggtttgagaaagaggaagccaatcgcttgtccaaacgccgtctagaggctgagaagccacaaaatgatgctactgcagacatgtctgaagatctttttgaaggtgtgaagggagaagacgttggtgatccatctgttgcctacggtgacagcacagctgggaacacacctaggatcagttcatttgacaagctatacatagtgttaatcagtcttcatggcctgatacgtggagagaatatggagcttggccgtgattcagatactggtggccaggtaatggtatcgttgaacgtagcagctattatgccatttgatgtttcgaagatattcactaaaacgatactagtgtcatacaaggacatgatttcactttcatccactgtgtgctgtttcataggtcaaatatgttgtggaacttgctaaagcattaagttcatgtcctggagtttaccgggttgatctattgacaagacaaatcatagccccaaattttgatcgtggctatggtgaaccagacgagatgctggctttgacaagtttcaagaactttaaatgcgaacgaggagagaacagtggtgcacatatcatcagaataccatttggccccaaagaaaagcatctagctaaagaaaatatctggcctttcattcaagaatttgttgatggtgcactaggtcatattgtgcggatgtcaaaaactttaggcgaagaaactggcagtgtgtgtccagtgtggcctgctgtgattcatggtcattatgccagtgcaggagttgctgctgctctactatctggagcacttaatgtcccgatggtgtttaccgggcattttcttgggaaagataagcttgaagggcttctcaagcaagggagacagacaagagaacaaataaacgtgacatacaaaataatgcgccgaattgaggcagaggagttgtctcttgatgcgtctgaaatagttatcgctagcacaaggcaagaaatagaagaacaatggaacttgtatgatggttttgaagtcatgcttgcgaggaagctccgtgcgttagtcaagcgtggtgctaactgttatggtcgttatatgcctcgtatggttataattcctccaggagttgaattcggccaattgattcatgattttgatatctatggagatgaagataacccatctccagcctctgaggatccatctatttggtttgagataatgcggttcttcacaaatcctaggaaacctatgattctggctattgcccgtccatatgctgagaagaatatcgcaacacttgtgaaggcatttggtgaatgccatccgttgagggaacttgctaaccttacattgataatgggtaaccgtgaggctatttccaagatgaacaaaatcagtgcagctgttttgacatcagtgcttacattgattgatgaatacgatttatatggtcaagtggcatacccaaagcatcacaagcactctgaagttcctgatatttatcgtttagcagcaagaacaaagggcgcttttataaatgttgcttactttgaacaatttggtgttaccttgatagaggctgccatgcacgggctgcctgttattgcaacaaaaaatggggctcctgttgaaattcatcaggttctggaaaatggtctccttgttgatccccatgatcagcatgcaatcgcagatgccctctataagatgctgtctgaaaagcaattttggtcaagatgtcgagagaatggattaaaaaatatacaccagttttcttggcctgaacattgcaagaattacttgtcaaggatattaactctaggtccaagacatcctgctttcgcatgcaaagaagaccataaagtgcctgtgaagtgcaggaagcatatattcgttattgctgtagactccgttaacaaggaagatttaattcagattatcagaaattctgttgaggctacacgctctggaactatgtcagatttgacaggttttgtgctgtcgacttcactgacaatagcagagttacagtctgtaatagtacgcacaggcatgctccctactgactttgatgcctttatatgcaatagtgggagtgacatatattatccatcacagtctagtgatgtgccaagcaattcccgtgttacatttgcatcggaccataactaccgatcacatattgagtatcgttggggtggagaaggtttaaggaagtacttagttaagtgggcctcttcagtagtagaaagaagggggagaaccgaaaagcaagtcatctttgaagattcggaacactcttcaacatattgtcttgcatttaaagtgattaatccaagtcatttgcctcctttgaaggagctgcaaaaattgatgagaatccagtcactgcgttgtcatgcactgtataaccatggcgccaccaggttatctgtaattccaattcatgcatcgcgatctcaggctctaaggtatttgtctatttgctggggcatagagttgccagatgctgtggtcattgttggtgaaactggtgattctgattacgaggaactgtttggaggtcttcacaagacagtcatccttaagggtggattcaacactcctgccaataggatccatacggttagaaggtaccctttacaggatgttgttgctcttgatagctcaaatatcattgcaattgagggatttagcactggtgacatcaggtctgctatgcaacaaaagcttggtatacccacacgatgacaccaagtgcgatctattttgttattaatagaaagaaacaaagaaaaaaatggccaatacaaatatacgatacaaacacttcgtttccattctattggaaatgcccgattttgcctgccagtcgtttaatgtatgtgtgccagtgtgtggtccctgcatgggttatgaatgacattcccttggatccctgcactggaaatttttggagcgaagagcatgtcaatggatacatccagctgtacagaagaaacaaatttgttcaaatgttgatagtgaaaacattttatggaagcattttcagcaacaaagcttccaatatacaaagctcacactttcacatcacttcaaagtggagcttatgattacagagcaaccctctaaaccttttttttccctttctaagaggggtgtcttatatttgtgtaaatactgtgtagcaccaatgcaccatcttgttttcttgtttcctgaattaatatgcgtaagcgtttactctctttctatatgtttttccaacagcctgtcttgtggttacatcatgaatacctttattcatctgctgctgtattggttatgaaattatagtagcaagcgtggtgctcccaactatgacttcatcatgcgtgtatagctttacattatctgcgtaaacatcattagttg

SEQ ID NO: 58390 - DNA, 2687 bp, Zea Mays
ctcaaactcaagggctagcgacggccgccagcagcaacagctacacacaactaactgtatcctgccaatgccaatgccaatgccgcactagcaatctactcaagtttctgtggcattaaaatggtccagtcagagaattaaatatgccagtgaactctgtcgttgtgttccccctttttatgttaccttttacttctgttttatgctctgtttatacagtgaaatttgaattagaaaaatgtgataggagagctgctagcatgagtgcagcagtgtcgtgggttgtgctcctgccctacctgtatttgtccacgtctccttcgaagcaatgaggccccctcctttcccctcgtgtgtgttgtcttggcatgtgagccttggcctggcctggccgcctggcctggccccctggagcaacacagtggtggtgctggacatttgttttcggggtttcgcttcatgtcggggagataaatccagaggccagtacgtaaagcagcttaaataccacttcagccttgcgttgcgttccttgccttgccttgcctgcttgcgtgcagtgcagtgcagctcacagcctcacaccatatcgctctgcggtgctagctccaggcctttatcaagccttccctgccccccttgataattccagagagagagaaggcgcgcagctagggaggtgcagagagaggagcggcaaggcgtgggctgtgggcacacatggcgagtgaggaggtcgccaccacagtgtgtgccgacgccgaccaagaagcagcggcggcggcggcggcggccatgaaggaggaaggaggaaggggcaagaggcggcggaggaggcagccgaggaagggagaggaggaaggcgggaggaagaagtacgcgctggtgagctaccacgagctgcccgagtacatgaaggagaacgagttcatcctcaactactaccgctccgagtggcccgtcctcaacgccgtgctcagcctcttctcctggcacaacgagaccatcaacgtctggacgcacctgctcgggttcatgctcttcttcggtctcaccctggtgcacctcggccagtacttcccccaggtggctgatctgattgggcatctctcctggccaatctcgaaggtcgctgaaaatgtctccagcaatattggagatgtcctatcaggatggcaggcgcgatatatatcaaaggcattcctgtgacgaattataagaggcaggctgcagatccgttgttaattccgaagaggagtggccctccaaacactctaaattctttgctgagcttgatgatggtttggagttctctttcactgataaacggcgctttgcaagagttcgtttgtttgaagatcctgaaaccttacccccaatttctgagttaggcccagatgctctgtttgaaccaatgtccgtcgatagtttcttggactccctgggtagaaagaagatagggataaaagctcttctacttgatcaggtgaccagcatccaacctacaagctttgcctgtgcaaaaatgttttccctgcactgtacatacttgacttgttgcagtttttttttataaaatgagcagagcttcatatcaggcattggcaattggattgcagacgaggtgctttaccaggatccatccattacagattgcttcgaatctacctagggagagttgtgaagcactgcaccagagtatcgaagaggttgtcaaatatgctgtcgaagttgatgctgacatggaccgctttccgaaggaatggttatttcatcaccgttggggcaagaagcctggcaaagtcgatggaaagaaaatcgagttcataacagctggtggcaggaccactgcctacgtgccgcaactgcaaaaactggttggaacccagtccagcaaaacgatatccgtggccgagaacggtgatgccaaggattcagggaccgagggagaagatgcagatgcagatgttttgaagccaagaaagcgagccgcgacctccaggggacagcgaaacaaagataccgccggctcgagaaaagcaagaggaaatggcgccgatgctgaggcggctgaaccagcaacaggtgtcgtcggaagcaacagtgagcaagcttttggccaagccaacagtgacgctgtcgataaatcagatcgggctacaagacgatcgtcgaggaaagtgaaagcccgcaagtaaatctgaacaaggtagccagggatctgtccatggagtttcatactggccagcgtatttgcgcctctgagtaatgtatcttaggaacagaagattatattcatgctgcatattcctgggggattcgctccggaccaacgtttgctctgttccctcggtgctatggatagtagcatatctaggttgtgcataaatgcactgaggtttatgtactctttccaatcttccatgatgctatggaagaggtgattaggtgaaatgatgtttcccctggcgcgtgcggttccacgcatagttgccgtaaagtgaaaaaaatacagattgcttaacctctgctgaataaagatttctaaaggtagaacttgcatggacgaaaccatgcatgcatgcatggcagcaatcagctggtgtacgttgggtgacccaaaagaattgaagaaggagccctaaatcatgcaggcagcagcaactgcagtacaggcagcaaagtag

SEQ ID NO: 58391 - DNA, 2519 bp, Zea Mays
gccaatgccaatgccaatgccgcactagcaatctactcaagtttctgtggcattaaaatggtccagtcagagaattaaatatgccagtgaactctgtcgttgtgttccccctttttatgttaccttttacttctgttttatgctctgtttatacagtgaaatttgaattagaaaaatgtgataggagagctgctagcatgagtgcagcagtgtcgtgggttgtgctcctgccctacctgtatttgtccacgtctccttcgaagcaatgaggccccctcctttcccctcgtgtgtgttgtcttggcatgtgagccttggcctggcctggccgcctggcctggccccctggagcaacacagtggtggtgctggacatttgttttcggggtttcgcttcatgtcggggagataaatccagaggccagtacgtaaagcagcttaaataccacttcagccttgcgttgcgttccttgccttgccttgcctgcttgcgtgcagtgcagtgcagctcacagcctcacaccatatcgctctgcggtgctagctccaggcctttatcaagccttccctgccccccttgataattccagagagagagaaggcgcgcagctagggaggtgcagagagaggagcggcaaggcgtgggctgtgggcacacatggcgagtgaggaggtcgccaccacagtgtgtgccgacgccgaccaagaagcagcggcggcggcggcggcggccatgaaggaggaaggaggaaggggcaagaggcggcggaggaggcagccgaggaagggagaggaggaaggcgggaggaagaagtacgcgctggtgagctaccacgagctgcccgagtacatgaaggagaacgagttcatcctcaactactaccgctccgagtggcccgtcctcaacgccgtgctcagcctcttctcctggcacaacgagaccatcaacgtctggacgcacctgctcgggttcatgctcttcttcggtctcaccctggtgcacctcggccagtacttcccccaggtggctgatctgattgggcatctctcctggccaatctcgaaggtcgctgaaaatgtctccagcaatattggagatgtcctatcaggatggcaggcgcgatatatatcaaaggcattcctgtgacgaattataagagatccgttgttaattccgaagaggagtggccctccaaacactctaaattctttgctgagcttgatgatggtttggagttctctttcactgataaacggcgctttgcaagagttcgtttgtttgaagatcctgaaaccttacccccaatttctgagttaggcccagatgctctgtttgaaccaatgtccgtcgatagtttcttggactccctgggtagaaagaagatagggataaaagctcttctacttgatcagagcttcatatcaggcattggcaattggattgcagacgaggtgctttaccagtcaaggatccatccattacagattgcttcgaatctacctagggagagttgtgaagcactgcaccagagtatcgaagaggttgtcaaatatgctgtcgaagttgatgctgacatggaccgctttccgaaggaatggttatttcatcaccgttggggcaagaagcctggcaaagtcgatggaaagaaaatcgagttcataacagctggtggcaggaccactgcctacgtgccgcaactgcaaaaactggttggaacccagtccagcaaaacgatatccgtggccgagaacggtgatgccaaggattcagggaccgagggagaagatgcagatgcagatgttttgaagccaagaaagcgagccgcgacctccaggggacagcgaaacaaagataccgccggctcgagaaaagcaagaggaaatggcgccgatgctgaggcggctgaaccagcaacaggtgtcgtcggaagcaacagtgagcaagcttttggccaagccaacagtgacgctgtcgataaatcagatcgggctacaagacgatcgtcgaggaaagtgaaagcccgcaagtaaatctgaacaaggtagccagggatctgtccatggagtttcatactggccagcgtatttgcgcctctgagtaatgtatcttaggaacagaagattatattcatgctgcatattcctgggggattcgctccggaccaacgtttgctctgttccctcggtgctatggatagtagcatatctaggttgtgcataaatgcactgaggtttatgtactctttccaatcttccatgatgctatggaagaggtgattaggtgaaatgatgtttcccctggcgcgtgcggttccacgcatagttgccgtaaagtgaaaaaaatacagattgcttaacctctgctgaataaagatttctaaaggtagaacttgcatggacgaaaccatgcatgcatgcatggcagcaatcagctggtgtacgttgggtgacccaaaagaattgaagaaggagccctaaatcatgcaggcagcagcaactgcagtacaggcagcaaagtag

SEQ ID NO: 58392 - DNA, 2508 bp, Zea Mays
gcagtgtcgtgggttgtgctcctgccctacctgtatttgtccacgtctccttcgaagcaatgaggccccctcctttcccctcgtgtgtgttgtcttggcatgtgagccttggcctggcctggccgcctggcctggccccctggagcaacacagtggtggtgctggacatttgttttcggggtttcgcttcatgtcggggagataaatccagaggccagtacgtaaagcagcttaaataccacttcagccttgcgttgcgttccttgccttgccttgcctgcttgcgtgcagtgcagtgcagctcacagcctcacaccatatcgctctgcggtgctagctccaggcctttatcaagccttccctgccccccttgataattccagagagagagaaggcgcgcagctagggaggtgcagagagaggagcggcaaggcgtgggctgtgggcacacatggcgagtgaggaggtcgccaccacagtgtgtgccgacgccgaccaagaagcagcggcggcggcggcggcggccatgaaggaggaaggaggaaggggcaagaggcggcggaggaggcagccgaggaagggagaggaggaaggcgggaggaagaagtacgcgctggtgagctaccacgagctgcccgagtacatgaaggagaacgagttcatcctcaactactaccgctccgagtggcccgtcctcaacgccgtgctcagcctcttctcctggcacaacgagaccatcaacgtctggacgcacctgctcgggttcatgctcttcttcggtctcaccctggtgcacctcggccagtacttcccccaggtggctgatctgattgggcatctctcctggccaatctcgaaggtcgctgaaaatgtctccagcaatattggagatgtcctatcaggatggcaggcgcgatatatatcaaaggcattcctgtgacgaattataagagatccgttgttaattccgaagaggagtggccctccaaacactctaaattctttgctgagcttgatgatggtttggagttctctttcactgataaacggcgctttgcaagagttcgtttgtttgaagatcctgaaaccttacccccaatttctgagttaggcccagatgctctgtttgaaccaatgtccgtcgatagtttcttggactccctgggtagaaagaagatagggataaaagctcttctacttgatcaggtgaccagcatccaacctacaagctttgcctgtgcaaaaatgttttccctgcactgtacatacttgacttgttgcagtttttttttataaaatgagcagagcttcatatcaggcattggcaattggattgcagacgaggtgctttaccaggatccatccattacagattgcttcgaatctacctagggagagttgtgaagcactgcaccagagtatcgaagaggttgtcaaatatgctgtcgaagttgatgctgacatggaccgctttccgaaggaatggttatttcatcaccgttggggcaagaagcctggcaaagtcgatggaaagaaaatcgagttcataacagctggtggcagggtaagtaagtaaactatccgcttcagtactagaccttgagcctcagatatggccaggccagccagccaggtcaaacttctgatgctgctttgttcactcagaccactgcctacgtgccgcaactgcaaaaactggttggaacccagtccagcaaaacgatatccgtggccgagaacggtgatgccaaggattcagggaccgagggagaagatgcagatgcagatgttttgaagccaagaaagcgagccgcgacctccaggggacagcgaaacaaagataccgccggctcgagaaaagcaagaggaaatggcgccgatgctgaggcggctgaaccagcaacaggtgtcgtcggaagcaacagtgagcaagcttttggccaagccaacagtgacgctgtcgataaatcagatcgggctacaagacgatcgtcgaggaaagtgaaagcccgcaagtaaatctgaacaaggtagccagggatctgtccatggagtttcatactggccagcgtatttgcgcctctgagtaatgtatcttaggaacagaagattatattcatgctgcatattcctgggggattcgctccggaccaacgtttgctctgttccctcggtgctatggatagtagcatatctaggttgtgcataaatgcactgaggtttatgtactctttccaatcttccatgatgctatggaagaggtgattaggtgaaatgatgtttcccctggcgcgtgcggttccacgcatagttgccgtaaagtgaaaaaaatacagattgcttaacctctgctgaataaagatttctaaaggtagaacttgcatggacgaaaccatgcatgcatgcatggcagcaatcagctggtgtacgttgggtgacccaaaagaattgaagaaggagccctaaatcatgcaggcagcagcaactgcagtacaggcagcaaagtag

SEQ ID NO: 58393 - DNA, 2321 bp, Zea Mays
gcagtgtcgtgggttgtgctcctgccctacctgtatttgtccacgtctccttcgaagcaatgaggccccctcctttcccctcgtgtgtgttgtcttggcatgtgagccttggcctggcctggccgcctggcctggccccctggagcaacacagtggtggtgctggacatttgttttcggggtttcgcttcatgtcggggagataaatccagaggccagtacgtaaagcagcttaaataccacttcagccttgcgttgcgttccttgccttgccttgcctgcttgcgtgcagtgcagtgcagctcacagcctcacaccatatcgctctgcggtgctagctccaggcctttatcaagccttccctgccccccttgataattccagagagagagaaggcgcgcagctagggaggtgcagagagaggagcggcaaggcgtgggctgtgggcacacatggcgagtgaggaggtcgccaccacagtgtgtgccgacgccgaccaagaagcagcggcggcggcggcggcggccatgaaggaggaaggaggaaggggcaagaggcggcggaggaggcagccgaggaagggagaggaggaaggcgggaggaagaagtacgcgctggtgagctaccacgagctgcccgagtacatgaaggagaacgagttcatcctcaactactaccgctccgagtggcccgtcctcaacgccgtgctcagcctcttctcctggcacaacgagaccatcaacgtctggacgcacctgctcgggttcatgctcttcttcggtctcaccctggtgcacctcggccagtacttcccccaggtggctgatctgattgggcatctctcctggccaatctcgaaggtcgctgaaaatgtctccagcaatattggagatgtcctatcaggatggcaggcgcgatatatatcaaaggcattcctgtgacgaattataagaggcagatccgttgttaattccgaagaggagtggccctccaaacactctaaattctttgctgagcttgatgatggtttggagttctctttcactgataaacggcgctttgcaagagttcgtttgtttgaagatcctgaaaccttacccccaatttctgagttaggcccagatgctctgtttgaaccaatgtccgtcgatagtttcttggactccctgggtagaaagaagatagggataaaagctcttctacttgatcagagcttcatatcaggcattggcaattggattgcagacgaggtgctttaccagtcaaggatccatccattacagattgcttcgaatctacctagggagagttgtgaagcactgcaccagagtatcgaagaggttgtcaaatatgctgtcgaagttgatgctgacatggaccgctttccgaaggaatggttatttcatcaccgttggggcaagaagcctggcaaagtcgatggaaagaaaatcgagttcataacagctggtggcagggtaaaccactgcctacgtgccgcaactgcaaaaactggttggaacccagtccagcaaaacgatatccgtggccgagaacggtgatgccaaggattcagggaccgagggagaagatgcagatgcagatgttttgaagccaagaaagcgagccgcgacctccaggggacagcgaaacaaagataccgccggctcgagaaaagcaagaggaaatggcgccgatgctgaggcggctgaaccagcaacaggtgtcgtcggaagcaacagtgagcaagcttttggccaagccaacagtgacgctgtcgataaatcagatcgggctacaagacgatcgtcgaggaaagtgaaagcccgcaagtaaatctgaacaaggtagccagggatctgtccatggagtttcatactggccagcgtatttgcgcctctgagtaatgtatcttaggaacagaagattatattcatgctgcatattcctgggggattcgctccggaccaacgtttgctctgttccctcggtgctatggatagtagcatatctaggttgtgcataaatgcactgaggtttatgtactctttccaatcttccatgatgctatggaagaggtgattaggtgaaatgatgtttcccctggcgcgtgcggttccacgcatagttgccgtaaagtgaaaaaaatacagattgcttaacctctgctgaataaagatttctaaaggtagaacttgcatggacgaaaccatgcatgcatgcatggcagcaatcagctggtgtacgttgggtgacccaaaagaattgaagaaggagccctaaatcatgcaggcagcagcaactgcagtacaggcagcaaagtag

SEQ ID NO: 58394 - DNA, 1538 bp, Zea Mays
cagctctgcaagcttttccgggatggcaggcgcgatatatatcaaaggcattcctgtgacgaattataagaggctgcagatccgttgttaattccgaagaggagtggccctccaaacactctaaattctttgctgagcttgatgatggtttggagttctctttcactgataaacggcgctttgcaagagttcgtttgtttgaagatcctgaaaccttacccccaatttctgagttaggcccagatgctctgtttgaaccaatgtccgtcgatagtttcttggactccctgggtagaaagaagatagggataaaagctcttctacttgatcaggtgaccagcatccaacctacaagctttgcctgtgcaaaaatgttttccctgcactgtacatacttgacttgttgcagtttttttttataaaatgagcagagcttcatatcaggcattggcaattggattgcagacgaggtgctttaccagtcaaggatccatccattacagattgcttcgaatctacctagggagagttgtgaagcactgcaccagagtatcgaagaggttgtcaaatatgctgtcgaagttgatgctgacatggaccgctttccgaaggaatggttatttcatcaccgttggggcaagaagcctggcaaagtcgatggaaagaaaatcgagttcataacagctggtggcaggaccactgcctacgtgccgcaactgcaaaaactggttggaacccagtccagcaaaacgatatccgtggccgagaacggtgatgccaaggattcagggaccgagggagaagatgcagatgcagatgttttgaagccaagaaagcgagccgcgacctccaggggacagcgaaacaaagataccgccggctcgagaaaagcaagaggaaatggcgccgatgctgaggcggctgaaccagcaacaggtgtcgtcggaagcaacagtgagcaagcttttggccaagccaacagtgacgctgtcgataaatcagatcgggctacaagacgatcgtcgaggaaagtgaaagcccgcaagtaaatctgaacaaggtagccagggatctgtccatggagtttcatactggccagcgtatttgcgcctctgagtaatgtatcttaggaacagaagattatattcatgctgcatattcctgggggattcgctccggaccaacgtttgctctgttccctcggtgctatggatagtagcatatctaggttgtgcataaatgcactgaggtttatgtactctttccaatcttccatgatgctatggaagaggtgattaggtgaaatgatgtttcccctggcgcgtgcggttccacgcatagttgccgtaaagtgaaaaaaatacagattgcttaacctctgctgaataaagatttctaaaggtagaacttgcatggacgaaaccatgcatgcatgcatggcagcaatcagctggtgtacgttgggtgacccaaaagaattgaagaaggagccctaaatcatgcaggcagcagcaactgcagtacaggcagcaaagtag

SEQ ID NO: 58395 - DNA, 2269 bp, Zea Mays
caacaacagttttatatgttttgcgcactctaaaaacaacaattatgcttctgtttgtgtggagtcaaatgccgtccatactgggaccaatcttcgttctcacttctccatcacatattcacatagtattcacagcggatcttttttttttcaggtggctatacaacatagtatcctgcaaaacccatagaggccaaagcattttgtgttgttgttgacagcaaaacttcctactgcattcaaagacctgcctttataatagataatgaagtttttttttttttgcaactgcgacgaataatataggccgggacctcctccataatccggtcattgcggacagtcctaggctcctagcagctaccacaacgaacatgatgtatttttaccagattttacagtcctagttcttgtttgttatttcatgagagtatcaggccacaaagaacatgggccgtgctgcgcggaacacatacatgggctcacactggaccaggaggggagaagaaacacggaagggaggctctcaccagtcaccactcacctgacggctgacgacgagtgagcgagaggaacggggagagggaagttaaacgcgcggcgatgccggagctgccggaggtggaggcggcgcgtcgggcgctgcaggcgcactgcgtggggaggcgcatcgcgcgctgcgccgtggcggacgacgccaaggtggtcgttgccgccgccggccgcgcggccttcgagcgggccatggtcggccggaccatcgtcgccgcgcgccggaggggcaagaacctctggctccagctcgacgcgccgcccttcccgtccttccagttcgggatggcaggcgcgatatatatcaaaggcattcctgtgacgaattataagagatccgttgttaattccgaagaggagtggccctccaaacactctaaattctttgctgagcttgatgatggtttggagttctctttcactgataaacggcgctttgcaagagttcgtttgtttgaagatcctgaaaccttacccccaatttctgagttaggcccagatgctctgtttgaaccaatgtccgtcgatagtttcttggactccctgggtagaaagaagatagggataaaagctcttctacttgatcagtttttttttataaaatgagcagagcttcatatcaggcattggcaattggattgcagacgaggtgctttaccagtcaaggatccatccattacagattgcttcgaatctacctagggagagttgtgaagcactgcaccagagtatcgaagaggttgtcaaatatgctgtcgaagttgatgctgacatggaccgctttccgaaggaatggttatttcatcaccgttggggcaagaagcctggcaaagtcgatggaaagaaaatcgagttcataacagctggtggcaggaccactgcctacgtgccgcaactgcaaaaactggttggaacccagtccagcaaaacgatatccgtggccgagaacggtgatgccaaggattcagggaccgagggagaagatgcagatgcagatgttttgaagccaagaaagcgagccgcgacctccaggggacagcgaaacaaagataccgccggctcgagaaaagcaagaggaaatggcgccgatgctgaggcggctgaaccagcaacaggtgtcgtcggaagcaacagtgagcaagcttttggccaagccaacagtgacgctgtcgataaatcagatcgggctacaagacgatcgtcgaggaaagtgaaagcccgcaagtaaatctgaacaaggtagccagggatctgtccatggagtttcatactggccagcgtatttgcgcctctgagtaatgtatcttaggaacagaagattatattcatgctgcatattcctgggggattcgctccggaccaacgtttgctctgttccctcggtgctatggatagtagcatatctaggttgtgcataaatgcactgaggtttatgtactctttccaatcttccatgatgctatggaagaggtgattaggtgaaatgatgtttcccctggcgcgtgcggttccacgcatagttgccgtaaagtgaaaaaaatacagattgcttaacctctgctgaataaagatttctaaaggtagaacttgcatggacgaaaccatgcatgcatgcatggcagcaatcagctggtgtacgttgggtgacccaaaagaattgaagaaggagccctaaatcatgcaggcagcagcaactgcagtacaggcagcaaagtag

SEQ ID NO: 58396 - DNA, 1806 bp, Zea Mays
ccccctcctccccggtctcgcacgcgatgccccgccgtgacagtcgccgcccatcaacggcctcgccctccttcctccatcgtcccgctcgcacgaatctagctagctaggcgaagagctcgagcaagacgggcgggtcggcggcgcccccgcgggcccgctgcagcgcgtcggcggcgcgccagacccaggcatcggcggcgcccgtcgtcgtctcctcgcggtgccgcctcatgtggccgcccagcgcctgccccatctcgaagccgagcccgcagacgtggcactcgtgctgcgcctgcggctccctgtctcctcctccgcctccgccgccgccgacgccgtcgccggcctgctgatgatgcttgtgctgctgcctgagcgccctggcgccgacgccgagctcgaggccgtggcggccccgcaggtggctggtccggtggccgccgagcgcctggaacgaggtgaaggcgcggctgcaggtcctgcacacgaacaagctattccatggcggagcaggatggcgacgcggggcagaggccacccgactccgttccggttattatattggtttaaccttggatcgcgttaattcgggccatgaggaggttattccggtggtttgatatcggatctcgttaattcgggccctgaggagtttgtgcgggttgaaatccccaacacgctaattcgttcgggaacattcctcggtgctaatgaagactcaactagaacccttgcagaaatcgagaagaagattgcaagggctaccgtgttacccagaaatcatggggagaatgggagaaactatgttcccatatgaggtctcctattcttcagctgaagatcatacttgctgtggagcctttgatcccttcagagggaccaaggattggagagaacattttcggttacacgatagtggacatcttcagtagcagctgccgtggccaccataagaatcctccttcagagccatatgtccttgaggttggggttttgcaagattatgttggaagtggaggctgtgtgcaaggcgtgacagcgtgtcgtggtcaaggaccctaagctctagcgccaaattcatatcacatttgttctagaatgagatcatgaatggtccctggggttggcctggttcacgctccattctcagtgcgttttccgacatcgttcttcaagcaagcatgcgagctggctcctattttcactgagcttgtggattgtgtgagcttagatggggagtccttgcaagctgctttgtctagaacaaagcaggttcatgaatttaccgcaaggctgctagatattcatgataagatgatgttgataaataataaagaggatatacgcttaatattgcaccggtcggactatatgttggattctgaaatcaattcactgcttcaaattgaaaactctaggagctatattttgccaccaacgctgcaactttctgttgttccatcaggacctacctaagttagcccagcaaagcacaagcccctatccgcacgacattgcccctacctttcgccgcccagatgctagacacagcgcccagtgcccagccgccatggccaggtccccaatgctcagtgctaggacgcctgccttgacttcatggaatattatagctatgttccctccaacactggaaaatgagccgctaatgtggaaaactaggagttagattgaccgattggttgggagtttggaggtattgtttttacaccatatttctgaagaatgatgcttggtcacttgattggcatggtcatttctattttttctttgtccgctcag

SEQ ID NO: 58397 - DNA, 2781 bp, Zea Mays
ccccctcctccccggtctcgcacgcgatgccccgccgtgacagtcgccgcccatcaacggcctcgccctccttcctccatcgtcccgctcgcacgaatctagctagctaggcgaagagctcgagcaagacgggcgggtcggcggcgcccccgcgggcccgctgcagcgcgtcggcggcgcgccagacccaggcatcggcggcgcccgtcgtcgtctcctcgcggtgccgcctcatgtggccgcccagcgcctgccccatctcgaagccgagcccgcagacgtggcactcgtgctgcgcctgcggctccctgtctcctcctccgcctccgccgccgccgacgccgtcgccggcctgctgatgatgcttgtgctgctgcctgagcgccctggcgccgacgccgagctcgaggccgtggcggccccgcaggtggctggtccggtggccgccgagcgcctggaacgaggtgaaggcgcggctgcaggtcctgcacacgaacaagctattccatggcggagcaggatggcgacgcggggcagaggccacccgactccgttccggttattatattggtttaaccttggatcgcgttaattcgggccatgaggaggttattccggtggtttgatatcggatctcgttaattcgggccctgaggagtttgtgcgggttgaaatccccaacacgctaattcggtaaggacgcctcagctgttgctaattgcaggaacgatcgctattaatatctctaattcagaaagggggcggtgatgaggttgtcgttttctttgttcaaatcgtctcaattgctaatggaatggtcaacccaggtcaaaacaaaataagaatggtcatagttctgatctccgttcgttctgaactatctgctttgccaatttgctgtgaacgggaaatgggtatcataggaagtaatagctgtaatattaccatcatcacttctgttaggtggttcgtgtaggggatcaaaatactaatcagcatcaaccattttttcgacgatgtgccaaccacttcgcactgttgtaagtcaaaaactcatgattctgtacagaattagcagtgtcaatttgttattattcttaagttcataacctgcctacatgtttccctgctgcttacagggctcctttaacatatactagcacatatggttgattaaaatactaatcagtatcaaccattttagttgtggtttcgtttgcgaaactggttctcttaataaggaattttatttcacattttctaatactaattgcagcagttaatgttatgatgctatggtcctatatgtcgtattaaaatatttgtcatacatggtactaaaccaataattgagtgcataatggtgatcaaggtaaagttagaaaggaatcttcatatgctggtggatttttttgagcctaaaatgggtctatatgacaattcgggaacattcctcggtgctaatgaagactcaactagaacccttgcagaaatcgagaagaagattgcaagggctaccgtgttacccagaaatcatggggagaatgggagaaactatgttcccatatgaggtctcctattcttcagctgaagatcatacttgctgtggagcctttgatcccttcagagggaccaaggattggagagaacattttcggttacacgatagtggacatcttcagtagcagctgccgtggccaccataagaatcctccttcagagccatatgtccttgaggttggggttttgcaagattatgttggaagtggaggctgtgtgcaaggcgtgacagcgtgtcgtggtcaaggaccctaagctctagcgccaaattcatatcacatttgttctagaatgagatcatgaatggtccctggggttggcctggttcacgctccattctcagtgcgttttccgacatcgttcttcaagcaagcatgcgagctggctcctattttcactgagcttgtggattgtgtgagcttagatggggagtccttgcaagctgctttgtctagaacaaagcaggttcatgaatttaccgcaaggctgctagatattcatgataagatgatgttgataaataataaagaggtggttggcaatgcagtgatgctcggtgaaatcataaactacgtgcagtccctacaatgacaagttgagtttatgtccatgaaactggccaccgtgaatccccaggtggacttaaatagcctgcctaacgtcctccctaaagatgtacatcagtcttgtggtccgccacatttctcgctggagacctcagacgcttcgttgtcgtacctcagccagcctcaccatggaagccctcttggctgcatggacaaccagagttgtatgcatccacttgacacgacgttttgcctggcgataaatccgcagtatcatttcctcaacggtgttagcgatgcatcgtctcagttgcagctaatttgatgcttgtgtttatggaaaccaagaggtggcgctgatccattggaaacctggttgtgtatgaatgggtttccagctacttctattcttggagatagaaaccaacatgtttggtttttgtttttattcgctttagaacaactcatttttgtacgaaaagaggcatttagctataattgtttgttgtagtatgtttaccgcaggatagccgttccatgaaatacataaaaacctgatactgttgttatatttggtttagtcatgctcttatggaacctttaatgaggatttttctatatcaagatatcatcgtcatcgtcattattattgcat

SEQ ID NO: 58398 - DNA, 2376 bp, Zea Mays
ccccctcctccccggtctcgcacgcgatgccccgccgtgacagtcgccgcccatcaacggcctcgccctccttcctccatcgtcccgctcgcacgaatctagctagctaggcgaagagctcgagcaagacgggcgggtcggcggcgcccccgcgggcccgctgcagcgcgtcggcggcgcgccagacccaggcatcggcggcgcccgtcgtcgtctcctcgcggtgccgcctcatgtggccgcccagcgcctgccccatctcgaagccgagcccgcagacgtggcactcgtgctgcgcctgcggctccctgtctcctcctccgcctccgccgccgccgacgccgtcgccggcctgctgatgatgcttgtgctgctgcctgagcgccctggcgccgacgccgagctcgaggccgtggcggccccgcaggtggctggtccggtggccgccgagcgcctggaacgaggtgaaggcgcggctgcaggtcctgcacacgaacaagctattccatggcggagcaggatggcgacgcggggcagaggccacccgactccgttccggttattatattggtttaaccttggatcgcgttaattcgggccatgaggaggttattccggtggtttgatatcggatctcgttaattcgggccctgaggagtttgtgcgggttgaaatccccaacacgctaattcgttcgggaacattcctcggtgctaatgaagactcaactagaacccttgcagaaatcgagaagaagattgcaagggctaccgtgttacccagaaatcatggggagaatgggagaaactatgttcccatatgaggtctcctattcttcagctgaagatcatacttgctgtggagcctttgatcccttcagagggaccaaggattggagagaacattttcggttacacgatagtggacatcttcagtagcagctgccgtggccaccataagaatcctccttcagagccatatgtccttgagattatgttggaagtggaggctgtgtgcaaggcgtgacagcgtgtcgtggtcaaggaccctaagctctagcgccaaattcatatcacatttgttctagaatgagatcatgaatggtccctggggttggcctggttcacgctccattctcagtgcgttttccgacatcgttcttcaagcaagcatgcgagctggctcctattttcactgagcttgtggattgtgtgagcttagatggggagtccttgcaagctgctttgtctagaacaaagcaggttcatgaatttaccgcaaggctgctagatattcatgataagatgatgttgataaataataaagaggacctacctaagttagcccagcaaagcacaagcccctatccgcacgacattgcccctacctttcgccgcccagatgctagacacagcgcccagtgcccagccgccatggccaggtccccaatgctcagtgctaggacgcctgccttgacttcatggaatattatagctatgttccctccaacactggaaaatgagccgctaatgtggaaaactaggagttagattgaccgattggttgggagtttggaggattaccaatgctagaatctgtatggattctatcagctgttcgcctactgatgcttatgtgccaatttagtgagactggagtcatacactccatacaaatctatacaaaatcaaagtggttggcaatgcagtgatgctcggtgaaatcataaactacgtgcagtccctacaatgacaagttgagtttatgtccatgaaactggccaccgtgaatccccaggtggacttaaatagcctgcctaacgtcctccctaaagatgtacatcagtcttgtggtccgccacatttctcgctggagacctcagacgcttcgttgtcgtacctcagccagcctcaccatggaagccctcttggctgcatggacaaccagagttgtatgcatccacttgacacgacgttttgcctggcgataaatccgcagtatcatttcctcaacggtgttagcgatgcatcgtctcagctaatttgatgcttgtgtttatggaaaccaagaggtggcgctgatccattggaaacctggttgtgtatgaatgggtttccagctacttctattcttggagatagaaaccaacatgtttggtttttgtttttattcgctttagaacaactcatttttgtacgaaaagaggcatttagctataattgtttgttgtagtatgtttaccgcaggatagccgttccatgaaatacataaaaacctgatactgttgttatatttggtttagtcatgctcttatggaacctttaatgaggatttttctatatcaagatatcatcgtcatcgtcattattattgcat

SEQ ID NO: 58399 - DNA, 1990 bp, Zea Mays
ccccctcctccccggtctcgcacgcgatgccccgccgtgacagtcgccgcccatcaacggcctcgccctccttcctccatcgtcccgctcgcacgaatctagctagctaggcgaagagctcgagcaagacgggcgggtcggcggcgcccccgcgggcccgctgcagcgcgtcggcggcgcgccagacccaggcatcggcggcgcccgtcgtcgtctcctcgcggtgccgcctcatgtggccgcccagcgcctgccccatctcgaagccgagcccgcagacgtggcactcgtgctgcgcctgcggctccctgtctcctcctccgcctccgccgccgccgacgccgtcgccggcctgctgatgatgcttgtgctgctgcctgagcgccctggcgccgacgccgagctcgaggccgtggcggccccgcaggtggctggtccggtggccgccgagcgcctggaacgaggtgaaggcgcggctgcaggtcctgcacacgaacaagctattccatggcggagcaggatggcgacgcggggcagaggccacccgactccgttccggttattatattggtttaaccttggatcgcgttaattcgggccatgaggaggttattccggtggtttgatatcggatctcgttaattcgggccctgaggagtttgtgcgggttgaaatccccaacacgctaattcgttcgggaacattcctcggtgctaatgaagactcaactagaacccttgcagaaatcgagaagaagattgcaagggctaccgtgttacccagaaatcatggggagctgaagatcatacttgctgtggagcctttgatcccttcagagggaccaaggattggagagaacattttcggttacacgatagtggacatcttcagtagcagctgccgtggccaccataagaatcctccttcagagccatatgtccttgaggttggggttttgcaagattatgttggaagtggaggctgtgtgcaaggcgtgacagcgtgtcgtggtcaaggaccctaagctctagcgccaaattcatatcacatttgttctagaatgagatcatgaatggtccctggggttggcctggttcacgctccattctcagtgcgttttccgacatcgttcttcaagcaagcatgcgagctggctcctattttcactgagcttgtggattgtgtgagcttagatggggagtccttgcaagctgctttgtctagaacaaagcaggttcatgaatttaccgcaaggctgctagatattcatgataagatgatgttgataaataataaagaggtggttggcaatgcagtgatgctcggtgaaatcataaactacgtgcagtccctacaatgacaagttgagtttatgtccatgaaactggccaccgtgaatccccaggtggacttaaatagcctgcctaacgtcctccctaaagatgtacatcagtcttgtggtccgccacatttctcgctggagacctcagacgcttcgttgtcgtacctcagccagcctcaccatggaagccctcttggctgcatggacaaccagagttgtatgcatccacttgacacgacgttttgcctggcgataaatccgcagtatcatttcctcaacggtgttagcgatgcatcgtctcagttgcagctaatttgatgcttgtgtttatggaaaccaagaggtggcgctgatccattggaaacctggttgtgtatgaatgggtttccagctacttctattcttggagatagaaaccaacatgtttggtttttgtttttattcgctttagaacaactcatttttgtacgaaaagaggcatttagctataattgtttgttgtagtatgtttaccgcaggatagccgttccatgaaatacataaaaacctgatactgttgttatatttggtttagtcatgctcttatggaacctttaatgaggatttttctatatcaagatatcatcgtcatcgtcattattattgcat

SEQ ID NO: 58400 - DNA, 2880 bp, Zea Mays
ccccctcctccccggtctcgcacgcgatgccccgccgtgacagtcgccgcccatcaacggcctcgccctccttcctccatcgtcccgctcgcacgaatctagctagctaggcgaagagctcgagcaagacgggcgggtcggcggcgcccccgcgggcccgctgcagcgcgtcggcggcgcgccagacccaggcatcggcggcgcccgtcgtcgtctcctcgcggtgccgcctcatgtggccgcccagcgcctgccccatctcgaagccgagcccgcagacgtggcactcgtgctgcgcctgcggctccctgtctcctcctccgcctccgccgccgccgacgccgtcgccggcctgctgatgatgcttgtgctgctgcctgagcgccctggcgccgacgccgagctcgaggccgtggcggccccgcaggtggctggtccggtggccgccgagcgcctggaacgaggtgaaggcgcggctgcaggtcctgcacacgaacaagctattccatggcggagcaggatggcgacgcggggcagaggccacccgactccgttccggttattatattggtttaaccttggatcgcgttaattcgggccatgaggaggttattccggtggtttgatatcggatctcgttaattcgggccctgaggagtttgtgcgggttgaaatccccaacacgctaattcggtaaggacgcctcagctgttgctaattgcaggaacgatcgctattaatatctctaattcagaaagggggcggtgatgaggttgtcgttttctttgttcaaatcgtctcaattgctaatggaatggtcaacccaggtcaaaacaaaataagaatggtcatagttctgatctccgttcgttctgaactatctgctttgccaatttgctgtgaacgggaaatgggtatcataggaagtaatagctgtaatattaccatcatcacttctgttaggtggttcgtgtaggggatcaaaatactaatcagcatcaaccattttttcgacgatgtgccaaccacttcgcactgttgtaagtcaaaaactcatgattctgtacagaattagcagtgtcaatttgttattattcttaagttcataacctgcctacatgtttccctgctgcttacagggctcctttaacatatactagcacatatggttgattaaaatactaatcagtatcaaccattttagttgtggtttcgtttgcgaaactggttctcttaataaggaattttatttcacattttctaatactaattgcagcagttaatgttatgatgctatggtcctatatgtcgtattaaaatatttgtcatacatggtactaaaccaataattgagtgcataatggtgatcaaggtaaagttagaaaggaatcttcatatgctggtggatttttttgagcctaaaatgggtctatatgacaattcgggaacattcctcggtgctaatgaagactcaactagaacccttgcagaaatcgagaagaagattgcaagggctaccgtgttacccagaaatcatggggagaatgggagaaactatgttcccatatgaggtctcctattcttcagctgaagatcatacttgctgtggagcctttgatcccttcagagggaccaaggattggagagaacattttcggttacacgatagtggacatcttcagtagcagctgccgtggccaccataagaatcctccttcagagccatatgtccttgagattatgttggaagtggaggctgtgtgcaaggcgtgacagcgtgtcgtggtcaaggaccctaagctctagcgccaaattcatatcacatttgttctagaatgagatcatgaatggtccctggggttggcctggttcacgctccattctcagtgcgttttccgacatcgttcttcaagcaagcatgcgagctggctcctattttcactgagcttgtggattgtgtgagcttagatggggagtccttgcaagctgctttgtctagaacaaagcaggttcatgaatttaccgcaaggctgctagatattcatgataagatgatgttgataaataataaagaggattaccaatgctagaatctgtatggattctatcagctgttcgcctactgatgcttatgtgccaatttagtgagactggagtcatacactccatacaaatctatacaaaatcaaagtggttggcaatgcagtgatgctcggtgaaatcataaactacgtgcagtccctacaatgacaagttgagtttatgtccatgaaactggccaccgtgaatccccaggtggacttaaatagcctgcctaacgtcctccctaaagatgtacatcagtcttgtggtccgccacatttctcgctggagacctcagacgcttcgttgtcgtacctcagccagcctcaccatggaagccctcttggctgcatggacaaccagagttgtatgcatccacttgacacgacgttttgcctggcgataaatccgcagtatcatttcctcaacggtgttagcgatgcatcgtctcagttgcagctaatttgatgcttgtgtttatggaaaccaagaggtggcgctgatccattggaaacctggttgtgtatgaatgggtttccagctacttctattcttggagatagaaaccaacatgtttggtttttgtttttattcgctttagaacaactcatttttgtacgaaaagaggcatttagctataattgtttgttgtagtatgtttaccgcaggatagccgttccatgaaatacataaaaacctgatactgttgttatatttggtttagtcatgctcttatggaacctttaatgaggatttttctatatcaagatatcatcgtcatcgtcattattattgcat

SEQ ID NO: 58401 - DNA, 2753 bp, Zea Mays
ccccctcctccccggtctcgcacgcgatgccccgccgtgacagtcgccgcccatcaacggcctcgccctccttcctccatcgtcccgctcgcacgaatctagctagctaggcgaagagctcgagcaagacgggcgggtcggcggcgcccccgcgggcccgctgcagcgcgtcggcggcgcgccagacccaggcatcggcggcgcccgtcgtcgtctcctcgcggtgccgcctcatgtggccgcccagcgcctgccccatctcgaagccgagcccgcagacgtggcactcgtgctgcgcctgcggctccctgtctcctcctccgcctccgccgccgccgacgccgtcgccggcctgctgatgatgcttgtgctgctgcctgagcgccctggcgccgacgccgagctcgaggccgtggcggccccgcaggtggctggtccggtggccgccgagcgcctggaacgaggtgaaggcgcggctgcaggtcctgcacacgaacaagctattccatggcggagcaggatggcgacgcggggcagaggccacccgactccgttccggttattatattggtttaaccttggatcgcgttaattcgggccatgaggaggttattccggtggtttgatatcggatctcgttaattcgggccctgaggagtttgtgcgggttgaaatccccaacacgctaattcggtggttcgtgtaggggatcaaaatactaatcagcatcaaccattttttcgacgatgtgccaaccacttcgcactgttgtaagtcaaaaactcatgattctgtacagaattagcagtgtcaatttgttattattcttaagttcataacctgcctacatgtttccctgctgcttacagggctcctttaacatatactagcacatatggttgattaaaatactaatcagtatcaaccattttagttgtggtttcgtttgcgaaactggttctcttaataaggaattttatttcacattttctaatactaattgcagcagttaatgttatgatgctatggtcctatatgtcgtattaaaatatttgtcatacatggtactaaaccaataattgagtgcataatggtgatcaaggtaaagttagaaaggaatcttcatatgctggtggatttttttgagcctaaaatgggtctatatgacaattcgggaacattcctcggtgctaatgaagactcaactagaacccttgcagaaatcgagaagaagattgcaagggctaccgtgttacccagaaatcatggggagaatgggagaaactatgttcccatatgaggtctcctattcttcagctgaagatcatacttgctgtggagcctttgatcccttcagagggaccaaggattggagagaacattttcggttacacgatagtggacatcttcagtagcagctgccgtggccaccataagaatcctccttcagagccatatgtccttgaggttggggttttgcaagattatgttggaagtggaggctgtgtgcaaggcgtgacagcgtgtcgtggtcaaggaccctaagctctagcgccaaattcatatcacatttgttctagaatgagatcatgaatggtccctggggttggcctggttcacgctccattctcagtgcgttttccgacatcgttcttcaagcaagcatgcgagctggctcctattttcactgagcttgtggattgtgtgagcttagatggggagtccttgcaagctgctttgtctagaacaaagcaggttcatgaatttaccgcaaggctgctagatattcatgataagatgatgttgataaataataaagaggatatacgcttaatattgcaccggtcggactatatgttggattctgaaatcaattcactgcttcaaattgaaaactctaggagctatattttgccaccaacgctgcaactttctgttgttccatcaggattaccaatgctagaatctgtatggattctatcagctgttcgcctactgatgcttatgtgccaatttagtgagactggagtcatacactccatacaaatctatacaaaatcaaagtggttggcaatgcagtgatgctcggtgaaatcataaactacgtgcagtccctacaatgacaagttgagtttatgtccatgaaactggccaccgtgaatccccaggtggacttaaatagcctgcctaacgtcctccctaaagatgtacatcagtcttgtggtccgccacatttctcgctggagacctcagacgcttcgttgtcgtacctcagccagcctcaccatggaagccctcttggctgcatggacaaccagagttgtatgcatccacttgacacgacgttttgcctggcgataaatccgcagtatcatttcctcaacggtgttagcgatgcatcgtctcagttgcagctaatttgatgcttgtgtttatggaaaccaagaggtggcgctgatccattggaaacctggttgtgtatgaatgggtttccagctacttctattcttggagatagaaaccaacatgtttggtttttgtttttattcgctttagaacaactcatttttgtacgaaaagaggcatttagctataattgtttgttgtagtatgtttaccgcaggatagccgttccatgaaatacataaaaacctgatactgttgttatatttggtttagtcatgctcttatggaacctttaatgaggatttttctatatcaagatatcatcgtcatcgtcattattattgcat

SEQ ID NO: 58402 - DNA, 1899 bp, Zea Mays
ccccctcctccccggtctcgcacgcgatgccccgccgtgacagtcgccgcccatcaacggcctcgccctccttcctccatcgtcccgctcgcacgaatctagctagctaggcgaagagctcgagcaagacgggcgggtcggcggcgcccccgcgggcccgctgcagcgcgtcggcggcgcgccagacccaggcatcggcggcgcccgtcgtcgtctcctcgcggtgccgcctcatgtggccgcccagcgcctgccccatctcgaagccgagcccgcagacgtggcactcgtgctgcgcctgcggctccctgtctcctcctccgcctccgccgccgccgacgccgtcgccggcctgctgatgatgcttgtgctgctgcctgagcgccctggcgccgacgccgagctcgaggccgtggcggccccgcaggtggctggtccggtggccgccgagcgcctggaacgaggtgaaggcgcggctgcaggtcctgcacacgaacaagctattccatggcggagcaggatggcgacgcggggcagaggccacccgactccgttccgttcgggaacattcctcggtgctaatgaagactcaactagaacccttgcagaaatcgagaagaagattgcaagggctaccgtgttacccagaaatcatggggagaatgggagaaactatgttcccatatgaggtctcctattcttcagctgaagatcatacttgctgtggagcctttgatcccttcagagggaccaaggattggagagaacattttcggttacacgatagtggacatcttcagtagcagctgccgtggccaccataagaatcctccttcagagccatatgtccttgaggttggggttttgcaagattatgttggaagtggaggctgtgtgcaaggcgtgacagcgtgtcgtggtcaaggaccctaagctctagcgccaaattcatatcacatttgttctagaatgagatcatgaatggtccctggggttggcctggttcacgctccattctcagtgcgttttccgacatcgttcttcaagcaagcatgcgagctggctcctattttcactgagcttgtggattgtgtgagcttagatggggagtccttgcaagctgctttgtctagaacaaagcaggttcatgaatttaccgcaaggctgctagatattcatgataagatgatgttgataaataataaagaggtggttggcaatgcagtgatgctcggtgaaatcataaactacgtgcagtccctacaatgacaagttgagtttatgtccatgaaactggccaccgtgaatccccaggtggacttaaatagcctgcctaacgtcctccctaaagatgtacatcagtcttgtggtccgccacatttctcgctggagacctcagacgcttcgttgtcgtacctcagccagcctcaccatggaagccctcttggctgcatggacaaccagagttgtatgcatccacttgacacgacgttttgcctggcgataaatccgcagtatcatttcctcaacggtgttagcgatgcatcgtctcagttgcagctaatttgatgcttgtgtttatggaaaccaagaggtggcgctgatccattggaaacctggttgtgtatgaatgggtttccagctacttctattcttggagatagaaaccaacatgtttggtttttgtttttattcgctttagaacaactcatttttgtacgaaaagaggcatttagctataattgtttgttgtagtatgtttaccgcaggatagccgttccatgaaatacataaaaacctgatactgttgttatatttggtttagtcatgctcttatggaacctttaatgaggatttttctatatcaagatatcatcgtcatcgtcattattattgcat

SEQ ID NO: 58403 - DNA, 2570 bp, Zea Mays
gttaccttctgatgggttggtttggactcttcaatttctaggtcccgctggaggcgaaagcttgcgaggtaggagtacacttgggcttggaggcttgaagcctcagggtttaccaattaagggttattatattggtttaaccttggatcgcgttaattcgggccatgaggaggttattccggtggtttgatatcggatctcgttaattcgggccctgaggagtttgtgcgggttgaaatccccaacacgctaattcggtaaggacgcctcagctgttgctaattgcaggaacgatcgctattaatatctctaattcagaaagggggcggtgatgaggttgtcgttttctttgttcaaatcgtctcaattgctaatggaatggtcaacccaggtcaaaacaaaataagaatggtcatagttctgatctccgttcgttctgaactatctgctttgccaatttgctgtgaacgggaaatgggtatcataggaagtaatagctgtaatattaccatcatcacttctgttaggtggttcgtgtaggggatcaaaatactaatcagcatcaaccattttttcgacgatgtgccaaccacttcgcactgttgtaagtcaaaaactcatgattctgtacagaattagcagtgtcaatttgttattattcttaagttcataacctgcctacatgtttccctgctgcttacagggctcctttaacatatactagcacatatggttgattaaaatactaatcagtatcaaccattttagttgtggtttcgtttgcgaaactggttctcttaataaggaattttatttcacattttctaatactaattgcagcagttaatgttatgatgctatggtcctatatgtcgtattaaaatatttgtcatacatggtactaaaccaataattgagtgcataatggtgatcaaggtaaagttagaaaggaatcttcatatgctggtggatttttttgagcctaaaatgggtctatatgacaagtatgttctacttattgacttcaacagcctttacccttcaataatccaagcaaatgatgaatacttacaatctcattgaacttatggatccttatgccaaacagttcgggaacattcctcggtgctaatgaagactcaactagaacccttgcagaaatcgagaagaagattgcaagggctaccgtgttacccagaaatcatggggagaatgggagaaactatgttcccatatgaggtctcctattcttcagctgaagatcatacttgctgtggagcctttgatcccttcagagggaccaaggattggagagaacattttcggttacacgatagtggacatcttcagtagcagctgccgtggccaccataagaatcctccttcagagccatatgtccttgaggttggggttttgcaagattatgttggaagtggaggctgtgtgcaaggcgtgacagcgtgtcgtggtcaaggaccctaagctctagcgccaaattcatatcacatttgttctagaatgagatcatgaatggtccctggggttggcctggttcacgctccattctcagtgcgttttccgacatcgttcttcaagcaagcatgcgagctggctcctattttcactgagcttgtggattgtgtgagcttagatggggagtccttgcaagctgctttgtctagaacaaagcaggttcatgaatttaccgcaaggctgctagatattcatgataagatgatgttgataaataataaagaggatatacgcttaatattgcaccggtcggactatatgttggattctgaaatcaattcactgcttcaaattgaaaactctaggagctatattttgccaccaacgctgcaactttctgttgttccatcaggtggttggcaatgcagtgatgctcggtgaaatcataaactacgtgcagtccctacaatgacaagttgagtttatgtccatgaaactggccaccgtgaatccccaggtggacttaaatagcctgcctaacgtcctccctaaagatgtacatcagtcttgtggtccgccacatttctcgctggagacctcagacgcttcgttgtcgtacctcagccagcctcaccatggaagccctcttggctgcatggacaaccagagttgtatgcatccacttgacacgacgttttgcctggcgataaatccgcagtatcatttcctcaacggtgttagcgatgcatcgtctcagctaatttgatgcttgtgtttatggaaaccaagaggtggcgctgatccattggaaacctggttgtgtatgaatgggtttccagctacttctattcttggagatagaaaccaacatgtttggtttttgtttttattcgctttagaacaactcatttttgtacgaaaagaggcatttagctataattgtttgttgtagtatgtttaccgcaggatagccgttccatgaaatacataaaaacctgatactgttgttatatttggtttagtcatgctcttatggaacctttaatgaggatttttctatatcaagatatcatcgtcatcgtcattattattgcat

SEQ ID NO: 58404 - DNA, 1584 bp, Zea Mays
ctgatgggttggtttggactcttcaatttctaggtcccgctggaggcgaaagcttgcgaggtaggagtacacttgggcttggaggcttgaagcctcagggtttaccaattaagggttattatattggtttaaccttggatcgcgttaattcgggccatgaggaggttattccggtggtttgatatcggatctcgttaattcgggccctgaggagtttgtgcgggttgaaatccccaacacgctaattcgttcgggaacattcctcggtgctaatgaagactcaactagaacccttgcagaaatcgagaagaagattgcaagggctaccgtgttacccagaaatcatggggagaatgggagaaactatgttcccatatgaggtctcctattcttcagctgaagatcatacttgctgtggagcctttgatcccttcagagggaccaaggattggagagaacattttcggttacacgatagtggacatcttcagtagcagctgccgtggccaccataagaatcctccttcagagccatatgtccttgaggttggggttttgcaagattatgttggaagtggaggctgtgtgcaaggcgtgacagcgtgtcgtggtcaaggaccctaagctctagcgccaaattcatatcacatttgttctagaatgagatcatgaatggtccctggggttggcctggttcacgctccattctcagtgcgttttccgacatcgttcttcaagcaagcatgcgagctggctcctattttcactgagcttgtggattgtgtgagcttagatggggagtccttgcaagctgctttgtctagaacaaagcaggttcatgaatttaccgcaaggctgctagatattcatgataagatgatgttgataaataataaagaggtggttggcaatgcagtgatgctcggtgaaatcataaactacgtgcagtccctacaatgacaagttgagtttatgtccatgaaactggccaccgtgaatccccaggtggacttaaatagcctgcctaacgtcctccctaaagatgtacatcagtcttgtggtccgccacatttctcgctggagacctcagacgcttcgttgtcgtacctcagccagcctcaccatggaagccctcttggctgcatggacaaccagagttgtatgcatccacttgacacgacgttttgcctggcgataaatccgcagtatcatttcctcaacggtgttagcgatgcatcgtctcagctaatttgatgcttgtgtttatggaaaccaagaggtggcgctgatccattggaaacctggttgtgtatgaatgggtttccagctacttctattcttggagatagaaaccaacatgtttggtttttgtttttattcgctttagaacaactcatttttgtacgaaaagaggcatttagctataattgtttgttgtagtatgtttaccgcaggatagccgttccatgaaatacataaaaacctgatactgttgttatatttggtttagtcatgctcttatggaacctttaatgaggatttttctatatcaagatatcatcgtcatcgtcattattattgcat

SEQ ID NO: 58405 - DNA, 1339 bp, Zea Mays
gttggtttggactcttcaatttctaggtcccgctggaggcgaaagcttgcgaggtaggagtacacttgggcttggaggcttgaagcctcagggtttaccaattaagggttattatattggtttaaccttggatcgcgttaattcgggccatgaggaggttattccggtggtttgatatcggatctcgttaattcgggccctgaggagtttgtgcgggttgaaatccccaacacgctaattcgttcgggaacattcctcggtgctaatgaagactcaactagaacccttgcagaaatcgagaagaagattgcaagggctaccgtgttacccagaaatcatggggagaatgggagaaactatgttcccatatgaggtctcctattcttcagctgaagatcatacttgctgtggagcctttgatcccttcagagggaccaaggattggagagaacattttcggttacacgatagtggacatcttcagtagcagctgccgtggccaccataagaatcctccttcagagccatatgtccttgagattatgttggaagtggaggctgtgtgcaaggcgtgacagcgtgtcgtggtcaaggaccctaagctctagcgccaaattcatatcacatttgttctagaatgagatcatgaatggtccctggggttggcctggttcacgctccattctcagtgcgttttccgacatcgttcttcaagcaagcatgcgagctggctcctattttcactgagcttgtggattgtgtgagcttagatggggagtccttgcaagctgctttgtctagaacaaagcaggttcatgaatttaccgcaaggctgctagatattcatgataagatgatgttgataaataataaagaggatatacgcttaatattgcaccggtcggactatatgttggattctgaaatcaattcactgcttcaaattgaaaactctaggagctatattttgccaccaacgctgcaactttctgttgttccatcaggacctacctaagttagcccagcaaagcacaagcccctatccgcacgacattgcccctacctttcgccgcccagatgctagacacagcgcccagtgcccagccgccatggccaggtccccaatgctcagtgctaggacgcctgccttgacttcatggaatattatagctatgttccctccaacactggaaaatgagccgctaatgtggaaaactaggagttagattgaccgattggttgggagtttggaggtattgtttttacaccatatttctgaagaatgatgcttggtcacttgattggcatggtcatttctattttttctttgtccgctcag

SEQ ID NO: 58406 - DNA, 1605 bp, Zea Mays
gtgccaaccacttcgcactgttttcgggaacattcctcggtgctaatgaagactcaactagaacccttgcagaaatcgagaagaagattgcaagggctaccgtgttacccagaaatcatggggagaatgggagaaactatgttcccatatgaggtctcctattcttcagctgaagatcatacttgctgtggagcctttgatcccttcagagggaccaaggattggagagaacattttcggttacacgatagtggacatcttcagtagcagctgccgtggccaccataagaatcctccttcagagccatatgtccttgaggttggggttttgcaagattatgttggaagtggaggctgtgtgcaaggcgtgacagcgtgtcgtggtcaaggaccctaagctctagcgccaaattcatatcacatttgttctagaatgagatcatgaatggtccctggggttggcctggttcacgctccattctcagtgcgttttccgacatcgttcttcaagcaagcatgcgagctggctcctattttcactgagcttgtggattgtgtgagcttagatggggagtccttgcaagctgctttgtctagaacaaagcaggttcatgaatttaccgcaaggctgctagatattcatgataagatgatgttgataaataataaagaggatatacgcttaatattgcaccggtcggactatatgttggattctgaaatcaattcactgcttcaaattgaaaactctaggagctatattttgccaccaacgctgcaactttctgttgttccatcaggattaccaatgctagaatctgtatggattctatcagctgttcgcctactgatgcttatgtgccaatttagtgagactggagtcatacactccatacaaatctatacaaaatcaaagtggttggcaatgcagtgatgctcggtgaaatcataaactacgtgcagtccctacaatgacaagttgagtttatgtccatgaaactggccaccgtgaatccccaggtggacttaaatagcctgcctaacgtcctccctaaagatgtacatcagtcttgtggtccgccacatttctcgctggagacctcagacgcttcgttgtcgtacctcagccagcctcaccatggaagccctcttggctgcatggacaaccagagttgtatgcatccacttgacacgacgttttgcctggcgataaatccgcagtatcatttcctcaacggtgttagcgatgcatcgtctcagttgcagctaatttgatgcttgtgtttatggaaaccaagaggtggcgctgatccattggaaacctggttgtgtatgaatgggtttccagctacttctattcttggagatagaaaccaacatgtttggtttttgtttttattcgctttagaacaactcatttttgtacgaaaagaggcatttagctataattgtttgttgtagtatgtttaccgcaggatagccgttccatgaaatacataaaaacctgatactgttgttatatttggtttagtcatgctcttatggaacctttaatgaggatttttctatatcaagatatcatcgtcatcgtcattattattgcat

SEQ ID NO: 58407 - DNA, 1351 bp, Zea Mays
accacttcgcactgttttcgggaacattcctcggtgctaatgaagactcaactagaacccttgcagaaatcgagaagaagattgcaagggctaccgtgttacccagaaatcatggggagaatgggagaaactatgttcccatatgaggtctcctattcttcagctgaagatcatacttgctgtggagcctttgatcccttcagagggaccaaggattggagagaacattttcggttacacgatagtggacatcttcagtagcagctgccgtggccaccataagaatcctccttcagagccatatgtccttgaggttggggttttgcaagattatgttggaagtggaggctgtgtgcaaggcgtgacagcgtgtcgtggtcaaggaccctaagctctagcgccaaattcatatcacatttgttctagaatgagatcatgaatggtccctggggttggcctggttcacgctccattctcagtgcgttttccgacatcgttcttcaagcaagcatgcgagctggctcctattttcactgagcttgtggattgtgtgagcttagatggggagtccttgcaagctgctttgtctagaacaaagcaggttcatgaatttaccgcaaggctgctagatattcatgataagatgatgttgataaataataaagaggtggttggcaatgcagtgatgctcggtgaaatcataaactacgtgcagtccctacaatgacaagttgagtttatgtccatgaaactggccaccgtgaatccccaggtggacttaaatagcctgcctaacgtcctccctaaagatgtacatcagtcttgtggtccgccacatttctcgctggagacctcagacgcttcgttgtcgtacctcagccagcctcaccatggaagccctcttggctgcatggacaaccagagttgtatgcatccacttgacacgacgttttgcctggcgataaatccgcagtatcatttcctcaacggtgttagcgatgcatcgtctcagctaatttgatgcttgtgtttatggaaaccaagaggtggcgctgatccattggaaacctggttgtgtatgaatgggtttccagctacttctattcttggagatagaaaccaacatgtttggtttttgtttttattcgctttagaacaactcatttttgtacgaaaagaggcatttagctataattgtttgttgtagtatgtttaccgcaggatagccgttccatgaaatacataaaaacctgatactgttgttatatttggtttagtcatgctcttatggaacctttaatgaggatttttctatatcaagatatcatcgtcatcgtcattattattgcat

SEQ ID NO: 58408 - DNA, 1545 bp, Zea Mays
cgcactgttgtaaagttagaaaggaatcttcatatgctggtggatttttttgagcctaaaatgggtctatatgacaattcgggaacattcctcggtgctaatgaagactcaactagaacccttgcagaaatcgagaagaagattgcaagggctaccgtgttacccagaaatcatggggagaatgggagaaactatgttcccatatgaggtctcctattcttcagctgaagatcatacttgctgtggagcctttgatcccttcagagggaccaaggattggagagaacattttcggttacacgatagtggacatcttcagtagcagctgccgtggccaccataagaatcctccttcagagccatatgtccttgaggttggggttttgcaagattatgttggaagtggaggctgtgtgcaaggcgtgacagcgtgtcgtggtcaaggaccctaagctctagcgccaaattcatatcacatttgttctagaatgagatcatgaatggtccctggggttggcctggttcacgctccattctcagtgcgttttccgacatcgttcttcaagcaagcatgcgagctggctcctattttcactgagcttgtggattgtgtgagcttagatggggagtccttgcaagctgctttgtctagaacaaagcaggttcatgaatttaccgcaaggctgctagatattcatgataagatgatgttgataaataataaagaggatatacgcttaatattgcaccggtcggactatatgttggattctgaaatcaattcactgcttcaaattgaaaactctaggagctatattttgccaccaacgctgcaactttctgttgttccatcaggtggttggcaatgcagtgatgctcggtgaaatcataaactacgtgcagtccctacaatgacaagttgagtttatgtccatgaaactggccaccgtgaatccccaggtggacttaaatagcctgcctaacgtcctccctaaagatgtacatcagtcttgtggtccgccacatttctcgctggagacctcagacgcttcgttgtcgtacctcagccagcctcaccatggaagccctcttggctgcatggacaaccagagttgtatgcatccacttgacacgacgttttgcctggcgataaatccgcagtatcatttcctcaacggtgttagcgatgcatcgtctcagttgcagctaatttgatgcttgtgtttatggaaaccaagaggtggcgctgatccattggaaacctggttgtgtatgaatgggtttccagctacttctattcttggagatagaaaccaacatgtttggtttttgtttttattcgctttagaacaactcatttttgtacgaaaagaggcatttagctataattgtttgttgtagtatgtttaccgcaggatagccgttccatgaaatacataaaaacctgatactgttgttatatttggtttagtcatgctcttatggaacctttaatgaggatttttctatatcaagatatcatcgtcatcgtcattattattgcat

SEQ ID NO: 58409 - DNA, 1219 bp, Zea Mays
acataatctatttaaagatagtggacatcttcagtagcagctgccgtggccaccataagaatcctccttcagagccatatgtccttgagtggaggctgtgtgcaaggcgtgacagcgtgtcgtggtcaaggaccctaagctctagcgccaaattcatatcacatttgttctagaatgagatcatgaatggtccctggggttggcctggttcacgctccattctcagtgcgttttccgacatcgttcttcaagcaagcatgcgagctggctcctattttcactgagcttgtggattgtgtgagcttagatggggagtccttgcaagctgctttgtctagaacaaagcaggttcatgaatttaccgcaaggctgctagatattcatgataagatgatgttgataaataataaagaggattaccaatgctagaatctgtatggattctatcagctgttcgcctactgatgcttatgtgccaatttagtgagactggagtcatacactccatacaaatctatacaaaatcaaagtggttggcaatgcagtgatgctcggtgaaatcataaactacgtgcagtccctacaatgacaagttgagtttatgtccatgaaactggccaccgtgaatccccaggtggacttaaatagcctgcctaacgtcctccctaaagatgtacatcagtcttgtggtccgccacatttctcgctggagacctcagacgcttcgttgtcgtacctcagccagcctcaccatggaagccctcttggctgcatggacaaccagagttgtatgcatccacttgacacgacgttttgcctggcgataaatccgcagtatcatttcctcaacggtgttagcgatgcatcgtctcagttgcagctaatttgatgcttgtgtttatggaaaccaagaggtggcgctgatccattggaaacctggttgtgtatgaatgggtttccagctacttctattcttggagatagaaaccaacatgtttggtttttgtttttattcgctttagaacaactcatttttgtacgaaaagaggcatttagctataattgtttgttgtagtatgtttaccgcaggatagccgttccatgaaatacataaaaacctgatactgttgttatatttggtttagtcatgctcttatggaacctttaatgaggatttttctatatcaagatatcatcgtcatcgtcattattattgcat

SEQ ID NO: 58410 - DNA, 1369 bp, Zea Mays
acataatctatttaaagatagtggacatcttcagtagcagctgccgtggccaccataagaatcctccttcagagccatatgtccttgaggttggggttttgcaagattatgttggaagtggaggctgtgtgcaaggcgtgacagcgtgtcgtggtcaaggaccctaagctctagcgccaaattcatatcacatttgttctagaatgagatcatgaatggtccctggggttggcctggttcacgctccattctcagtgcgttttccgacatcgttcttcaagcaagcatgcgagctggctcctattttcactgagcttgtggattgtgtgagcttagatggggagtccttgcaagctgctttgtctagaacaaagcaggttcatgaatttaccgcaaggctgctagatattcatgataagatgatgttgataaataataaagaggatatacgcttaatattgcaccggtcggactatatgttggattctgaaatcaattcactgcttcaaattgaaaactctaggagctatattttgccaccaacgctgcaactttctgttgttccatcaggattaccaatgctagaatctgtatggattctatcagctgttcgcctactgatgcttatgtgccaatttagtgagactggagtcatacactccatacaaatctatacaaaatcaaagtggttggcaatgcagtgatgctcggtgaaatcataaactacgtgcagtccctacaatgacaagttgagtttatgtccatgaaactggccaccgtgaatccccaggtggacttaaatagcctgcctaacgtcctccctaaagatgtacatcagtcttgtggtccgccacatttctcgctggagacctcagacgcttcgttgtcgtacctcagccagcctcaccatggaagccctcttggctgcatggacaaccagagttgtatgcatccacttgacacgacgttttgcctggcgataaatccgcagtatcatttcctcaacggtgttagcgatgcatcgtctcagctaatttgatgcttgtgtttatggaaaccaagaggtggcgctgatccattggaaacctggttgtgtatgaatgggtttccagctacttctattcttggagatagaaaccaacatgtttggtttttgtttttattcgctttagaacaactcatttttgtacgaaaagaggcatttagctataattgtttgttgtagtatgtttaccgcaggatagccgttccatgaaatacataaaaacctgatactgttgttatatttggtttagtcatgctcttatggaacctttaatgaggatttttctatatcaagatatcatcgtcatcgtcattattattgcat

SEQ ID NO: 58411 - DNA, 1242 bp, Zea Mays
acataatctatttaaagatagtggacatcttcagtagcagctgccgtggccaccataagaatcctccttcagagccatatgtccttgaggttggggttttgcaagattatgttggaagtggaggctgtgtgcaaggcgtgacagcgtgtcgtggtcaaggaccctaagctctagcgccaaattcatatcacatttgttctagaatgagatcatgaatggtccctggggttggcctggttcacgctccattctcagtgcgttttccgacatcgttcttcaagcaagcatgcgagctggctcctattttcactgagcttgtggattgtgtgagcttagatggggagtccttgcaagctgctttgtctagaacaaagcaggttcatgaatttaccgcaaggctgctagatattcatgataagatgatgttgataaataataaagaggattaccaatgctagaatctgtatggattctatcagctgttcgcctactgatgcttatgtgccaatttagtgagactggagtcatacactccatacaaatctatacaaaatcaaagtggttggcaatgcagtgatgctcggtgaaatcataaactacgtgcagtccctacaatgacaagttgagtttatgtccatgaaactggccaccgtgaatccccaggtggacttaaatagcctgcctaacgtcctccctaaagatgtacatcagtcttgtggtccgccacatttctcgctggagacctcagacgcttcgttgtcgtacctcagccagcctcaccatggaagccctcttggctgcatggacaaccagagttgtatgcatccacttgacacgacgttttgcctggcgataaatccgcagtatcatttcctcaacggtgttagcgatgcatcgtctcagctaatttgatgcttgtgtttatggaaaccaagaggtggcgctgatccattggaaacctggttgtgtatgaatgggtttccagctacttctattcttggagatagaaaccaacatgtttggtttttgtttttattcgctttagaacaactcatttttgtacgaaaagaggcatttagctataattgtttgttgtagtatgtttaccgcaggatagccgttccatgaaatacataaaaacctgatactgttgttatatttggtttagtcatgctcttatggaacctttaatgaggatttttctatatcaagatatcatcgtcatcgtcattattattgcat

SEQ ID NO: 58412 - DNA, 1260 bp, Zea Mays
acataatctatttaaagatagtggacatcttcagtagcagctgccgtggccaccataagaatcctccttcagagccatatgtccttgaggttggggttttgcaagattatgttggaagtggaggctgtgtgcaaggcgtgacagcgtgtcgtggtcaaggaccctaagctctagcgccaaattcatatcacatttgttctagaatgagatcatgaatggtccctggggttggcctggttcacgctccattctcagtgcgttttccgacatcgttcttcaagcaagcatgcgagctggctcctattttcactgagcttgtggattgtgtgagcttagatggggagtccttgcaagctgctttgtctagaacaaagcaggttcatgaatttaccgcaaggctgctagatattcatgataagatgatgttgataaataataaagaggatatacgcttaatattgcaccggtcggactatatgttggattctgaaatcaattcactgcttcaaattgaaaactctaggagctatattttgccaccaacgctgcaactttctgttgttccatcaggtggttggcaatgcagtgatgctcggtgaaatcataaactacgtgcagtccctacaatgacaagttgagtttatgtccatgaaactggccaccgtgaatccccaggtggacttaaatagcctgcctaacgtcctccctaaagatgtacatcagtcttgtggtccgccacatttctcgctggagacctcagacgcttcgttgtcgtacctcagccagcctcaccatggaagccctcttggctgcatggacaaccagagttgtatgcatccacttgacacgacgttttgcctggcgataaatccgcagtatcatttcctcaacggtgttagcgatgcatcgtctcagttgcagctaatttgatgcttgtgtttatggaaaccaagaggtggcgctgatccattggaaacctggttgtgtatgaatgggtttccagctacttctattcttggagatagaaaccaacatgtttggtttttgtttttattcgctttagaacaactcatttttgtacgaaaagaggcatttagctataattgtttgttgtagtatgtttaccgcaggatagccgttccatgaaatacataaaaacctgatactgttgttatatttggtttagtcatgctcttatggaacctttaatgaggatttttctatatcaagatatcatcgtcatcgtcattattattgcat

SEQ ID NO: 58413 - DNA, 1093 bp, Zea Mays
accaaagagaccctcattttgttcgacgcagaaccaaacaagccgggactggacgcggctccggcgtggcatcgctggaccttcttgctcaccaagaagcccaacccggcctccatcaaagcccacaaccgtcgtagtcgctacttcccctccgatcgtcgacgacgacgcatccacccgagcccttctccgcgaaatagccgtcgccgcactgccgcagctccggctatatcttcgagtacaatgggtccgccgtggtggcgatggtggggaagaactgcttcgcgattgccagcgaccggcggctcggcgtgcagcttcagaccatcgcgacagacttccagagggtgttcaagatccacgacaagctctacatcggcctctcagggctcgccaccgacgcccagacgctgtaccagcggttggtcttcaggcacaagctgtatcagctgcgcgaggagagggacatgaagcctgagacctttgccagccttgtctctgcgctcctctacgagaagagatttgggccatatttctgccagccagtcattgctggacttggagatgacaacgtaccattcatttgtaccatggactgcctcggtgcaaaggagctggccaaggattttgttgtttctggaacagcatcagaatctttgtatggtgcttgtgaatccatgtacaagccggacatgcaacctgatgaactcttcgagactatatcccaagccctgaattcatcagtagaccgtgactgccttagcggatggggtggctatgtgttgattgtgacaccgactgaagtgagggagcatgtgattaagagcaggatggactaaataatggccactagaattattagctggtttccaatgcttaagaccaatgttgtgtttgtattctggagtaacattgtatcatcacagttggtatgagaaggaacgtttgttttctttatctctgttttacaacacttctgtttggtggaatactgagttggtaatatcctagattgcctgttttacaacacttctgcttggatttcaactgaatggtggaataatgagttggtaatattctagattgaggaatt

SEQ ID NO: 58414 - DNA, 1109 bp, Zea Mays
accaaagagaccctcattttgttcgacgcagaaccaaacaagccgggactggacgcggctccggcgtggcatcgctggaccttcttgctcaccaagaagcccaacccggcctccatcaaagcccacaaccgtcgtagtcgctacttcccctccgatcgtcgacgacgacgcatccacccgagcccttctccgcgaaatagccgtcgccgcactgccgcagctccggctatgtcaatcttcgagtacaatgggtccgccgtggtggcgatggtggggaagaactgcttcgcgattgccagcgaccggcggctcggcgtgcagcttcagaccatcgcgacagacttccagagggtgttcaagatccacgacaagctctacatcggcctctcagggctcgccaccgacgcccagacgctgtccctccgcaggtaccagcggttggtcttcaggcacaagctgtatcagctgcgcgaggagagggacatgaagcctgagacctttgccagccttgtctctgcgctcctctacgagaagagatttgggccatatttctgccagccagtcattgctggacttggagatgacaacgtaccattcatttgtaccatggactgcctcggtgcaaaggagctggccaaggattttgttgtttctggaacagcatcagaatctttgtatggtgcttgtgaatccatgtacaagccggacatgcaacctgatgaactcttcgagactatatcccaagccctgaattcatcagtagaccgtgactgccttagcggatggggtggctatgtgttgattgtgacaccgactgaagtgagggagcatgtgattaagagcaggatggactaaataatggccactagaattattagctggtttccaatgcttaagaccaatgttgtgtttgtattctggagtaacattgtatcatcacagttggtatgagaaggaacgtttgttttctttatctctgttttacaacacttctgtttggtggaatactgagttggtaatatcctagattgcctgttttacaacacttctgcttggatttcaactgaatggtggaataatgagttggtaatattctagattgaggaatt

SEQ ID NO: 58415 - DNA, 600 bp, Zea Mays
actacttgtatgcaatgaactgttaagatttgggccatatttctgccagccagtcattgctggacttggagatgacaacgtaccattcatttgtaccatggactgcctcggtgcaaaggagctggccaaggattttgttgtttctggaacagcatcagaatctttgtatggtgcttgtgaatccatgtacaagccggacatgcaacctgatgaactcttcgagactatatcccaagccctgaattcatcagtagaccgtgactgccttagcggatggggtggctatgtgttgattgtgacaccgactgaagtgagggagcatgtgattaagagcaggatggactaaataatggccactagaattattagctggtttccaatgcttaagaccaatgttgtgtttgtattctggagtaacattgtatcatcacagttggtatgagaaggaacgtttgttttctttatctctgttttacaacacttctgtttggtggaatactgagttggtaatatcctagattgcctgttttacaacacttctgcttggatttcaactgaatggtggaataatgagttggtaatattctagattgaggaatt

SEQ ID NO: 58416 - DNA, 3174 bp, Zea Mays
cacactaaggggtatttggaatcaaagtatttttggagttttaagacaaaaccatgatatttaagaataccatttttttcaagaggtgtttggttacactgtaaaaaaactctgttttaaatatcgtagttttatggatactatgatatgttttgagtatttgaaacttcactctaatctaaagtttttgtctatgattaattttgcatatgtatactaaatatcattgttcagatactttgtctttaaacacacattgctaaaagtgttgtaaaaaatacggttatgtaatgacattttaaaaaacatagtgttcaaaaacatgcaactcgtgagccgacagatccgcatcgctccaagctaccgctcccgcccagctcgcaccacggcgatggaaccaaccgtggaagggacggccaagggcggacgctgccctggctggcgttgacagttagatgcgaccgcgggagcgtccgtccaaccgccaccgcgtctgcctcagctccgcgcctccgcctagcctcctctaatctccagcccagtagtggcagactagaatcgtgggcgcgacgcctcggctgattcgtccgccccgatcccaccaccaccgtactccgcgggcgacgtcggccgctagcgatggcgacgtcgtcgtcggcgggggcgcgcaagaaggcccccagccccccgaagcaccgccacgatggcacctcgccgctgccgctcggcatggactggagccctcccccgaagagatgggagggaaggaacaccatatggccacataatcctcaaacaggttggagttactgtgtgatgataccttcttggatcactcaaacacctgaaactggtgtgaccgctgatagctttttgaaatctgtcgttgatacatgtcggtatacaatctccagaaggctttagctctagccatggaattctcagaaggtttagtgactttctgaatctatcttctgatcttaagagcgcatttcccagaaaagatgccccgtcggctcctccgaagcatgctttcttaagaataaattcaagcaggttgcttctagaagagagaaggcatgcattggaggagtggatgcaaaagttactttctgacattgacttgtcaagaagtgctcctgttgctgctttttttgagcttgaagctgctgcacgttcatatttccaagaacggaatgggcgtccttctgaagtaggttcttctacaaaaagcagtactgcctcttctccacatcctgatggacctgcttctggttctcttgctgagtccaatcaaataaatcaaactcttactcgtggcagcagtctgacaggagcaactggaaagggaaccttgtattggaacatgatggtaggaatggttcagcagcgtcttataggggagttgtttcagatgaggaccgtgtatctaatcccggccatgctaggaaggactctgctgaaagtattgggagtgatttgagttctttaagaggaattgaattatctattccaggggttagtagttccctttgggatggtgctgtggtggatggacatattagtcaaacagaacatcttactggtttagatatgcatcttttgtatgatatggatgcacaagtcatccttccaaatgatcaaaaacagaagttgactagacttttgatcacaatgcaacaaagaataggggcagcaaaaactgatatggaggatctcatagcacgactaaatcaggaagcagctgttaaagaatatcttactacaaaggttaaggatttggaggttgaattggaagccgcaaagcaaaagggtagagagacactgcaacaagctatcctgactgaaagagagaggattacccagatgcagtgggatatggatgagctccgtaggaagtattctgagatggagtcaaacctgaaggctgaacaaaatgagaaaactcgtgcagagtcagagaaaacaaccgctagtgataaaaatgaaacattacttgaagaattagaaatcaaacgaaaagaagtcgagactttgaaacatcatcttgtagaagctgaggcaaagtctaaagcagataagaaagttcttgtaaaagaggtcaagtctcttagaaactcccaaacagagatgaagaaagtgttgaatcagtatcttgaacagaagactggtttagagagagttattattagagataaacagaggtcagcacgtgcaaagttatgccgagtgaaatttcttcatgagtgtcgactgctgcatgagcgtctactggaatgtagtgctaaatttctagcagaagaacaaggcaattttactattgatccttcgtccttgcctgatgcattagatcttctagcaacatcagacaatagagtacgcttactcattgctgaggctcaacttttagcacgagatgatgaacaaggctcttctgatgatggcgacaattctgatagcatatcgtcattaactatgagctgggaagatgcaaaagttacagatgaagatgcaacgaaaatactttctgatctacttattgacaacgcgcagctgaggctgcgtcttaatgctgtcatccgcaacgctgtaaatactgccgtgaagccagagaaagaaggtagtggcgaggttcttcccaaaaagacagtccttaactggttgttagacagatgagaacacctatgtatattcctgtgatttaggtttcaaacttacgcggcttgaccaaaattatatgatgagcatacctatatagtgccagggcagcatcaggataaaagtttccggccatgagggaagaagatcctggagaagcgtgcgttgctgctgtacggttgtttatttacacatggaaatatcggaggatagtatatttaggcccgtttggttcagggcaactaaactttagttatttttagtctctaaagaagcaaacagggtgactgaaagtaggtgactaaagtttagtcatctagtcaccaaataagtgactaaaagtgactaaagtaggatttttaccttttaccctctctctttattgtccttgctgttgtcaccctctgatagaggtaatgcagttattattcacactaattaatactctttaaacagttttagttactgaaaccaaatatgatattttagtgattaaacctgactaaaggaaccaaa

SEQ ID NO: 58417 - DNA, 2524 bp, Zea Mays
aagctgtccatgctctagcaggtttccattagagggaaggaacaccatatggccacataatcctcaaacaggttggagttactgtgtgatgataccttcttggatcactcaaacacctgaaactggtgtgaccgctgatagctttttgaaatctgtcgttttttacaggatacatgtcggtatacaatctccagaaggctttagctctagccatggaattctcagaaggtttagtgactttctgaatctatcttctgatcttaagagcgcatttcccagaaaagatgccccgtcggctcctccgaagcatgctttcttaagaataaattcaagcaggttgcttctagaagagagaaggcatgcattggaggagtggatgcaaaagttactttctgacattgacttgtcaagaagtgctcctgttgctgctttttttgagcttgaagctgctgcacgttcatatttccaagaacggaatgggcgtccttctgaagtaggttcttctacaaaaagcagtactgcctcttctccacatcctgatggacctgcttctggttctcttgctgagtccaatcaaataaatcaaactcttactcgtggcagcagtctgacaggagcaactggtaatggtgtgcttggagaagctatcttagatcagtccgatgagcttgttagtaatgccttgaatcacaggaaagggaaccttgtattggaacatgatggtaggaatggttcagcagcgtcttataggggagttgtttcagatgaggaccgtgtatctaatcccggccatgctaggaaggactctgctgaaagtattgggagtgatttgagttctttaagaggaattgaattatctattccaggggttagtagttccctttgggatggtgctgtggtggatggacatattagtcaaacagaacatcttactggtttagatatgcatcttttgtatgatatggatgcacaagtcatccttccaaatgatcaaaaacagaagttgactagacttttgatcacaatgcaacaaagaataggggcagcaaaaactgatatggaggatctcatagcacgactaaatcaggaagcagctgttaaagaatatcttactacaaaggttaaggatttggaggttgaattggaagccgcaaagcaaaagggtagagagacactgcaacaagctatcctgactgaaagagagaggattacccagatgcagtgggatatggatgagctccgtaggaagtattctgagatggagtcaaacctgaaggctgaacaaaatgagaaaactcgtgcagagtcagagaaaacaaccgctagtgataaaaatgaaacattacttgaagaattagaaatcaaacgaaaagaagtcgagactttgaaacatcatcttgtagaagctgaggcaaagtctaaagcagataagaaagttcttgtaaaagaggtcaagtctcttagaaactcccaaacagagatgaagaaagtgttgaatcagtatcttgaacagaagactggtttagagagagttattattagagataaacagaggtcagcacgtgcaaagttatgccgagtgaaatttcttcatgagtgtcgactgctgcatgagcgtctactggaatgtagtgctaaatttctagcagaagaacaaggcaattttactattgatccttcgtccttgcctgatgcattagatcttctagcaacatcagacaatagagtacgcttactcattgctgaggctcaacttttagcacgagatgatgaacaaggctcttctgatgatggcgacaattctgatagcatatcgtcattaactatgagctgggaagatgcaaaagttacagatgaagatgcaacgaaaatactttctgatctacttattgacaacgcgcagctgaggctgcgtcttaatgctgtcatccgcaacgctgtaaatactgccgtgaagccagagaaagaaggtagtggcgaggttcttcccaaaaagacagtccttaactggttgttagacagatgagaacacctatgtatattcctgtgatttaggtttcaaacttacgcggcttgaccaaaattatatgatgagcatacctatatagtgccagggcagcatcaggataaaagtttccggccatgagggaagaagatcctggagaagcgtgcgttgctgctgtacggttgtttatttacacatggaaatatcggaggatagtatatttaggcccgtttggttcagggcaactaaactttagttatttttagtctctaaagaagcaaacagggtgactgaaagtaggtgactaaagtttagtcatctagtcaccaaataagtgactaaaagtgactaaagtaggatttttaccttttaccctctctctttattgtccttgctgttgtcaccctctgatagaggtaatgcagttattattcacactaattaatactctttaaacagttttagttactgaaaccaaatatgatattttagtgattaaacctgactaaaggaaccaaa

SEQ ID NO: 58418 - DNA, 2334 bp, Zea Mays
gttgcatttcatatgcaaattggaaaatgcagtgtttcagttttacaggatacatgtcggtatacaatctccagaaggctttagctctagccatggaattctcagaaggtttagtgactttctgaatctatcttctgatcttaagagcgcatttcccagaaaagatgccccgtcggctcctccgaagcatgctttcttaagaataaattcaagcaggttgcttctagaagagagaaggcatgcattggaggagtggatgcaaaagttactttctgacattgacttgtcaagaagtgctcctgttgctgctttttttgagcttgaagctgctgcacgttcatatttccaagaacggaatgggcgtccttctgaagtaggttcttctacaaaaagcagtactgcctcttctccacatcctgatggacctgcttctggttctcttgctgagtccaatcaaataaatcaaactcttactcgtggcagcagtctgacaggagcaactggaaagggaaccttgtattggaacatgatggtaggaatggttcagcagcgtcttataggggagttgtttcagatgaggaccgtgtatctaatcccggccatgctaggaaggactctgctgaaagtattgggagtgatttgagttctttaagaggaattgaattatctattccaggggttagtagttccctttgggatggtgctgtggtggatggacatattagtcaaacagaacatcttactggtttagatatgcatcttttgtatgatatggatgcacaagtcatccttccaaatgatcaaaaacagaagttgactagacttttgatcacaatgcaacaaagaataggggcagcaaaaactgatatggaggatctcatagcacgactaaatcaggaagcagctgttaaagaatatcttactacaaaggttaaggatttggaggttgaattggaagccgcaaagcaaaagggtagagagacactgcaacaagctatcctgactgaaagagagaggattacccagatgcagtgggatatggatgagctccgtaggaagtattctgagatggagtcaaacctgaaggctgaacaaaatgagaaaactcgtgcagagtcagagaaaacaaccgctagtgataaaaatgaaacattacttgaagaattagaaatcaaacgaaaagaagtcgagactttgaaacatcatcttgtagaagctgaggcaaagtctaaagcagataagaaagttcttgtaaaagaggtcaagtctcttagaaactcccaaacagagatgaagaaagtgttgaatcagtatcttgaacagaagactggtttagagagagttattattagagataaacagaggtcagcacgtgcaaagttatgccgagtgaaatttcttcatgagtgtcgactgctgcatgagcgtctactggaatgtagtgctaaatttctagcagaagaacaaggcaattttactattgatccttcgtccttgcctgatgcattagatcttctagcaacatcagacaatagagtacgcttactcattgctgaggctcaacttttagcacgagatgatgaacaaggctcttctgatgatggcgacaattctgatagcatatcgtcattaactatgagctgggaagatgcaaaagttacagatgaagatgcaacgaaaatactttctgatctacttattgacaacgcgcagctgaggctgcgtcttaatgctgtcatccgcaacgctgtaaatactgccgtgaagccagagaaagaaggtagtggcgaggttcttcccaaaaagacagtccttaactggttgttagacagatgagaacacctatgtatattcctgtgatttaggtttcaaacttacgcggcttgaccaaaattatatgatgagcatacctatatagtgccagggcagcatcaggataaaagtttccggccatgagggaagaagatcctggagaagcgtgcgttgctgctgtacggttgtttatttacacatggaaatatcggaggatagtatatttaggcccgtttggttcagggcaactaaactttagttatttttagtctctaaagaagcaaacagggtgactgaaagtaggtgactaaagtttagtcatctagtcaccaaataagtgactaaaagtgactaaagtaggatttttaccttttaccctctctctttattgtccttgctgttgtcaccctctgatagaggtaatgcagttattattcacactaattaatactctttaaacagttttagttactgaaaccaaatatgatattttagtgattaaacctgactaaaggaaccaaa

SEQ ID NO: 58419 - DNA, 1584 bp, Zea Mays
cgaaaaaggacgcacgggaatacgtaaaaaatccaacgttaacgagaggggagaagaagagaaataaagtgcgaggtaaccgtaaccctacccccttgcgagcacgacccaacccatcatctcgcccgtcacccgtcaggacccggaccaaaccaatcaggcggctcgggcgcggcggcgacacagggcaaggaggccggacgttggggggaccggggctcgacgccagccgtggatcgcgtgcggagggggacaagcgtctgcctcatgtcccgcgacggcggggaatagggcgacggcgtcggcggcggggatcggttgcggcggcgtgacgaggcggctgcggcggcggctcgggagggaggcggcaccatgtctgcggtagtctgtggcaagaggtcctcctccatcttcgccgacgagctcctcccgccgtctccttcctcccctcactcctcccaccagccggcggccaagaggtcccgccgctccccctcgcaccgcggcggctccgacggactccgaccggaggcgctcgtcgactatctacttgccctcttccccgacatggatccacagttgcttgaaaaagctctggaagcatctggagatgacttggattctgcaataaaaagtttgaatttgctgcgcttagagtcagcagaagctatcttgtcatcgactggtttcaaacctgaaaattgtctgcaaacagcaattcagccttctcttgaaggtattcctaatggtggtgtggatacggctacagaacatccgcctagcgtagataattaccagacaagctataatggctctgaatgggttgagctattagtcacagagatgagaaatgcttctgacataaacgatgcacgggctcgtgcgtcaagagctctggaggctttggagaaaacgattgtagagcgtgcaggagctgaagctacacaaaacctgcataaggaaaacatgatgctcaaggagcagttgactgttgttctgcgagagaactccgtgctgaagcgggcagtcgccattcagcacgagcgccaaaaggagttcgacgagaggtctcacgaggtccagaacttgaagcaacttgttctgcagtaccaggagcaagttaggactctagaggtgatattcctaatgaacaactacgccctcacaatgcatctcaagcaggctcaacagaacagctccatacctgggcgtttcaaccctgatgttttctaagcgtagtagctgctgaacggtccgccccagattaataagctatgtatgaatatatcttgttctaccaactgctcctgagatggggatatccgataggtggattcaccgcccaagggtccagaattttcaagtcactatggttttgatttcgatatactccgtatttatttaaacgtgttgctttcatgcaattggctatccgatatattgtgtgcgcccacttttccgggtatggtttatttgatccatggctacaatcaatattcgtcaacgtaatgtaggaactaatattactgtatcccgttgtagttacaatattgttttagaaaatggaaagtttcggtccctgcg

SEQ ID NO: 58420 - DNA, 1368 bp, Zea Mays
cgaaaaaggacgcacgggaatacgtaaaaaatccaacgttaacgagaggggagaagaagagaaataaagtgcgaggtaaccgtaaccctacccccttgcgagcacgacccaacccatcatctcgcccgtcacccgtcaggacccggaccaaaccaatcaggcggcaccatgtctgcggtagtctgtggcaagaggtcctcctccatcttcgccgacgagctcctcccgccgtctccttcctcccctcactcctcccaccagccggcggccaagaggtcccgccgctccccctcgcaccgcggcggctccgacggactccgaccggaggcgctcgtcgactatctacttgccctcttccccgacatggatccacagttgcttgaaaaagctctggaagcatctggagatgacttggattctgcaataaaaagtttgaatttgctgcgcttagagtcagcagaagctatcttgtcatcgactggtttcaaacctgaaaattgtctgcaaacagcaattcagccttctcttgaaggtattcctaatggtggtgtggatacggctacagaacatccgcctagcgtagataattaccagacaagctataatggctctgaatgggttgagctattagtcacagagatgagaaatgcttctgacataaacgatgcacgggctcgtgcgtcaagagctctggaggctttggagaaaacgattgtagagcgtgcaggagctgaagctacacaaaacctgcataaggaaaacatgatgctcaaggagcagttgactgttgttctgcgagagaactccgtgctgaagcgggcagtcgccattcagcacgagcgccaaaaggagttcgacgagaggtctcacgaggtccagaacttgaagcaacttgttctgcagtaccaggagcaagttaggactctagagatgaacaactacgccctcacaatgcatctcaagcaggctcaacagaacagctccatacctgggcgtttcaaccctgatgttttctaagcgtagtagctgctgaacggtccgccccagattaataagctatgtatgaatatatcttgttctaccaactgctcctgagatggggatatccgataggtggattcaccgcccaagggtccagaattttcaagtcactatggttttgatttcgatatactccgtatttatttaaacgtgttgctttcatgcaattggctatccgatatattgtgtgcgcccacttttccgggtatggtttatttgatccatggctacaatcaatattcgtcaacgtaatgtaggaactaatattactgtatcccgttgtagttacaatattgttttagaaaatggaaagtttcggtccctgcg

SEQ ID NO: 58421 - DNA, 909 bp, Zea Mays
gttttctaccagagactattgttttccctggatgcattcatgtagcaacagttatacatgccttctgttgaaggtattcctaatggtggtgtggatacggctacagaacatccgcctagcgtagataattaccagacaagctataatggctctgaatgggttgagctattagtcacagagatgagaaatgcttctgacataaacgatgcacgggctcgtgcgtcaagagctctggaggctttggagaaaacgattgtagagcgtgcaggagctgaagctacacaaaacctgcataaggaaaacatgatgctcaaggagcagttgactgttgttctgcgagagaactccgtgctgaagcgggcagtcgccattcagcacgagcgccaaaaggagttcgacgagaggtctcacgaggtccagaacttgaagcaacttgttctgcagtaccaggagcaagttaggactctagagatgaacaactacgccctcacaatgcatctcaagcaggctcaacagaacagctccatacctgggcgtttcaaccctgatgttttctaagcgtagtagctgctgaacggtccgccccagattaataagctatgtatgaatatatcttgttctaccaactgctcctgagatggggatatccgataggtggattcaccgcccaagggtccagaattttcaagtcactatggttttgatttcgatatactccgtatttatttaaacgtgttgctttcatgcaattggctatccgatatattgtgtgcgcccacttttccgggtatggtttatttgatccatggctacaatcaatattcgtcaacgtaatgtaggaactaatattactgtatcccgttgtagttacaatattgttttagaaaatggaaagtttcggtccctgcg

SEQ ID NO: 58422 - DNA, 892 bp, Zea Mays
gttatatagctcgaccatatgctgctcaatctcaacacattttgtatccgattttagtattcctaatggtggtgtggatacggctacagaacatccgcctagcgtagataattaccagacaagctataatggctctgaatgggttgagctattagtcacagagatgagaaatgcttctgacataaacgatgcacgggctcgtgcgtcaagagctctggaggctttggagaaaacgattgtagagcgtgcaggagctgaagctacacaaaacctgcataaggaaaacatgatgctcaaggagcagttgactgttgttctgcgagagaactccgtgctgaagcgggcagtcgccattcagcacgagcgccaaaaggagttcgacgagaggtctcacgaggtccagaacttgaagcaacttgttctgcagtaccaggagcaagttaggactctagagatgaacaactacgccctcacaatgcatctcaagcaggctcaacagaacagctccatacctgggcgtttcaaccctgatgttttctaagcgtagtagctgctgaacggtccgccccagattaataagctatgtatgaatatatcttgttctaccaactgctcctgagatggggatatccgataggtggattcaccgcccaagggtccagaattttcaagtcactatggttttgatttcgatatactccgtatttatttaaacgtgttgctttcatgcaattggctatccgatatattgtgtgcgcccacttttccgggtatggtttatttgatccatggctacaatcaatattcgtcaacgtaatgtaggaactaatattactgtatcccgttgtagttacaatattgttttagaaaatggaaagtttcggtccctgcg

SEQ ID NO: 58423 - DNA, 3952 bp, Zea Mays
agcagaccagctcccacattcccaatcccaccgcctcgtcagcagcgcgtacgaagaaccccacgacccacgttcttttcttcctcttttcgctgccatttcctcccccaccacaccagggcccaggccaccgccgccttcatcccctatccgcgtaccgccccccgggcgatcgatcgaacgcggctagcctcgccgccgacccgtcgaggcagccatggcggagatcgccgaacgggccgtcgcgggcgaggtgccggaggagccgcggccgccgcacggggaggaggacgacgaaggggaggaggagggggacgtgtgccggatctgccgtaaccatggcgacgaggatcacccactgcggtacccgtgcgcctgcagcggcagcatcaagttcgtgcaccaggactgcctcctccagtggctcgaccatagcaactcgcgccagtgcgagtgcaggtctgtaaacatgcattctccttctcacccgtgtacgctgataatgctccgacaagacttcctttccaggaactgatggttggtgttggaatgaaagcatgccatgtgtttcagttcatccttcggcttgcctttgttctctcagtttggctcatgattatcccattcataacctattggatatggcggttaacatttgtgagaagtctcagtgaagctcaaaggctgttcctcagtcacatcagcgctcagttgatccttagtgattgccttcatgggttccttctctcagctatcattgtccttatatttcttggagccacctcattacgagactacataaggcatttgcgtgaacttggtggacacgatgctgagagggatgatggtgggcgtgaaaggcatggtgctcgggctgttaggaggctagctggtcctaataatagggttcctgcagatggaaatgttgatgaattagcagaagcccaaggaatcggtgctggtgaacttctgaggagaaatgctgaaaatgttgctgctcgattagaacgacttgaggctcaggttgagcagatgcttgatggtctagatgatgcagatggtgcagaggacgttccttttgatgaacttgttggtatgcaaggccctgtcttccacttggttgagaacgcaataacagttttggccagcaatgctatattcctcattgttgtgatctttgttccattctcattgggaaggattatcctgtactatctatcctggtttttctcttcggcttctactcctatgctggcaaaagtgatgcccttcacagaaacagctatttctatagctaatgatacattaaagagcgcacttaatgttgtgaagaatttttcttctgacagtaataatgaaggtgttatcgggcatgtgattgaggttgttactcaatccttgaagataaatgccactggacttagtgtaattcaaggcactgggaagaacagtctgatgaaaggaacaacaattgcctcatcttatctttcagatctgacaactcttgctgttggatacatgttcatcttctgtcttgtgtttttgtatattggatcactggctttacttcgatatgccaggggagaacgttttaccattggaagactctacggtatagctactatattagaggccatcccttctctatgcagacagttctttgctggaatgaagcaccttatgactatggtcaaagttgcattccttctggtcattgagcttggtgtatttcctcttatgtgtggttggtggcttgatgtttgcactctaaagatgctgggcacaacaattgcgcagagagttgaattctttacaatgtcacccttggcgagctcatctatccattggctagttggtattgtgtatatgcttcaaataagcatatttgtgagccttcttcgaggggtgctgcgcaatggagttctttattttctgcgggaccctgctgatccaaattacaatccatttagggatttgattgatgaccctgtgcataaacatgcccgacgagttcttttgtcagttgcagtgtatggaagtttgattgtgatgttagtcttcttacctgtaaaagtggccatgagagtagctccttcaatgtttcctctggacataaccatatttgacccattcactgagattccagttgatgttcttctgttccaaatatgcatcccattcgctattgaacatttcaagcctcgtgcaaccattaaagctcttttacatcattggttttctgtggttggttggggccttggcttaaccgatttcttactgccaaaatctgaagaaaacggtgggcaggaaaatttgaatgcaagggcagaaagaagagacagaggacatggtgggagggaaatggtcgccccacaggttgaacaactcatgatacaacatgttgccgcagaagataatggcaggggggattcaaatgaagccaatgatgtaactgaggactctgatgtagatgaccagggagactctgagtatggctttgtgcttcggatcgtgctcttgcttgtactggcatggatgacattactaatattcaatgctggaatgatagtttttcctatctcacttggccgtctggtttttgaggctgttccccgcctgccaatcacacatggcatcaagtgcaatgatctgttctcctttagcattgggtgctatattctctggagtgtggcagctgggaccagatatgcgattgattacatcacatcacgacagctggggtttttggtacaacagatctgcaagtggtgctcaattgttttgaagagctctgttctcttgtcgatatggatctttgttattcctgtgctgattggactcctttttgagctgctggtcatcgtacccatgagggtgcctattgatgagagccctgtcttcctattgtatcaggattgggctctggggttaatattcttgaaaatatggactagactggttatgttggatcagatggcacctttggttgatgaaagctggaggtcaaagtttgagagagttagagacgatggcttctcccgtttaaagggtctgtgggtcctccatgaaattataatgccgatcgtgaccaagctccttactgctctctgtgtcccatacgtccttgcaaggggcatcttcccgttgctgggttacccactcatcgtgaactcagcggtgtaccggtttgcctggcttggaagcctgatcttcagcgccctcttcttttggggcaagagatttcatgtctggttcaccaacctccacaactctatcagggatgaccgctatctgattgggcggaggctgcacaactttggcgaggactcacactcacctgagcggagtgaatctggagcaagtatagggtcagatgatcaggacagagatattgtactgcgagatcaggaagaggaagtggggttgaggatgaggcgcaataatatgcatgcaaaccaacaacctaggtttgctttataagtaggaagtagttttggacaaagagctcataaccatggtataagcttcggtctgcaggttctgcttgtgctttgtaatgggcgttgtagagtgagtttatgtgttagtgataggaaatagtctaaggactgttctacgataaagcctggagaaagctgaagtggctggtgattacaaaactggtggcaactcccattcctgtggtagtcctggctaactgtaaatatcgtttgacagagcattaccatgccaactcaatctgttgtgatcctcttgtaatgactagtgagttaaggtgaactgttgggtagatacgagatactagattattatcgcgttcactcttttttttttgggtcccatctttgtttttttagaaactgcaattgcattctgtttatatcatggagcatctagcggcttgaaatgaacaagaacaagatgcatgggcagtgggcagtattggttgtgg

SEQ ID NO: 58424 - DNA, 3895 bp, Zea Mays
agctcccacattcccaatcccaccgcctcgtcagcagcgcgtacgaagaaccccacgacccacgttcttttcttcctcttttcgctgccatttcctcccccaccacaccagggcccaggccaccgccgccttcatcccctatccgcgtaccgccccccgggcgatcgatcgaacgcggctagcctcgccgccgacccgtcgaggcagccatggcggagatcgccgaacgggccgtcgcgggcgaggtgccggaggagccgcggccgccgcacggggaggaggacgacgaaggggaggaggagggggacgtgtgccggatctgccgtaaccatggcgacgaggatcacccactgcggtacccgtgcgcctgcagcggcagcatcaagttcgtgcaccaggactgcctcctccagtggctcgaccatagcaactcgcgccagtgcgaggtctgtaaacatgcattctccttctcacccgtgtacgctgataatgctccgacaagacttcctttccaggaactgatggttggtgttggaatgaaagcatgccatgtgtttcagttcatccttcggcttgcctttgttctctcagtttggctcatgattatcccattcataacctattggatatggcggttaacatttgtgagaagtctcagtgaagctcaaaggctgttcctcagtcacatcagcgctcagttgatccttagtgattgccttcatgggttccttctctcagctatcattgtccttatatttcttggagccacctcattacgagactacataaggcatttgcgtgaacttggtggacacgatgctgagagggatgatggtgggcgtgaaaggcatggtgctcgggctgttaggaggctagctggtcctaataatagggttcctgcagatggaaatgttgatgaattagcagaagcccaaggaatcggtgctggtgaacttctgaggagaaatgctgaaaatgttgctgctcgattagaacgacttgaggctcaggttgagcagatgcttgatggtctagatgatgcagatggtgcagaggacgttccttttgatgaacttgttggttttggccagcaatgctatattcctcattgttgtgatctttgttccattctcattgggaaggattatcctgtactatctatcctggtttttctcttcggcttctactcctatgctggcaaaagtgatgcccttcacagaaacagctatttctatagctaatgatacattaaagagcgcacttaatgttgtgaagaatttttcttctgacagtaataatgaaggtgttatcgggcatgtgattgaggttgttactcaatccttgaagataaatgccactggacttagtgtaattcaaggcactgggaagaacagtctgatgaaaggaacaacaattgcctcatcttatctttcagatctgacaactcttgctgttggatacatgttcatcttctgtcttgtgtttttgtatattggatcactggctttacttcgatatgccaggggagaacgttttaccattggaagactctacggtatagctactatattagaggccatcccttctctatgcagacagttctttgctggaatgaagcaccttatgactatggtcaaagttgcattccttctggtcattgagcttggtgtatttcctcttatgtgtggttggtggcttgatgtttgcactctaaagatgctgggcacaacaattgcgcagagagttgaattctttacaatgtcacccttggcgagctcatctatccattggctagttggtattgtgtatatgcttcaaataagcatatttgtgagccttcttcgaggggtgctgcgcaatggagttctttattttctgcgggaccctgctgatccaaattacaatccatttagggatttgattgatgaccctgtgcataaacatgcccgacgagttcttttgtcagttgcagtgtatggaagtttgattgtgatgttagtcttcttacctgtaaaagtggccatgagagtagctccttcaatgtttcctctggacataaccatatttgacccattcactgagattccagttgatgttcttctgttccaaatatgcatcccattcgctattgaacatttcaagcctcgtgcaaccattaaagctcttttacatcattggttttctgtggttggttggggccttggcttaaccgatttcttactgccaaaatctgaagaaaacggtgggcaggaaaatttgaatgcaagggcagaaagaagagacagaggacatggtgggagggaaatggtcgccccacaggttgaacaactcatgatacaacatgttgccgcagaagataatggcaggggggattcaaatgaagccaatgatgtaactgaggactctgatgtagatgaccagggagactctgagtatggctttgtgcttcggatcgtgctcttgcttgtactggcatggatgacattactaatattcaatgctggaatgatagtttttcctatctcacttggccgtctggtttttgaggctgttccccgcctgccaatcacacatggcatcaagtgcaatgatctgttctcctttagcattgggtgctatattctctggagtgtggcagctgggaccagatatgcgattgattacatcacatcacgacagctggggtttttggtacaacagatctgcaagtggtgctcaattgttttgaagagctctgttctcttgtcgatatggatctttgttattcctgtgctgattggactcctttttgagctgctggtcatcgtacccatgagggtgcctattgatgagagccctgtcttcctattgtatcaggattgggctctggggttaatattcttgaaaatatggactagactggttatgttggatcagatggcacctttggttgatgaaagctggaggtcaaagtttgagagagttagagacgatggcttctcccgtttaaagggtctgtgggtcctccatgaaattataatgccgatcgtgaccaagctccttactgctctctgtgtcccatacgtccttgcaaggggcatcttcccgttgctgggttacccactcatcgtgaactcagcggtgtaccggtttgcctggcttggaagcctgatcttcagcgccctcttcttttggggcaagagatttcatgtctggttcaccaacctccacaactctatcagggatgaccgctatctgattgggcggaggctgcacaactttggcgaggactcacactcacctgagcggagtgaatctggagcaagtatagggtcagatgatcaggacagagatattgtactgcgagatcaggaagaggaagtggggttgaggatgaggcgcaataatatgcatgcaaaccaacaacctaggtttgctttataagtaggaagtagttttggacaaagagctcataaccatggtataagcttcggtctgcaggttctgcttgtgctttgtaatgggcgttgtagagtgagtttatgtgttagtgataggaaatagtctaaggactgttctacgataaagcctggagaaagctgaagtggctggtgattacaaaactggtggcaactcccattcctgtggtagtcctggctaactgtaaatatcgtttgacagagcattaccatgccaactcaatctgttgtgatcctcttgtaatgactagtgagttaaggtgaactgttgggtagatacgagatactagattattatcgcgttcactcttttttttttgggtcccatctttgtttttttagaaactgcaattgcattctgtttatatcatggagcatctagcggcttgaaatgaacaagaacaagatgcatgggcagtgggcagtattggttgtgg

SEQ ID NO: 58425 - DNA, 3764 bp, Zea Mays
ccctatccgcgtaccgccccccgggcgatcgatcgaacgcggctagcctcgccgccgacccgtcgaggcagccatggcggagatcgccgaacgggccgtcgcgggcgaggtgccggaggagccgcggccgccgcacggggaggaggacgacgaaggggaggaggagggggacgtgtgccggatctgccgtaaccatggcgacgaggatcacccactgcggtacccgtgcgcctgcagcggcagcatcaagttcgtgcaccaggactgcctcctccagtggctcgaccatagcaactcgcgccagtgcgagtgcaggtctgtaaacatgcattctccttctcacccgtgtacgctgataatgctccgacaagacttcctttccaggaactgatggttggtgttggaatgaaagcatgccatgtgtttcagttcatccttcggcttgcctttgttctctcagtttggctcatgattatcccattcataacctattggatatggcggttaacatttgtgagaagtctcagtgaagctcaaaggctgttcctcagtcacatcagcgctcagttgatccttagtgattgccttcatgggttccttctctcagctatcattgtccttatatttcttggagccacctcattacgagactacataaggcatttgcgtgaacttggtggacacgatgctgagagggatgatggtgggcgtgaaaggcatggtgctcgggctgttaggaggctagctggtcctaataatagggttcctgcagatggaaatgttgatgaattagcagaagcccaaggaatcggtgctggtgaacttctgaggagaaatgctgaaaatgttgctgctcgattagaacgacttgaggctcaggttgagcagatgcttgatggtctagatgatgcagatggtgcagaggacgttccttttgatgaacttgttggttttggccagcaatgctatattcctcattgttgtgatctttgttccattctcattgggaaggattatcctgtactatctatcctggtttttctcttcggcttctactcctatgctggcaaaagtgatgcccttcacagaaacagctatttctatagctaatgatacattaaagagcgcacttaatgttgtgaagaatttttcttctgacagtaataatgaaggtgttatcgggcatgtgattgaggttgttactcaatccttgaagataaatgccactggacttagtgtaattcaaggcactgggaagaacagtctgatgaaaggaacaacaattgcctcatcttatctttcagatctgacaactcttgctgttggatacatgttcatcttctgtcttgtgtttttgtatattggatcactggctttacttcgatatgccaggggagaacgttttaccattggaagactctacggtatagctactatattagaggccatcccttctctatgcagacagttctttgctggaatgaagcaccttatgactatggtcaaagttgcattccttctggtcattgagcttggtgtatttcctcttatgtgtggttggtggcttgatgtttgcactctaaagatgctgggcacaacaattgcgcagagagttgaattctttacaatgtcacccttggcgagctcatctatccattggctagttggtattgtgtatatgcttcaaataagcatatttgtgagccttcttcgaggggtgctgcgcaatggagttctttattttctgcgggaccctgctgatccaaattacaatccatttagggatttgattgatgaccctgtgcataaacatgcccgacgagttcttttgtcagttgcagtgtatggaagtttgattgtgatgttagtcttcttacctgtaaaagtggccatgagagtagctccttcaatgtttcctctggacataaccatatttgacccattcactgagattccagttgatgttcttctgttccaaatatgcatcccattcgctattgaacatttcaagcctcgtgcaaccattaaagctcttttacatcattggttttctgtggttggttggggccttggcttaaccgatttcttactgccaaaatctgaagaaaacggtgggcaggaaaatttgaatgcaagggcagaaagaagagacagaggacatggtgggagggaaatggtcgccccacaggttgaacaactcatgatacaacatgttgccgcagaagataatggcaggggggattcaaatgaagccaatgatgtaactgaggactctgatgtagatgaccagggagactctgagtatggctttgtgcttcggatcgtgctcttgcttgtactggcatggatgacattactaatattcaatgctggaatgatagtttttcctatctcacttggccgtctggtttttgaggctgttccccgcctgccaatcacacatggcatcaagtgcaatgatctgttctcctttagcattgggtgctatattctctggagtgtggcagctgggaccagatatgcgattgattacatcacatcacgacagctggggtttttggtacaacagatctgcaagtggtgctcaattgttttgaagagctctgttctcttgtcgatatggatctttgttattcctgtgctgattggactcctttttgagctgctggtcatcgtacccatgagggtgcctattgatgagagccctgtcttcctattgtatcaggattgggctctggggttaatattcttgaaaatatggactagactggttatgttggatcagatggcacctttggttgatgaaagctggaggtcaaagtttgagagagttagagacgatggcttctcccgtttaaagggtctgtgggtcctccatgaaattataatgccgatcgtgaccaagctccttactgctctctgtgtcccatacgtccttgcaaggggcatcttcccgttgctgggttacccactcatcgtgaactcagcggtgtaccggtttgcctggcttggaagcctgatcttcagcgccctcttcttttggggcaagagatttcatgtctggttcaccaacctccacaactctatcagggatgaccgctatctgattgggcggaggctgcacaactttggcgaggactcacactcacctgagcggagtgaatctggagcaagtatagggtcagatgatcaggacagagatattgtactgcgagatcaggaagaggaagtggggttgaggatgaggcgcaataatatgcatgcaaaccaacaacctaggtttgctttataagtaggaagtagttttggacaaagagctcataaccatggtataagcttcggtctgcaggttctgcttgtgctttgtaatgggcgttgtagagtgagtttatgtgttagtgataggaaatagtctaaggactgttctacgataaagcctggagaaagctgaagtggctggtgattacaaaactggtggcaactcccattcctgtggtagtcctggctaactgtaaatatcgtttgacagagcattaccatgccaactcaatctgttgtgatcctcttgtaatgactagtgagttaaggtgaactgttgggtagatacgagatactagattattatcgcgttcactcttttttttttgggtcccatctttgtttttttagaaactgcaattgcattctgtttatatcatggagcatctagcggcttgaaatgaacaagaacaagatgcatgggcagtgggcagtattggttgtgg

SEQ ID NO: 58426 - DNA, 1008 bp, Zea Mays
cccgcgacgctggtgacggtcgatggcgacggcgagctcaagatggagacgctgctcaaggcgtcggcctacatcctcggcgccacgagttcgagcatgtacaaggccgtgctcgccgacggcaccgcgctggcggtccggcgcatcggcgacagcggcggcaccgaaaagctcaaggacttcgaggtgcaggtgcgcgccatcgcccggttccgccaccccaacatcctccggctgcgcggcttctactggggcgtcgacgagaagctcctcatccacgactacgcccccaatggcagctttgccaacatcgcattcagcaggcggttgtggggtcgtcatcgagcctggagacgcggctgcggatcgcgcgcggcgtggcgtacatccacgagaaaacatcctcctgggtcctggcgtgccgacatggagccctggatcggcgacgtgggcctggaccggctggtgtcgggtgaggcggcgccgcactcccgcgcgggcgcgtcggcgcggctgttcgggagcaagcggtcgatgcactcgacgcgtagcttgcagccaccggcatgtgtctccggggtccgtgtccatccggcaagaaaccgttggaagtaaaccgcgtcactaatcaaggcccaatggccaatacgaaggcccaacacccgcccgtctctgtacggacaaaacaaacaaatggccactcacaaattaaaaacaaaaacgaaacggtgcccgtgaatggcgtgatccgtcgtccgtactactagtagtagaacggtgctaacggccacagaaaaaagcatccggagtgatctggcagcccgtgcaggtgcagcagcagaacgcggcgcaacgtgtctggaactctgtggatgcagctcatccgcacgcggctaacgtggcctgctcgaacctgatcttgaccaaactgcctgtcgtgccccggcttttctttctttctctctttctttttccaaaagcgagctcgattgccttcgcaagtttttt

SEQ ID NO: 58427 - DNA, 723 bp, Zea Mays
aacgccggcagcagcagtctgcagatcgagcacagccgcgcgcggcttgccaccgtacaaacaagcacgagcactccgctagctgctccgccgcgcaacaacaatggcgtccccgcgcggccatcgtcatcgccgggccaacgtgctgcagcgtgcggcggcggcggcggcgctcctgctcgctctatcctgctgctgcagcagcgctgatccgtggccgccgccgccgccgccgcccaaggtgccggcggtgatcgtgttcggggactcgacggtggacacgggcaacaacaacgcgatcggcaccgtgctgaagagcaacttcgcgccgtacgggcgcgacatggccggcggggcccggcccacggggcggttctgcaacgggcgcctgccgcccgacttcgtctccgaggcgctgggcctgccgccgctggtcccggcctacctcgacccggcctacggcatccaggacttcgcccgcggcgtctgcttcgcctccgccggcaccggactcgacaacaagaccgccggcgtgctgtgccgcgccgctggaattgaaggcgctcgactcgatcggcctggcggaagcggatggttgatggacgccgcggccagtgtttaaggcgctgggggggccattaccaacactgcattcttcttaagacacggagcacttggaaccttggaggatcctcgattagactgcgccggatcacattaggg

SEQ ID NO: 58428 - DNA, 1314 bp, Zea Mays
aacgccggcagcagcagtctgcagatcgagcacagccgcgcgcggcttgccaccgtacaaacaagcacgagcactccgctagctgctccgccgcgcaacaacaatggcgtccccgcgcggccatcgtcatcgccgggccaacgtgccgccgccgcccaaggtgccggcggtgatcgtgttcggggactcgacggtggacacgggcaacaacaacgcgatcggcaccgtgctgaagagcaacttcgcgccgtacgggcgcgacatggccggcggggcccggcccacggggcggttctgcaacgggcgcctgccgcccgacttcgtctccgaggcgctgggcctgccgccgctggtcccggcctacctcgacccggcctacggcatccaggacttcgcccgcggcgtctgcttcgcctccgccggcaccggactcgacaacaagaccgccggcgtgctgtcggtgatcccgctgtggaaggaggtggagcacttcagggagtacaagcggcggctgcggcggcacgtggggcgcggcagggcgcggggcatcgtctccgacgcgctctacgtggtgagcatcggcaccaacgacttcctggagaactacttcctgctggtgacggggcggttcgcggagctcacggtgggcgagtacgaggacttcctggtggcgcaggcggagcggttcctgggcgagatccaccggctgggcgcgcgccgggtcaccttcgccgggctcagccccatgggctgcctgccgctggagcgcacgctcaacgcgctccgcggcggctgcgtcgacgagtacaaccaggtggcccgcgactacaacgccaagctgctcgccatgctccgccgcctccaggcggcgcgcccggggctcagggtagcttacgtcgacgtgtaccagaacatgctcgacctcatcaccaacccttccacgctggggctggagaacgtggaggagggctgctgcgcgacggggaaggtggagatgtcttacctgtgcaacgacaagagcccccacacgtgcgccgacgccgacaagtacttcttctgggactccttccaccccacccagaaggtgaaccagttcttcgccaagaagacgctggacctgtgctacgagcagctcctgtgatgctggacgctgcttgctattgctactaatcaatcaatcgcggtgtatagcatagcattcgattgtcttccatgtactgtatctgtatgtagcatggttgttctgcctgttccgaatcccgatgcgtcgattcttttggatttaaatgatcagatcagagtggtttataattt

SEQ ID NO: 58429 - DNA, 7756 bp, Zea Mays
cgcaatcgtcctcggcagcgcatgcacgagcagcgatgcgagaccccggtcgcactccacatttggtagtgacaatcacgccggccggccgtcctctccacctctccattctctcctctcttctccccgctgcattgatacatacatccgtccggaacccatacgctgcacccacacacactgcggccagcagcacagcagagaggggagaggggttgggtggggggataagctttgccgacaccacactgcatccctcggctgcctgaagcaagcaagcgaccgcttcgtcctaggcagcgcgtatctgagctgtcgctgatggatgatagataaagcggtggagcagggtgagagggaggtgctcctcgtggttaccatcgccaccatggccgtgtagtgtacaggagcactgcagcccgaagcccggaagaggtttttcagatacagagagaaagaaagagaagggggtgggcacagcgcaggcaggatgaagtcgagaactgcgacattggcggtcggcatcctcctcctcgtcgcgcttgtggtggtggcggaagccgacaccgacgccggcgatgtcgcggccttggggaatctctacagctcctggaacagcccggcgcagctcaccggctggtccgccagcggcggcgacccctgcggcgctgcgtgggcgggtgtctcctgctcgggctccgccgtcacctcaatcaagctttctggtatggagctgaatggtactctgggttatcaattgtcaagtctacaggctctgaaaacaatggacttaagcaacaaccacttgcatgattcaatcccttaccagttgccatcaaaccttacctatctgaatctggcaaaaaataacttctccggtaatcttccatactctatatccaacttggtttcacttgagtacctcaatctcagccacaactcgttatttcaggaaattggtgaactatttggaagcctcaattcactttcagaactagacgtatctttcaacaacctcacggggaatcttcctttctcaatgggcgctctgtcgaaactttctagcctttatatgcaaaacaatcaactatcaggcacagttgatgtcctcagcaacataagccttgcgacactaaatattgcagacaacaattttagtggcatgatacctcaagaattcagctcaattccaaatttaatagttggaggaaactcatttgtcaatatgcctgcctccccgccatcaactctgaagccacctctggaggaacctcaaggacccgttagcgctccaactagccctgatacccctattgatcaagacgacaggaagatacagacaggtcctcttatagggatagctgttggctcaatagctgctgcctcatgtgttcttttcgtcttggtgttctgcctccacaatgcacgcagaagaaatgacgatgagatcagcgaaccaaaagatcttgtgggttctcttgcagtaagcatagaaacagcagcatccagtagggaagtcctgaacaacaaccatgaaaatagtgctgtagcaacttcagatctccaacatgctgggaagatgatgatgactccggacagagtactgcatgatacgacgaacggttcttctactgccaaaaggccaaaggttcctgtgacggtgacttcatatacagttgctgatctccaagtcgctacgaatagcttctgtgaagactctctcctaggcgagggttcgcttggtcgtgtttacaaggctggttttcctaatgggaaggtacttgccgtgaagaaggtagacgacagtgccttgctgtctctgtatggaggaggagaagacgccttccttgagctggtctcgaacgtttctcggctgaggcatccgaacatcgtgcccctcacaggctactgcgtcgagcacggacaaaggcttctcgtgtacgagtacgttgggaacggaacgctgcgtgatgtgctgcagcactgcttgtctgacgacgagggggcgagcaagaagctcacgtggaacacccgcgtaaggatagcgctaggcaccgctcgcgccttagagtacctgcatgaggtgtgcatacccccagtggtgcatagtaggaccttcaaggcatctaacatcctgcttgatgaagagtacagcccgcatctatctgactgtgggcttgctgctctcactactgtggtctccccggaagcggttggctcctttggatatagtgctcctgagctcgccatgtcaggaacatacactgcaaagagcgacgtgtacagtttcggagtagtgatgctggagctgctgacaggccgcaagccactagacagctccagagagaggtcagaacagtctctcgtgagatgggcagccccgcagctccacgacatcgatctcctcgccaggatggtcgatccggcgctggacgggctgtacccttccaagtccctctcccgtttcgccgacatcatcgccatctgcgtccagccggagccggagttccgcccgccgatgtccgaggtcgtgcagcagctgcgcgcggtgcaggagatggtggaggacccgctcggttgctggcacgcgcgccgtcctcaactcctcatggacctcgagcccggcaccatggactccgtgcgctcaggccccttcggccagatcttctgccccgacaatttcgtcttccagtccggcgccggcaacaactgggccaagggccactacaccgagggcgccggcaacaacaggaaccgcacccgccatccgcgaccgtcaaccacctacctgcatcctctatccgccagcgatgtcggtgcccccaccggcaaccgccaggtgtccctgtgggggtccagcacgaaggagatcacacgtgacacgctgctgcagaaggtctccgaggagaaccagctccacagacacctttgtcgtgccgccgcggctgccctctccatccaggtcatattcaccaatgattgctatgtgtttgcgctgtgccctttcgcaggacctcaatttcagatgaatttaaaagacgaggagacaactgttgaaacggacagcacacaagctccaatttctcaggttctctacacattccactcagttcatcactctatgcctaagttggagtattcgagttctaaaatggatatggagaaagaaatcaggaaacaagtagatgacgccattgctaaagcaaagttagatgaggcatccagggctctcctgatgaaggtactagaagatgccacccaggacgttgtgcagaggcaggcaaagctgaatgcccgtgcgttgcaacggggatatataataccagtatactacgataacttgtccaccgacgaatcttccccagctgagttaatcggggactggtcgtgtgcggagatgttggtgctcttcgagacccccgcgcggttcaccctattcaaggtgctcgacaaggtcgaggtgagtgacccccgctgcaatttctaaagtctgttattgattgggttatgcttttgtattggaccatcagtgctaatgtgctatgcctttgtgttcttattggcaggatctatggaaggagttcacgacgtcggactcagcgagaaaggtggtcgagctgaaggctttcaacaagtttgagaacacatctgatgccctatccgcggcaaccctgattattgatagcaagcctagcaagggtctgcgcaagttcttgcagaaacattgtgagggtgaaacattagcagtagctgattctaagcttggaaatgctataaaagaaaagctgaaaattgactgccttcacaatagtgttgtgatggagctgatgagaggattgagaaatcagcttaccgagcttataactgggttgggtgcacaagaccttggtccaatgagcttgggattgtcccacagcttgtctaggtataagctgaagttcagccctgagaaggttgatacaatgatcattcaagacattggattattggatgatcttgacaaggagcttaacacttatgccatgagagttcgtgaatggtatggctggcactttccagagctcaccaaaatagttacagataatatacagtatgccaaagttgtgaagatgatgggcaacagagttaatgcagtcaaccttgacttctctgagatattgtcagatgaagagctagaaacacagctaaaggaggcagcagtaatatccatgggaacagaagttagtgaccttgacttatcgaatatcagagagctatgtgatcaagtgctggccctttctgagtacagagcccagctgtatgactatttaagaagcaggatgaacactattgcaccaaatttgacagcactggtgggtgaattagttggcgctcaccttattgcacatggtggaagtttgctaaatttggccaagcagcctggtagcacaattcagatacttggtgcagagaaggctttattcagagctctaaagacaaagcattctacacctaagtatggcctcatctaccatgcatccttaattggcaaggcttctcaaaagcacaagggaaaaatctcccgttctcttgctgcaaaaacggctcttgccatccggtatgatgcccttggtgatggtgagaacaaaatccttctggtactgcgttggttttgcgtcgactggttcttggagcatgagccagagccggcgcctagcgagacgacgaccccattcctctcttcactaattatggtccacccgccgcccagggatgagatgcataggaccagccgcacatatctgccggagcgttgttccttggaggaggagccctcgtggtccatgcagtccgccaaggtcgccctcgcggcgccgttcgtcgaggaagccctcgtcgcgccgtccgcggggccggatgagatgcttttcgaagccgcgccttctgccaagtccgcgcagtccgccagggtcgccctcgcggcgccgttcgccgaggacgccctcgtcacgccgtccgccgggccggaggagatgctagccgatgccgcgccgtccaccaagctcggcgaggaggtgctagctgaagtcgcgttcactagggccgctaatgccgcgccaacagtcgcgctcggtgaggaggtcacgctggacagtgcggcctcgccagctctccctgtgacgaccatggatgtcgtatctgagaacgtgactacgcccatggatgctggatcgtcgcccactacgattgatctcgttagatctttgctccccaatatttcttctccgacagtacaatacaatctccctgtacttcctgtccaaaggtccaatgttgaacctgtggaaaatatgccaagagttgattggaatagcttacatatagtggaaacacatgatgacgaaggtcgaattgcacttttgagcgaaaatcagatttatgcacttttaggtttaagagaagaggggactacaaatgaatctgaatatgttgaacatggggttgataatgatgatgattgctttcgtactagtgatgttctaccaagtgagatggttatttcgtatgataaggaccaccctataatggatattggtacaatctacccaacaatggaggagttcaagatggcagtacgacaatttgccatcaataaggagtttactttagggacagagaagtcagataaaaagaggtataggtgtttttgcaagtctagtcttgattgtccttggaaaataaatggcaccaaacataaagaggaaagcattgtagaggtgacagccttaactaaccaccatacctgtatgtctaacatgaggatgaaaactataactccatcacagaagtgggtagctagtaaggccgtgactattcttagagaatctcctaaaatgggtgccaaggaattacaggataagctacagaaacaatattctgtcacaatttcttatgacactgtatggaggggtaaggaaaaagcccttgcggaaatttatggtaaatgggaagacaattttgagttgttgtttagatggaaggctgaggtacttaagaggtctcctgggagtgtagtggagattgatgtacttgatgtggatggtcaagtatatttcaatcgttttttctgtgctctaaaaccatgtattgatggtttcttggaaggttgtaggccttatttgagtatagattcgacaacacttaatggaaggtggaatggtcatttggcagcagctgtatgagtcgatggacataattggatgtatccacttgcttatggtttcatagcttctgaaacagaaaataactggacttggtttatgcaacaactaaagaaggcaataggtgatcctccactacttgctgtttgcacagatgcttgtaagggcttggagaatgcagtaaagaatgttttcccaagtgcggagcaaagagaatgcattcttcatcttatgaaaaattttcagaaaaaatttagaggctttggcaagatgtatcctgcagcaagagcttacagagatgacatattctatgaacatatggcctccattctaaatgaatcaacagaagtgttgaaatggttacaagctaatcataagttaaagtggtacagatgtgctttcaatacagaaattaaatgtgattacattactaataatttagcagaggtattcaataactggataagggacattaaagacttgcctgtggctgagcttgctgataaggttagagagatgatcatgcaattatggaacaagcgaagaaatattggatccatgctacctgaaaaaaggatacttccagcaattatggtccagctcaaagcaaatactagagggttggggcatttgaaaattgtaccatctgctaattggagtgcagagatttgggaccacaacaacaaaattgaaaggcacattgtcaaattaaatcaaaggacttgtacatgtcttgaatggcagcacactggtaaaccatgtcaacatgtattggcatttgtaaccagacaacgaggagtggacattgaacagtttgtgcatgagtacttctctgtgaataaattcaaggctgcttacagcagagagattgagccattgacagataaaacccaatggccacaagtagaactaccttttgctgttggcgcaccacttgctaagggaagtgcagggagacgaaggaaactaagactaaaaggatgtttggaaggtggccaaaaaaagaaaaatgttgaaggtgctaacgaaggcgaaaatggtgctgttccaatcaatgcaaagggacagaaaatgacaaggggaccaatgacttgcattcgatgtggagaaaaaggtcatagacaagctagttccaagtgtccactcaatgggactgcaaaaaagagaaagtggaatcaacctaggaggaatattacaaaagctaagccaagagaactttgcacaccacacaggccaactagtgaagaaatattacgggatagtccaggaaggatcactagaagccgccttgcgttcttgttaggagagggcagttcttcccagaccagtaccacaaatcctgtgagagttccagcaacgtctgcaccaaacaagatgactccaaagaggagactatacagtggataaatgatttgttaattctttttaccttctacacgagatatgacctttttacgatgagatgtaaactcgtcacattttttgattatttgtgactatttaacatttatgagatgaatagttggaagaggtcaggctgttgtacagctcctgca

SEQ ID NO: 58430 - DNA, 2374 bp, Zea Mays
gcgagaccccggtcgcactccacatttggtagtgacaatcacgccggccggccgtcctctccacctctccattctctcctctcttctccccgctgcattgatacatacatccgtccggaacccatacgctgcacccacacacactgcggccagcagcacagcagagaggggagaggggttgggtggggggataagctttgccgacaccacactgcatccctcggctgcctgaagcaagcaagcgaccgcttcgtcctaggcagcgcgtatctgagctgtcgctgatggatgatagataaagcggtggagcagggtgagagggaggtgctcctcgtggttaccatcgccaccatggccgtgtagtgtacaggagcactgcagcccgaagcccggaagaggtttttcagatacagagagaaagaaagagaagggggtgggcacagcgcaggcaggatgaagtcgagaactgcgacattggcggtcggcatcctcctcctcgtcgcgcttgtggtggtggcggaagccgacaccgacgccggcgatgtcgcggccttggggaatctctacagctcctggaacagcccggcgcagctcaccggctggtccgccagcggcggcgacccctgcggcgctgcgtgggcgggtgtctcctgctcgggctccgccgtcacctcaatcaagctttctggtatggagctgaatggtactctgggttatcaattgtcaagtctacaggctctgaaaacaatggacttaagcaacaaccacttgcatgattcaatcccttaccagttgccatcaaaccttacctatctgtaatgtctcccaacctgtacatattattcatgctattcgattcttgaaatttgattcaaagcgaatacaggaatctggcaaaaaataacttctccggtaatcttccatactctatatccaacttggtttcacttgagtacctgaaattggtgaactatttggaagcctcaattcactttcagaactagacgtatctttcaacaacctcacggggaatcttcctttctcaatgggcgctctgtcgaaactttctagcctttatatgcaaaacaatcaactatcaggcacagttgatgtcctcagcaacataagccttgcgacactaaatattgcagacaacaattttagtggcatgatacctcaagaattcagctcaattccaaatttaatagttggaggaaactcatttgtcaatatgcctgcctccccgccatcaactctgaagccacctctggaggaacctcaaggacccgttagcgctccaactagccctgatacccctattgatcaagacgacaggaagatacagacaggtcctcttatagggatagctgttggctcaatagctgctgcctcatgtgttcttttcgtcttggtgttctgcctccacaatgcacgcagaagaaatgacgatgagatcagcgaaccaaaagatcttgtgggttctcttgcagtaagcatagaaacagcagcatccagtagggaagtcctgaacaacaaccatgaaaatagtgctgtagcaacttcagatctccaacatgctgggaagatgatgatgactccggacagagtactgcatgatacgacgaacggttcttctactgccaaaaggccaaaggttcctgtgacggtgacttcatatacagttgctgatctccaagtcgctacgaatagcttctgtgaagactctctcctaggcgagggttcgcttggtcgtgtttacaaggctggttttcctaatgggaaggtacttgccgtgaagaaggtagacgacagtgccttgctgtctctgtatggaggaggagaagacgccttccttgagctggtctcgaacgtttctcggctgaggcatccgaacatcgtgcccctcacaggctactgcgtcgagcacggacaaaggcttctcgtgtacgagtacgttgggaacggaacgctgcgtgatgtgctgcagcactgcttgtctgacgacgagggggcgagcaagaagctcacgtggaacacccgcgtaaggatagcgctaggcaccgctcgcgccttagagtacctgcatgaggtgtgcatacccccagtggtgcatagtaggaccttcaaggcatctaacatcctgcttgatgaagagtacagcccgcatctatctgactgtgggcttgctgctctcactactgtggtctccccggaagcggttggctcctttggatatagtgctcctgagctcgccatgtcaggaacatacactgcaaagagcgacgtgtacagtttcggagtagtgatgctggagctgctgacaggccgcaagccactagacagtgtttgtgtgtgtgtgtgtttaccgtaccag

SEQ ID NO: 58431 - DNA, 2673 bp, Zea Mays
gcgagaccccggtcgcactccacatttggtagtgacaatcacgccggccggccgtcctctccacctctccattctctcctctcttctccccgctgcattgatacatacatccgtccggaacccatacgctgcacccacacacactgcggccagcagcacagcagagaggggagaggggttgggtggggggataagctttgccgacaccacactgcatccctcggctgcctgaagcaagcaagcgaccgcttcgtcctaggcagcgcgtatctgagctgtcgctgatggatgatagataaagcggtggagcagggtgagagggaggtgctcctcgtggttaccatcgccaccatggccgtgtagtgtacaggagcactgcagcccgaagcccggaagaggtttttcagatacagagagaaagaaagagaagggggtgggcacagcgcaggcaggatgaagtcgagaactgcgacattggcggtcggcatcctcctcctcgtcgcgcttgtggtggtggcggaagccgacaccgacgccggcgatgtcgcggccttggggaatctctacagctcctggaacagcccggcgcagctcaccggctggtccgccagcggcggcgacccctgcggcgctgcgtgggcgggtgtctcctgctcgggctccgccgtcacctcaatcaagctttctggtatggagctgaatggtactctgggttatcaattgtcaagtctacaggctctgaaaacaatcgaatacaggaatctggcaaaaaataacttctccggtaatcttccatactctatatccaacttggtttcacttgagtacctagacgtatctttcaacaacctcacggggaatcttcctttctcaatgggcgctctgtcgaaactttctagcctttatatgcaaaacaatcaactatcaggcacagttgatgtcctcagcaacataagccttgcgacactaaatattgcagacaacaattttagtggcatgatacctcaagaattcagctcaattccaaatttaatagttggaggaaactcatttgtcaatatgcctgcctccccgccatcaactctgaagccacctctggaggaacctcaaggacccgttagcgctccaactagccctgatacccctattgatcaagacgacaggaagatacagacaggtcctcttatagggatagctgttggctcaatagctgctgcctcatgtgttcttttcgtcttggtgttctgcctccacaatgcacgcagaagaaatgacgatgagatcagcgaaccaaaagatcttgtgggttctcttgcagtaagcatagaaacagcatccagtagggaagtcctgaacaacaaccatgaaaatagtgctgtagcaacttcagatctccaacatgctgggaagatgatgatgactccggacagagtactgcatgatacgacgaacggttcttctactgccaaaaggccaaaggttcctgtgacggtgacttcatatacagttgctgatctccaagtcgctacgaatagcttctgtgaagactctctcctaggcgagggttcgcttggtcgtgtttacaaggctggttttcctaatgggaaggtacttgccgtgaagaaggtagacgacagtgccttgctgtctctgtatggaggaggagaagacgccttccttgagctggtctcgaacgtttctcggctgaggcatccgaacatcgtgcccctcacaggctactgcgtcgagcacggacaaaggcttctcgtgtacgagtacgttgggaacggaacgctgcgtgatgtgctgcagcactgcttgtctgacgacgagggggcgagcaagaagctcacgtggaacacccgcgtaaggatagcgctaggcaccgctcgcgccttagagtacctgcatgaggtgtgcatacccccagtggtgcatagtaggaccttcaaggcatctaacatcctgcttgatgaagagtacagcccgcatctatctgactgtgggcttgctgctctcactactgtggtctccccggaagcggttggctcctttggatatagtgctcctgagctcgccatgtcaggaacatacactgcaaagagcgacgtgtacagtttcggagtagtgatgctggagctgctgacaggccgcaagccactagacagctccagagagaggtcagaacagtctctcgtgagatgggcagccccgcagctccacgacatcgatctcctcgccaggatggtcgatccggcgctggacgggctgtacccttccaagtccctctcccgtttcgccgacatcatcgccatctgcgtccagccggagccggagttccgcccgccgatgtccgaggtcgtgcagcagctggtgcgcctgatgcagagggcggccatcataaggcggcaatcggacgatctgggctactcgtacagggtccccgaccgcgacggcggcgcagcagcaggcgacgtcctctgactctgagaggctaggaggagacccaagttggttcacgttttgtttccgtccgtcacctgtaaatgacatttgacatgtactatagggttcggagtgtacctggacttttcgtcagctgcgagtgtcatgtattgtgtgcgctcttgcaagtggtagatatatagatatatttgtactacttattatgaa

SEQ ID NO: 58432 - DNA, 2802 bp, Zea Mays
gcgagaccccggtcgcactccacatttggtagtgacaatcacgccggccggccgtcctctccacctctccattctctcctctcttctccccgctgcattgatacatacatccgtccggaacccatacgctgcacccacacacactgcggccagcagcacagcagagaggggagaggggttgggtggggggataagctttgccgacaccacactgcatccctcggctgcctgaagcaagcaagcgaccgcttcgtcctaggcagcgcgtatctgagctgtcgctgatggatgatagataaagcggtggagcagggtgagagggaggtgctcctcgtggttaccatcgccaccatggccgtgtagtgtacaggagcactgcagcccgaagcccggaagaggtttttcagatacagagagaaagaaagagaagggggtgggcacagcgcaggcaggatgaagtcgagaactgcgacattggcggtcggcatcctcctcctcgtcgcgcttgtggtggtggcggaagccgacaccgacgccggcgatgtcgcggccttggggaatctctacagctcctggaacagcccggcgcagctcaccggctggtccgccagcggcggcgacccctgcggcgctgcgtgggcgggtgtctcctgctcgggctccgccgtcacctcaatcaagctttctggtatggagctgaatggtactctgggttatcaattgtcaagtctacaggctctgaaaacaatggacttaagcaacaaccacttgcatgattcaatcccttaccagttgccatcaaaccttacctatctgaatctggcaaaaaataacttctccggtaatcttccatactctatatccaacttggtttcacttgagtacctcaatctcagccacaactcgttatttcaggaaattggtgaactatttggaagcctcaattcactttcagaactagacgtatctttcaacaacctcacggggaatcttcctttctcaatgggcgctctgtcgaaactttctagcctttatatgcaaaacaatcaactatcaggcacagttgatgtcctcagcaacataagccttgcgacactaaatattgcagacaacaattttagtggcatgatacctcaagaattcagctcaattccaaatttaatagttggaggaaactcatttgtcaatatgcctgcctccccgccatcaactctgaagccacctctggaggaacctcaaggacccgttagcgctccaactagccctgatacccctattgatcaagacgacaggaagatacagacaggtcctcttatagggatagctgttggctcaatagctgctgcctcatgtgttcttttcgtcttggtgttctgcctccacaatgcacgcagaagaaatgacgatgagatcagcgaaccaaaagatcttgtgggttctcttgcagtaagcatagaaacagcatccagtagggaagtcctgaacaacaaccatgaaaatagtgctgtagcaacttcagatctccaacatgctgggaagatgatgatgactccggacagagtactgcatgatacgacgaacggttcttctactgccaaaaggccaaaggttcctgtgacggtgacttcatatacagttgctgatctccaagtcgctacgaatagcttctgtgaagactctctcctaggcgagggttcgcttggtcgtgtttacaaggctggttttcctaatgggaaggtacttgccgtgaagaaggtagacgacagtgccttgctgtctctgtatggaggaggagaagacgccttccttgagctggtctcgaacgtttctcggctgaggcatccgaacatcgtgcccctcacaggctactgcgtcgagcacggacaaaggcttctcgtgtacgagtacgttgggaacggaacgctgcgtgatgtgctgcagcactgcttgtctgacgacgagggggcgagcaagaagctcacgtggaacacccgcgtaaggatagcgctaggcaccgctcgcgccttagagtacctgcatgaggtgtgcatacccccagtggtgcatagtaggaccttcaaggcatctaacatcctgcttgatgaagagtacagcccgcatctatctgactgtgggcttgctgctctcactactgtggtctccccggaagcggttggctcctttggatatagtgctcctgagctcgccatgtcaggaacatacactgcaaagagcgacgtgtacagtttcggagtagtgatgctggagctgctgacaggccgcaagccactagacagctccagagagaggtcagaacagtctctcgtgagatgggcagccccgcagctccacgacatcgatctcctcgccaggatggtcgatccggcgctggacgggctgtacccttccaagtccctctcccgtttcgccgacatcatcgccatctgcgtccagccggagccggagttccgcccgccgatgtccgaggtcgtgcagcagctggtgcgcctgatgcagagggcggccatcataaggcggcaatcggacgatctgggctactcgtacagggtccccgaccgcgacggcggcgcagcagcaggcgacgtcctctgactctgagaggctaggaggagacccaagttggttcacgttttgtttccgtccgtcacctgtaaatgacatttgacatgtactatagggttcggagtgtacctggacttttcgtcagctgcgagtgtcatgtattgtgtgcgctcttgcaagtggtagatatatagatatatttgtactacttattatgaa

SEQ ID NO: 58433 - DNA, 7532 bp, Zea Mays
gcgagaccccggtcgcactccacatttggtagtgacaatcacgccggccggccgtcctctccacctctccattctctcctctcttctccccgctgcattgatacatacatccgtccggaacccatacgctgcacccacacacactgcggccagcagcacagcagagaggggagaggggttgggtggggggataagctttgccgacaccacactgcatccctcggctgcctgaagcaagcaagcgaccgcttcgtcctaggcagcgcgtatctgagctgtcgctgatggatgatagataaagcggtggagcagggtgagagggaggtgctcctcgtggttaccatcgccaccatggccgtgtagtgtacaggagcactgcagcccgaagcccggaagaggtttttcagatacagagagaaagaaagagaagggggtgggcacagcgcaggcaggatgaagtcgagaactgcgacattggcggtcggcatcctcctcctcgtcgcgcttgtggtggtggcggaagccgacaccgacgccggcgatgtcgcggccttggggaatctctacagctcctggaacagcccggcgcagctcaccggctggtccgccagcggcggcgacccctgcggcgctgcgtgggcgggtgtctcctgctcgggctccgccgtcacctcaatcaagctttctggtatggagctgaatggtactctgggttatcaattgtcaagtctacaggctctgaaaacaatcgaatacaggaatctggcaaaaaataacttctccggtaatcttccatactctatatccaacttggtttcacttgagtacctgaaattggtgaactatttggaagcctcaattcactttcagaactagacgtatctttcaacaacctcacggggaatcttcctttctcaatgggcgctctgtcgaaactttctagcctttatatgcaaaacaatcaactatcaggcacagttgatgtcctcagcaacataagccttgcgacactaaatattgcagacaacaattttagtggcatgatacctcaagaattcagctcaattccaaatttaatagttggaggaaactcatttgtcaatatgcctgcctccccgccatcaactctgaagccacctctggaggaacctcaaggacccgttagcgctccaactagccctgatacccctattgatcaagacgacaggaagatacagacaggtcctcttatagggatagctgttggctcaatagctgctgcctcatgtgttcttttcgtcttggtgttctgcctccacaatgcacgcagaagaaatgacgatgagatcagcgaaccaaaagatcttgtgggttctcttgcagtaagcatagaaacagcagcatccagtagggaagtcctgaacaacaaccatgaaaatagtgctgtagcaacttcagatctccaacatgctgggaagatgatgatgactccggacagagtactgcatgatacgacgaacggttcttctactgccaaaaggccaaaggttcctgtgacggtgacttcatatacagttgctgatctccaagtcgctacgaatagcttctgtgaagactctctcctaggcgagggttcgcttggtcgtgtttacaaggctggttttcctaatgggaaggtacttgccgtgaagaaggtagacgacagtgccttgctgtctctgtatggaggaggagaagacgccttccttgagctggtctcgaacgtttctcggctgaggcatccgaacatcgtgcccctcacaggctactgcgtcgagcacggacaaaggcttctcgtgtacgagtacgttgggaacggaacgctgcgtgatgtgctgcagcactgcttgtctgacgacgagggggcgagcaagaagctcacgtggaacacccgcgtaaggatagcgctaggcaccgctcgcgccttagagtacctgcatgaggtgtgcatacccccagtggtgcatagtaggaccttcaaggcatctaacatcctgcttgatgaagagtacagcccgcatctatctgactgtgggcttgctgctctcactactgtggtctccccggaagcggttggctcctttggatatagtgctcctgagctcgccatgtcaggaacatacactgcaaagagcgacgtgtacagtttcggagtagtgatgctggagctgctgacaggccgcaagccactagacagctccagagagaggtcagaacagtctctcgtgagatgggcagccccgcagctccacgacatcgatctcctcgccaggatggtcgatccggcgctggacgggctgtacccttccaagtccctctcccgtttcgccgacatcatcgccatctgcgtccagccggagccggagttccgcccgccgatgtccgaggtcgtgcagcagctgcgcgcggtgcaggagatggtggaggacccgctcggttgctggcacgcgcgccgtcctcaactcctcatggacctcgagcccggcaccatggactccgtgcgctcaggccccttcggccagatcttctgccccgacaatttcgtcttccagtccggcgccggcaacaactgggccaagggccactacaccgagggcgccggcaacaacaggaaccgcacccgccatccgcgaccgtcaaccacctacctgcatcctctatccgccagcgatgtcggtgcccccaccggcaaccgccaggtgtccctgtgggggtccagcacgaaggagatcacacgtgacacgctgctgcagaaggtctccgaggagaaccagctccacagacacctttgtcgtgccgccgcggctgccctctccatccaggtcatattcaccaatgattgctatgtgtttgcgctgtgccctttcgcaggacctcaatttcagatgaatttaaaagacgaggagacaactgttgaaacggacagcacacaagctccaatttctcaggttctctacacattccactcagttcatcactctatgcctaagttggagtattcgagttctaaaatggatatggagaaagaaatcaggaaacaagtagatgacgccattgctaaagcaaagttagatgaggcatccagggctctcctgatgaaggtactagaagatgccacccaggacgttgtgcagaggcaggcaaagctgaatgcccgtgcgttgcaacggggatatataataccagtatactacgataacttgtccaccgacgaatcttccccagctgagttaatcggggactggtcgtgtgcggagatgttggtgctcttcgagacccccgcgcggttcaccctattcaaggtgctcgacaaggtcgaggtgagtgacccccgctgcaatttctaaagtctgttattgattgggttatgcttttgtattggaccatcagtgctaatgtgctatgcctttgtgttcttattggcaggatctatggaaggagttcacgacgtcggactcagcgagaaaggtggtcgagctgaaggctttcaacaagtttgagaacacatctgatgccctatccgcggcaaccctgattattgatagcaagcctagcaagggtctgcgcaagttcttgcagaaacattgtgagggtgaaacattagcagtagctgattctaagcttggaaatgctataaaagaaaagctgaaaattgactgccttcacaatagtgttgtgatggagctgatgagaggattgagaaatcagcttaccgagcttataactgggttgggtgcacaagaccttggtccaatgagcttgggattgtcccacagcttgtctaggtataagctgaagttcagccctgagaaggttgatacaatgatcattcaagacattggattattggatgatcttgacaaggagcttaacacttatgccatgagagttcgtgaatggtatggctggcactttccagagctcaccaaaatagttacagataatatacagtatgccaaagttgtgaagatgatgggcaacagagttaatgcagtcaaccttgacttctctgagatattgtcagatgaagagctagaaacacagctaaaggaggcagcagtaatatccatgggaacagaagttagtgaccttgacttatcgaatatcagagagctatgtgatcaagtgctggccctttctgagtacagagcccagctgtatgactatttaagaagcaggatgaacactattgcaccaaatttgacagcactggctttattcagagctctaaagacaaagcattctacacctaagtatggcctcatctaccatgcatccttaattggcaaggcttctcaaaagcacaagggaaaaatctcccgttctcttgctgcaaaaacggctcttgccatccggtatgatgcccttggtgatggtgagaacaaaatccttctggtactgcgttggttttgcgtcgactggttcttggagcatgagccagagccggcgcctagcgagacgacgaccccattcctctcttcactaattatggtccacccgccgcccagggatgagatgcataggaccagccgcacatatctgccggagcgttgttccttggaggaggagccctcgtggtccatgcagtccgccaaggtcgccctcgcggcgccgttcgtcgaggaagccctcgtcgcgccgtccgcggggccggatgagatgcttttcgaagccgcgccttctgccaagtccgcgcagtccgccagggtcgccctcgcggcgccgttcgccgaggacgccctcgtcacgccgtccgccgggccggaggagatgctagccgatgccgcgccgtccaccaagctcggcgaggaggtgctagctgaagtcgcgttcactagggccgctaatgccgcgccaacagtcgcgctcggtgaggaggtcacgctggacagtgcggcctcgccagctctccctgtgacgaccatggatgtcgtatctgagaacgtgactacgcccatggatgctggatcgtcgcccactacgattgatctcgttagatctttgctccccaatatttcttctccgacagtacaatacaatctccctgtacttcctgtccaaaggtccaatgttgaacctgtggaaaatatgccaagagttgattggaatagcttacatatagtggaaacacatgatgacgaaggtcgaattgcacttttgagcgaaaatcagatttatgcacttttaggtttaagagaagaggggactacaaatgaatctgaatatgttgaacatggggttgataatgatgatgattgctttcgtactagtgatgttctaccaagtgagatggttatttcgtatgataaggaccaccctataatggatattggtacaatctacccaacaatggaggagttcaagatggcagtacgacaatttgccatcaataaggagtttactttagggacagagaagtcagataaaaagaggtataggtgtttttgcaagtctagtcttgattgtccttggaaaataaatggcaccaaacataaagaggaaagcattgtagaggtgacagccttaactaaccaccatacctgtatgtctaacatgaggatgaaaactataactccatcacagaagtgggtagctagtaaggccgtgactattcttagagaatctcctaaaatgggtgccaaggaattacaggataagctacagaaacaatattctgtcacaatttcttatgacactgtatggaggggtaaggaaaaagcccttgcggaaatttatggtaaatgggaagacaattttgagttgttgtttagatggaaggctgaggtacttaagaggtctcctgggagtgtagtggagattgatgtacttgatgtggatggtcaagtatatttcaatcgttttttctgtgctctaaaaccatgtattgatggtttcttggaaggttgtaggccttatttgagtatagattcgacaacacttaatggaaggtggaatggtcatttggcagcagctgtatgagtcgatggacataattggatgtatccacttgcttatggtttcatagcttctgaaacagaaaataactggacttggtttatgcaacaactaaagaaggcaataggtgatcctccactacttgctgtttgcacagatgcttgtaagggcttggagaatgcagtaaagaatgttttcccaagtgcggagcaaagagaatgcattcttcatcttatgaaaaattttcagaaaaaatttagaggctttggcaagatgtatcctgcagcaagagcttacagagatgacatattctatgaacatatggcctccattctaaatgaatcaacagaagtgttgaaatggttacaagctaatcataagttaaagtggtacagatgtgctttcaatacagaaattaaatgtgattacattactaataatttagcagaggtattcaataactggataagggacattaaagacttgcctgtggctgagcttgctgataaggttagagagatgatcatgcaattatggaacaagcgaagaaatattggatccatgctacctgaaaaaaggatacttccagcaattatggtccagctcaaagcaaatactagagggttggggcatttgaaaattgtaccatctgctaattggagtgcagagatttgggaccacaacaacaaaattgaaaggcacattgtcaaattaaatcaaaggacttgtacatgtcttgaatggcagcacactggtaaaccatgtcaacatgtattggcatttgtaaccagacaacgaggagtggacattgaacagtttgtgcatgagtacttctctgtgaataaattcaaggctgcttacagcagagagattgagccattgacagataaaacccaatggccacaagtagaactaccttttgctgttggcgcaccacttgctaagggaagtgcagggagacgaaggaaactaagactaaaaggatgtttggaaggtggccaaaaaaagaaaaatgttgaaggtgctaacgaaggcgaaaatggtgctgttccaatcaatgcaaagggacagaaaatgacaaggggaccaatgacttgcattcgatgtggagaaaaaggtcatagacaagctagttccaagtgtccactcaatgggactgcaaaaaagagaaagtggaatcaacctaggaggaatattacaaaagctaagccaagagaactttgcacaccacacaggccaactagtgaagaaatattacgggatagtccaggaaggatcactagaagccgccttgcgttcttgttaggagagggcagttcttcccagaccagtaccacaaatcctgtgagagttccagcaacgtctgcaccaaacaagatgactccaaagaggagactatacagtggataaatgatttgttaattctttttaccttctacacgagatatgacctttttacgatgagatgtaaactcgtcacattttttgattatttgtgactatttaacatttatgagatgaatagttggaagaggtcaggctgttgtacagctcctgca

SEQ ID NO: 58434 - DNA, 2140 bp, Zea Mays
gctaacagttggtagttggtactatagttcttcagttatgtgtgtccttttcataatttatatcttctgtttctaaacatgcagggacttaagcaacaaccacttgcatgattcaatcccttaccagttgccatcaaaccttacctatctgaatctggcaaaaaataacttctccggtaatcttccatactctatatccaacttggtttcacttgagtacctcaatctcagccacaactcgttatttcaggaaattggtgaactatttggaagcctcaattcactttcagaactagacgtatctttcaacaacctcacggggaatcttcctttctcaatgggcgctctgtcgaaactttctagcctttatatgcaaaacaatcaactatcaggcacagttgatgtcctcagcaacataagccttgcgacactaaatattgcagacaacaattttagtggcatgatacctcaagaattcagctcaattccaaatttaatagttggaggaaactcatttgtcaatatgcctgcctccccgccatcaactctgaagccacctctggaggaacctcaaggacccgttagcgctccaactagccctgatacccctattgatcaagacgacaggaagatacagacaggtcctcttatagggatagctgttggctcaatagctgctgcctcatgtgttcttttcgtcttggtgttctgcctccacaatgcacgcagaagaaatgacgatgagatcagcgaaccaaaagatcttgtgggttctcttgcagtaagcatagaaacagcagcatccagtagggaagtcctgaacaacaaccatgaaaatagtgctgtagcaacttcagatctccaacatgctgggaagatgatgatgactccggacagagtactgcatgatacgacgaacggttcttctactgccaaaaggccaaaggttcctgtgacggtgacttcatatacagttgctgatctccaagtcgctacgaatagcttctgtgaagactctctcctaggcgagggttcgcttggtcgtgtttacaaggctggttttcctaatgggaaggtacttgccgtgaagaaggtagacgacagtgccttgctgtctctgtatggaggaggagaagacgccttccttgagctggtctcgaacgtttctcggctgaggcatccgaacatcgtgcccctcacaggctactgcgtcgagcacggacaaaggcttctcgtgtacgagtacgttgggaacggaacgctgcgtgatgtgctgcagcactgcttgtctgacgacgagggggcgagcaagaagctcacgtggaacacccgcgtaaggatagcgctaggcaccgctcgcgccttagagtacctgcatgaggtgtgcatacccccagtggtgcatagtaggaccttcaaggcatctaacatcctgcttgatgaagagtacagcccgcatctatctgactgtgggcttgctgctctcactactgtggtctccccggaagcggttggctcctttggatatagtgctcctgagctcgccatgtcaggaacatacactgcaaagagcgacgtgtacagtttcggagtagtgatgctggagctgctgacaggccgcaagccactagacagctccagagagaggtcagaacagtctctcgtgagatgggcagccccgcagctccacgacatcgatctcctcgccaggatggtcgatccggcgctggacgggctgtacccttccaagtccctctcccgtttcgccgacatcatcgccatctgcgtccagccggagccggagttccgcccgccgatgtccgaggtcgtgcagcagctggtgcgcctgatgcagagggcggccatcataaggcggcaatcggacgatctgggctactcgtacagggtccccgaccgcgacggcggcgcagcagcaggcgacgtcctctgactctgagaggctaggaggagacccaagttggttcacgttttgtttccgtccgtcacctgtaaatgacatttgacatgtactatagggttcggagtgtacctggacttttcgtcagctgcgagtgtcatgtattgtgtgcgctcttgcaagtggtagatatatagatatatttgtactacttattatgaa

SEQ ID NO: 58435 - DNA, 1983 bp, Zea Mays
gtactgttcctttgccagcttgcctgctgccaccagtggcacctgcaagcgaacctccacgcgagctgcccggccccggctgcccctgcgccctgcgcccctgcccctgtccctgccggccccttccaaaataaagcgggagggagatgcgctgagccggatggcggcccactcgctctcgctctacctccccgtcgtcacgcgctcgcttgtgcccctagcgtttcgccacctcctgctcccgcaccgcctccggctccggctccggctccgcctcgtctccgccgtctccccatcccgggcgcggcccctcggcctcggcgcccgcccgccccgcccccacgccgcacccctcggctacggagttggtgcagggagaaggccgagtggtggactggaccacagagccatgtcaagttccacaaattcaacagtggccacggagttgtcggtgtctgagaatagcagggaaattgagccgctaccttttgtgaatgacaaacatggaggcgtcatcattgagatgaagactccaatggatcctggagtgttttcagcttacttgaaagcagcgctggcaaaatggagggagcaggtgacccccccccccttctctcagcatcaatgttaccatttatcctatcatgccaagtaaatatcccaatatttaagttttgaactgtggacgacatacctcaaagatccatcaatccatgcaagcatctttatatggtaggtttggtaggtgaaaaaaatggtgctgtgcatgacaactattttaaaggtttaaatacactgtatatcttctatgagccttgaagagccaaccatattgcaaggcatgtgacaatagacatgtggagattactgtacatgtacatcattattttcaatctcagttattcatgagtacctcaaggagagatgtggttacaaatgcatagcctgcacttgtcattgaaaagagctttacatctattactgtactttcctcattgtagggaataagaggtgtctggatcaaattacccatcaccctttccaaccttattccaacagttgtagaggtttctggtaccatcatgcagaggaaacttacttgatgcttgcgtactggcttccaaatacaacacatacactaccagtaaacgcaacccaccgtgttggtgttggagcttttataatgaatgacaaaagagaggtcttggttgtacaagaaaagagtggtgtacttcgaggcctaggtgtgtggaaatttccaactggcgtagttgaaccgggggaagatattaacgttggagccataagagaagtaaaagaagagaccgggattgatgcagaatttgttgaagtgctggccttcaggcagagccacaaagctttttttgataaatcagatctatttttcgtgtgcctgctacgaccgctgtcatatgacattacgaagcaagactcggaaatagaagcatgccagtggatgccagtagaggaatttgcagcacaaccatttgtccagaaacatgagcttgtgaagtacatcctcgaagtaggcctggctaaagttgacaagaaatatgcagggttttcgccaatctccataaaatcggcgtttacagacaaattgtccttattttacatgaaccggagggacctggacaaagcctcaggatagagtaatatgtaattaaacacagggaattcaagatagttgaaatttcagttctggtatgtaaaagcaggccaagtcatattcatacttgattattttgttaacaaattggaagtttcgggcatccgacacttgtgatttttcgaccatatgtcgtctgctacacatctgtgtttcaaaggagtgttgcaatccaaaagtagagatgaaactgttgcaatctaattgtaggtctacagacaataaaatactgttttcctttattatatactccccttttgtcgtgaaatatatctaaatgatttattaataaa

SEQ ID NO: 58436 - DNA, 1577 bp, Zea Mays
gtactgttcctttgccagcttgcctgctgccaccagtggcacctgcaagcgaacctccacgcgagctgcccggccccggctgcccctgcgccctgcgcccctgcccctgtccctgccggccccttccaaaataaagcgggagggagatgcgctgagccggatggcggcccactcgctctcgctctacctccccgtcgtcacgcgctcgcttgtgcccctagcgtttcgccacctcctgctcccgcaccgcctccggctccggctccggctccgcctcgtctccgccgtctccccatcccgggcgcggcccctcggcctcggcgcccgcccgccccgcccccacgccgcacccctcggctacggagttggtgcagggagaaggccgagtggtggactggaccacagagccatgtcaagttccacaaattcaacagtggccacggagttgtcggtgtctgagaatagcagggaaattgagccgctaccttttgtgaatgacaaacatggaggcgtcatcattgagatgaagactccaatggatcctggagtgttttcagcttacttgaaagcagcgctggcaaaatggagggagcagggaataagaggtgtctggatcaaattacccatcaccctttccaaccttattccaacagttgtagaggtttctggtaccatcatgcagaggaaacttacttgatgcttgcgtactggcttccaaatacaacacatacactaccagtaaacgcaacccaccgtgttggtgttggagcttttataatgaatgacaaaagagaggtcttggttgtacaagaaaagagtggtgtacttcgaggcctaggtgtgtggaaatttccaactggcgtagttgaaccgggggaagatattaacgttggagccataagagaagtaaaagaagagaccgggattgatgcagaatttgttgaagtgctggccttcaggcagagccacaaagctttttttgataaatcagatctatttttcgtgtgcctgctacgaccgctgtcatatgacattacgaagcaagactcggaaatagaagcatgccagtggatgccagtagaggaatttgcagcacaaccatttgtccagaaacatgagcttgtgaagtacatcctcgaagtaggcctggctaaagttgacaagaaatatgcagggttttcgccaatctccataaaatcggcgtttacagacaaattgtccttattttacatgaaccggagggacctggacaaagcctcaggatagagtaatatgtaattaaacacagggaattcaagatagttgaaatttcagttctggtatgtaaaagcaggccaagtcatattcatacttgattattttgttaacaaattggaagtttcgggcatccgacacttgtgatttttcgaccatatgtcgtctgctacacatctgtgtttcaaaggagtgttgcaatccaaaagtagagatgaaactgttgcaatctaattgtaggtctacagacaataaaatactgttttcctttattatatactccccttttgtcgtgaaatatatctaaatgatttattaataaa

SEQ ID NO: 58437 - DNA, 816 bp, Zea Mays
atggagggctccgtgcggctgggggacttgaagccctccccatcgcacatcaagccctcgccatcgccggacactggtgaaccttttctcgcgtcccagcctcctccatctctaggctcgcgcgacctggctaggacagacgtgtgcagcccagcagtgtctagtcggacgctacctccatgccccgtagcagatgtgtctaggccagcaccgccaggccagatgacgcctccatgccccgcgcccgtcgtgcctactctagcagcaccacatcgaggccccaaaccaaacaccgaaagttgtttccgctatgatgttcctcgaccaatgaagtggattccagccggtgaatcttggatttaggctacacccacccatcctaaggagaactgcagggaggccaaaaatacaaagatacaaaggaagtcatgaggggggtaaaaagagggcaccatcaaaatgctctatatgccaaggtacaggtcatcgttggagaacatgcaaaagaggccaacctgatgtagacgatgaaccaaagaagaagaggaggagaaacaagaagacatcaagtgttgctgtctcaaatcaattggagggtgggacatcaaatgttgctgaatctaatcagttacaagttgttgaatcgaatgtagatgcctccaatacgttagagggtgcttgatgcgtcaagagtccaatatgtgttgagtgtctgcattttattttgctccaaaattggtcaacggaagggatgtggcagaattaaaagtcttgttgggtgtactgaattttattttgctccaaaactgcttcatg

SEQ ID NO: 58438 - DNA, 1092 bp, Zea Mays
caatcagtgtctactctctccacaggcccaaaacgcctccaagccgtccaagggtactcgagctcgagctacactcggcgtttacggcgccggcgatcacccaccgcgtcctccgccttgtcctctttcctcaacctaacccccatccagcgaggtttctccgctctcatatagaatcagatatgaagagggcggcgccgtctcaggagcccctcgacgtttcttccggggactcctcgggctcggattccgatcaattaggcggcaaggataagggcgggagcgcctctaaagctgctgcaggggctgaagatgtgaagagggtggtgctgcataaggaatcccaggacgtatcttctgatgatgaccttagctcggattctgatgatgatgctgggaaggggaatgcttggaatgcctttgggctgcccaattcctccaaagctgcttcgacggcagaagccaggtcaaagaagaagaagaaaaccggtgtggatttcagcgctctgagccggcacggataccatggcggcccatccgtcttgacagttcgtccggcagcggaggaaccgaactggtcctggtccactgggaaagaccgcgacggcaaagaggacgcacacgcacccgagtcctacgaggaacgcgagcgtaccagggccgcagtaaccgaaggggagaagttcatcgggctgcagaacgcgccgccgaaccagctgttgctggagaaagacaggaaggagaaggacgcctccttctcgcagaaagagaagcggaagagggaccggggccaagccagcagggggaagaactacgtcgaggaggagaagcggctcctgaggggcagcggcgtgtactctggctttgacacttagcaaataccaagagctctagcatgtgtgcataccgagggttagctgcctttcatcgtgtgctttggctgtgtttatttgggctttggatgtagctatgcattgcgttcaaatagtaccgctgccatattctgtgtgccatgtcttgctgcattcgcgagttgccattgatataaaaaaaattggaacttcaaatatcttatgaacatatttgcttcaa

SEQ ID NO: 58439 - DNA, 1623 bp, Zea Mays
acaggcccaaaacgcctccaagccgtccaagggtactcgagctcgagctacactcggcgtttacggcgccggcgatcacccaccgcgtcctccgccttgtcctctttcctcaacctaacccccatccagcgaggtttctccgctctcatatagatatgaagagggcggcgccgtctcaggagcccctcgacgtttcttccggggactcctcgggctcggattccgatcaattaggcggcaaggataagggcgggagcgcctctaaagctgctgcaggggctgaagatgtgaagagggtggtgctgcataaggaatcccaggacgtatcttctgatgatgaccttagctcggattctgatgatgatgctgggaaggggaatgcttggaatgcctttgggctgcccaattcctccaaagctgcttcgacggcagaaggtgctctgatcaggagggccgaaatgtatcagcaatacatgaagcgcattccggttcctgcttaccgtgattctgtaatcccattcacatcgtggctgggactcgccggatcgctgaagcagctgtatgagcaacccttgcattacctcaccaatgtcctcttaaaaaagtgggaccagcaaaggattgggagcgatgatgagcaccggcgtctggacgctatcatccaccctgccagagctgagaccctggtttgggccactgaagaggtccataggctgaccacctctggccagcacttggctagcctctgggcctcagatcccatgtatcatgctcacgtagatcccgtgtttgcttccgtaaagctggagtagccaccgttatgaattggggggttttggtgtttccatggtgtaagcctgcacattttgatttgctaaaacagcaagtaccaatctagtgacgcgaactccagtccagatgacgcttgttctgagtatgatatcttgtcgttacggttcattttaacattaatcttagctctgtgaacagcagccaggtcaaagaagaagaagaaaaccggtgtggatttcagcgctctgagccggcacggataccatggcggcccatccgtcttgacagttcgtccggcagcggaggaaccgaactggtcctggtccactgggaaagaccgcgacggcaaagaggacgcacacgcacccgagtcctacgaggaacgcgagcgtaccagggccgcagtaaccgaaggggagaagttcatcgggctgcagaacgcgccgccgaaccagctgttgctggagaaagacaggaaggagaaggacgcctccttctcgcagaaagagaagcggaagagggaccggggccaagccagcagggggaagaactacgtcgaggaggagaagcggctcctgaggggcagcggcgtgtactctggctttgacacttagcaaataccaagagctctagcatgtgtgcataccgagggttagctgcctttcatcgtgtgctttggctgtgtttatttgggctttggatgtagctatgcattgcgttcaaatagtaccgctgccatattctgtgtgccatgtcttgctgcattcgcgagttgccattgatataaaaaaaattggaacttcaaatatcttatgaacatatttgcttcaa

SEQ ID NO: 58440 - DNA, 1068 bp, Zea Mays
acaggcccaaaacgcctccaagccgtccaagggtactcgagctcgagctacactcggcgtttacggcgccggcgatcacccaccgcgtcctccgccttgtcctctttcctcaacctaacccccatccagcgaggtttctccgctctcatatagatatgaagagggcggcgccgtctcaggagcccctcgacgtttcttccggggactcctcgggctcggattccgatcaattaggcggcaaggataagggcgggagcgcctctaaagctgctgcaggggctgaagatgtgaagagggtggtgctgcataaggaatcccaggacgtatcttctgatgatgaccttagctcggattctgatgatgatgctgggaaggggaatgcttggaatgcctttgggctgcccaattcctccaaagctgcttcgacggcagaagcagccaggtcaaagaagaagaagaaaaccggtgtggatttcagcgctctgagccggcacggataccatggcggcccatccgtcttgacagttcgtccggcagcggaggaaccgaactggtcctggtccactgggaaagaccgcgacggcaaagaggacgcacacgcacccgagtcctacgaggaacgcgagcgtaccagggccgcagtaaccgaaggggagaagttcatcgggctgcagaacgcgccgccgaaccagctgttgctggagaaagacaggaaggagaaggacgcctccttctcgcagaaagagaagcggaagagggaccggggccaagccagcagggggaagaactacgtcgaggaggagaagcggctcctgaggggcagcggcgtgtactctggctttgacacttagcaaataccaagagctctagcatgtgtgcataccgagggttagctgcctttcatcgtgtgctttggctgtgtttatttgggctttggatgtagctatgcattgcgttcaaatagtaccgctgccatattctgtgtgccatgtcttgctgcattcgcgagttgccattgatataaaaaaaattggaacttcaaatatcttatgaacatatttgcttcaa

SEQ ID NO: 58441 - DNA, 1195 bp, Zea Mays
acaggcccaaaacgcctccaagccgtccaagggtactcgagctcgagctacactcggcgtttacggcgccggcgatcacccaccgcgtcctccgccttgtcctctttcctcaacctaacccccatccagcgaggtttctccgctctcatatagaatcagatatgaagagggcggcgccgtctcaggagcccctcgacgtttcttccggggactcctcgggctcggattccgatcaattaggcggcaaggataagggcgggagcgcctctaaagctgctgcaggggctgaagatgtgaagagggtggtgctgcataaggaatcccaggacgtatcttctgatgatgaccttagctcggattctgatgatgatgctgggaaggggaatgcttggaatgcctttgggctgcccaattcctccaaagctgcttcgacggcagaaggtgctctgatcaggagggccgaaatgtatcagcaatacatgaagcgcattccggttcctgcttaccgtgattctgtaatcccattcacatcgtggctgggactcgccggatcgctgaagcagctccaggtcaaagaagaagaagaaaaccggtgtggatttcagcgctctgagccggcacggataccatggcggcccatccgtcttgacagttcgtccggcagcggaggaaccgaactggtcctggtccactgggaaagaccgcgacggcaaagaggacgcacacgcacccgagtcctacgaggaacgcgagcgtaccagggccgcagtaaccgaaggggagaagttcatcgggctgcagaacgcgccgccgaaccagctgttgctggagaaagacaggaaggagaaggacgcctccttctcgcagaaagagaagcggaagagggaccggggccaagccagcagggggaagaactacgtcgaggaggagaagcggctcctgaggggcagcggcgtgtactctggctttgacacttagcaaataccaagagctctagcatgtgtgcataccgagggttagctgcctttcatcgtgtgctttggctgtgtttatttgggctttggatgtagctatgcattgcgttcaaatagtaccgctgccatattctgtgtgccatgtcttgctgcattcgcgagttgccattgatataaaaaaaattggaacttcaaatatcttatgaacatatttgcttcaa

SEQ ID NO: 58442 - DNA, 1629 bp, Zea Mays
acaggcccaaaacgcctccaagccgtccaagggtactcgagctcgagctacactcggcgtttacggcgccggcgatcacccaccgcgtcctccgccttgtcctctttcctcaacctaacccccatccagcgaggtttctccgctctcatatagaatcagatatgaagagggcggcgccgtctcaggagcccctcgacgtttcttccggggactcctcgggctcggattccgatcaattaggcggcaaggataagggcgggagcgcctctaaagctgctgcaggggctgaagatgtgaagagggtggtgctgcataaggaatcccaggacgtatcttctgatgatgaccttagctcggattctgatgatgatgctgggaaggggaatgcttggaatgcctttgggctgcccaattcctccaaagctgcttcgacggcagaaggtgctctgatcaggagggccgaaatgtatcagcaatacatgaagcgcattccggttcctgcttaccgtgattctgtaatcccattcacatcgtggctgggactcgccggatcgctgaagcagctgtatgagcaacccttgcattacctcaccaatgtcctcttaaaaaagtgggaccagcaaaggattgggagcgatgatgagcaccggcgtctggacgctatcatccaccctgccagagctgagaccctggtttgggccactgaagaggtccataggctgaccacctctggccagcacttggctagcctctgggcctcagatcccatgtatcatgctcacgtagatcccgtgtttgcttccgtaaagctggagtagccaccgttatgaattggggggttttggtgtttccatggtgtaagcctgcacattttgatttgctaaaacagcaagtaccaatctagtgacgcgaactccagtccagatgacgcttgttctgagtatgatatcttgtcgttacggttcattttaacattaatcttagctctgtgaacagcagccaggtcaaagaagaagaagaaaaccggtgtggatttcagcgctctgagccggcacggataccatggcggcccatccgtcttgacagttcgtccggcagcggaggaaccgaactggtcctggtccactgggaaagaccgcgacggcaaagaggacgcacacgcacccgagtcctacgaggaacgcgagcgtaccagggccgcagtaaccgaaggggagaagttcatcgggctgcagaacgcgccgccgaaccagctgttgctggagaaagacaggaaggagaaggacgcctccttctcgcagaaagagaagcggaagagggaccggggccaagccagcagggggaagaactacgtcgaggaggagaagcggctcctgaggggcagcggcgtgtactctggctttgacacttagcaaataccaagagctctagcatgtgtgcataccgagggttagctgcctttcatcgtgtgctttggctgtgtttatttgggctttggatgtagctatgcattgcgttcaaatagtaccgctgccatattctgtgtgccatgtcttgctgcattcgcgagttgccattgatataaaaaaaattggaacttcaaatatcttatgaacatatttgcttcaa

SEQ ID NO: 58443 - DNA, 1343 bp, Zea Mays
actcatctttctcgctcccgttcgttgcagccgccaggcaccgccgcccgccgcgcccccacgcccgcctgctggtgcccccgccgcgcccctccccgcaccgccggcacgcccgcttcgccccagcccgcagacacccccgcccgcgacgagctgtgctgctggtggcggtggagcgcagtgaggatgaggcgcgcgtcgcgcctggtggccgggtcatggaggcgcgccagcagagccctgagctcgccgtaggcggcatcgccagagggctcgcaccgctgcagggactccttgacgatgctgccgtcgtcatccgcctccacgcccacgctgcccatctgattccgatctgattccagtcgctgaggtccgccggagctagctagagcctatagcttggcttcttgtttgcttcttccagcctgtacgcaaggttctgtttatatggatttttgtatataagattgcattgttctttcgtatgaggctgcatatgacgagacgatgtctagtcagcacggaccagactatgactggaggacctcacctattgatcctcaggttgtgtatgcaagtggtggaaaaggtcatggaaggtacacaatatttgctaacgtcaacgactcgatccagattcaacaacaacaaacactcatacaacaactagcacaggcccaagggatacatgtcccggtgtccccaccaccaccaccaccacctcccgtacattattcttggtcttcacatccacctacacctacatctccacctaccgaacatcagacccctccagctacctttccgacacatgaacgagaagacgggttagactttgtcaaaaccctcttcgctagtggaggtatcgaccatcactcatcactgtaccccaatggtgatcgacgatcgtgagcttccatgttatgtgttgtaatacttgagacttttattatgactatgtatgagatattgtctcttataatgactggatgagatgtgtcttattatgactatggatgagacttttgtgatgtaattgatgagactatggatttaaatatcgttatgtgattgtgtgtgagttgatttatgtgaaaatatgttgtgctatatagctgttgatatatttgttatgttgtggaatatggtgtaaaataaaaataaacaacatttgtaatgctggtcaaattaacttcctagaggccaactgggccgtaggaagttagtcagctaacttcctaggggctacagtcagccgtaggaagttagtcgtaggaagttagtcacctgacggtgctgacggcgtgaagctactaacttccgagaacctactaacttccgag

SEQ ID NO: 58444 - DNA, 2677 bp, Zea Mays
gccggagttgtctgctgtttgaaaaggaggagaagcggggaggacggaagggggtgccgtggcggatgacgctgagcctggcttaccagagtctcggcgtggtgtacggcgacctcagcacatcgccgctgtacgtctacaaggcggcgttcgcggaggacatccagcacacggagagcaacgaggagatcctcggcgtgctctccttcgtcttctggacgctcacgctcgtcccgctcctcaagtacgtctgtgtcgtcctccgcgccgacgaccacggcgagggcggcaccttcgcgctctactccctcctctgccgccacgcgcgcgccgcgctcctcccgccaggacgaaccgccgcctgggacgaggaccagttctcggacggagccggcggtggcaccaacaaggctacggcgcagaatggcaatgctgtgacgctgggagggggcgccgccgccagcgtcaggaggctgctggagcggcacaaagtgctgcagcgggttctgctcgtgctggcgctggtgggcacctgcatggtgatcggcgacggcgtgctcacgccggccatctccgtgttctctgcggtctccgggctggagctgtccatggcgaaagaacatcataaatatgtggaacttcctattgcctgtatcatactggtttgcctgtttgcactgcaacactacggtacacaccgggttggcttcatttttgctccagtggtgatcacatggctcctatgtataaccctgatcggtgtttacaatattattcactgggaacccactgtatatcgagcattatctccgtattacatgtacaagttcttgaggaagacacagagaggaggttggatgtccctgggaggaatactgttatgtgtaaccggttctgaagcaatgtttgctgatctggggcatttcaaccagttgtcaatacagattgcttttacatgcatggtgtatccagcattgatccttgcatacatgggacaagctgcttatctgtgtaagcatcatatcatggaaagtgactacaggatcggattctatgtgtctgtgccagagaaaattaggtggcccattatggcaattggtattcttgcagcagttgtgggaagccaagccgtcatcactggtacattctcaatgatcaagcagtgcgcttctctgggctgctttcctcgggtgaagataatccatacatctgccaaagtacacgggcaaatatacatccctgagatcaattggattatgatgatactgtgcttagctgtaaccattggttttaggaacacaaaacacttgggaaatgcatcaggattggctattataaccgtcatgctggtcacaacgtgcctgatgtccctggtgatagtcctgtgctggcataagagcatattccttgcgattggcttcatcctgttctttgggaccattgaggcactgtacttctcagccgcactcatcaagttcagggagggagcctgggtcccaatcgttcttgctctcatcttcatcctgataatgtgcgtctggcactatggcaccatcaagaagtacgagttcgacgtccagagcaaggtctccatcaactggctccttggtctcagcccgaaccttggcattgtccgcgtccgtggcattggcctcatccacaccgagctcgaaaccggcatcccagctatcttctcgcatttcgtcaccaacttgcctgcctttcaccaggtactcatatttatgtgcatcaagaacgtgccgataccacatgtccggcctgaagagcggttcctcgtcggaaggatcggccccaagcagtacagaatctaccggtgcatcgtcaggtacggctaccaagacttccacaaggacgacgtggagttcgagaaggagctggtgtgcagcgtggccgagttcatccggtcagggtcgtccaagctgaacggcacggctgaggaggtcgacgaggaggaggagcagcgcatggcggtcgtccgctccaacagcgtccgcatgctggaggaagaggccacggtgcagaacaccgtcggggtcggcccgtcgtcgcgggccagcagggagatacagtcgccgtcgccggccccggcgactggggttgggcccaagaacaagaagcgggtgcggttcgtgctgccggcagcgagcccgaagccggacgccggcgcgcaggaggagctgcaggagctgtcggacgcgcgggaggccggcatggcgttcatcctgggccgctcgcacgtgaaggcgaagagcgggtccggcttcctccgccggctcgtgatcaacttctgctacgacttcctgcggaggaacagccggggaccccgctacgccgtcaccgtcccgcacgcctccacgctggaggtcggtatggtgtactttatctgactggactgaactgaacagccccctgaaactaactctgggagtgagaaactcagaaacataggaacatgaaaagataagatgaggtgaaacaaaaaaaaaggttttcagctgtatatgctaggttttgtaactgctggtgagtttcgttgtaaaatgcagccctgttttcttgttaggcgttcagcttctctcgtaatccactagaaaatttattattatgggctagtttggtaatatattttttcgaggtatttctatttttcgatgga

SEQ ID NO: 58445 - DNA, 4433 bp, Zea Mays
ccatccgaccccatggcctcggcctcattccagcccgtcgcggcgtcggcggcctccgcgccgccgcgcccggccccgcgccaccccttcgcagccgctgccgccgcgcgccgctcctctctctcgttacgccccgccgcgcaccgtcccgttatcccgctccgctcctccgccgtcgcggctaacaccctccgcgccacgcaccgccgtgccgtctcggcgaggtcgaggagacgcgcgcaagggctcggcgcggcgcccgcgttggctgcgtcgacctggggcggcggtgacaagggaggttgcctctcttgcttccccaagagtaggcggggcaggtcggggctcgcgccttgcgcgctcccgcacgcgtcgggactatcgtttcgcagccggttgagcgggtcgaaggtggtcaggcctagccatatattgcacgccgctggtcctgatgaaccacatgttgcaagtccaacatggtccgatacttcccttgatacaactgacatggatcatgctattagtaaggaggagcttgaagatgtcctcaacactccgcttcccgagcatccgaagctaattcgtggtcaattgaagaatggcctccggtatcttatcttaccaaataaagttccagcaaacagattcgaggctcacatggaagttcatgttggatcaattgatgaggaggaggacgagcagggaattgcacatatgattgaacatgttgcgtttcttggcagtaaaaaacgtgaaaaaattttggggaccggtgcgaggtctaatgcatataccgacttccatcatacggtgttccatatccactctccaactaaaacaaaggaatatggtgaagacttacttccttttgtgctggatgcattgagtgagatagcttttcatccaaagttttcttcatctcgtgttgagaaggagagaagagcaattctttctgagctccagatgatgaacacaatagagtatcgggttgattgccagttgttgcaacatctgcactcagaaaacaaactgagcaacagatttcctattggacttgaagagcaaatacataaatgggatcctgataagatccgcagatttcacgagcgttggtactaccctgcaaatgccactttatatctggtgggggaaattgatgatattcctagagctgtgcgggaaatagaggcggtatttgaacacactctttcagaaaatgaaggaaatcctgtaccgagcgctaatccatttggtgctatggcaagcctttttgcaccaaagctcccaggtggttttacttcaaacctaactggtgaaaaatcacctgccacagataaaataaagcctgcaaaaagggaaagacaagcagttaggccacctgtagagcataagtggtcccttcctggagttgctcaggatgccaaacccccagcaatttttcaacacgagttgattcagagtttctctatcaacatgttctgcaagatacctgttagcaaagttcagagctacaaggacctgcgcagtgtactcatgaaaaggatatttttgtctgccctacattttcgaatcaatacaagatacaagagctcaaaccctccttttacttcagttgagctggaccacagtgactctggaagggaagggtgcacggtcactactctcacagtaaccgctgaaccccaaaattggagaagtgcaatcaaagtcgctgttcatgaggtgcgaagactgaaagaatttggtgttacaatgggagaaatgacccgttacatggatgcactgataaaagatagtgagcagctggctatgatgattgacagtgttccctcagttgacaacttggacttcatcatggagagtgatgcacttggccacactgtcatggatcagttgcagggacatgaaagtttgcttgcagttgctgaaactgtcacccttgaagaggtcaacactgttggcgcggaagtattggagttcatttcagattttggaaaactcaatgctccccttcctgctgctattgtggcatgtgtcccccaaaaggtgcatgttgatggcgcaggtgaaactgaattcgagatatatccagaagaaatcactgaggctatcaaggcaggtcttgaggaacctatttaccgagagcccgagcttgaggtgccaaaggaattgattactcaatcagagctcgatgacctgaaatctcaatgcaatccttcatttgttcctttaaccaaagaggagaatgcggtgaaagtgtttgacagtgaaactggtatagcacaacgccgtctttctaatggaatttccatcaactacaagataacacaaaatgaagctagggttggtgtcatgcggctcatagtagggggagggagagcaacggaagattctgaatcaaagggatctgtcattgttggtgttcgtaccctgagtgaaggtggctgcgttggtaacttttctagggaacaggttgaacttttctgcgtcaataaccttatcaactgttcactggaatcgaatgaggaattcatatttatggaatttagatttgctttaagagacaatggcatgcgagctgctttccaacttcttcatatggtccttgagcataatgtatggctagaagatgcatttaatagagcaactcagttgtatttgtcttactatcgctctatccccaaaagtttggagcgttctacagctcataagcttatgttagccatgctaaaccatgatgaaaggttcgtagagccgtcaccacattcactgcagaagttgactcttcagtcagttaaaaatgctgtcatgaaccagtttgtgggtggcaacatggaggtcagtattgttggtgatttcactgaagaagaagtagaatcttgtgttcttgattatcttgggaccgtgagggcttcgagttctctaaacacagaggagcgtattgagaagatttccttccgaccatttccatcagatgttcatttccagcaagtatacataaaggacacagatgagagagcctgtgcgtatattgcaggccctgctcctaaccgttgggggttcactactgaaggaaatgacctatttaatgtcattcggatatctgatgctgatgcagaagtatctgaaccagtgagcttggatctaacagggaagagacacgttgatgttcgcagccacccccttttctttggcatcactttgagtctgcttgctgaaattattaattctaggctatttacaacagttcgagattccatgggattaacatatgatgtttcttttgaattaaacctttttgacaaattgggtcttggttggtatgtaatcgcggtcacttcaactcccagcaaggtccataaagctgttgatgcctgcaaaggtgttctgagaggattacatagtagtcgaattgtggaaagggagcttgaccgggcaaagaggacgctgttgatgaaacatgaggctgagacaaagacaaacgcgtactggcttggtttgctagcccatctacaatcttcatctgtaccaagaaaggatgtatcatgcatcagggaattgacgacattatatgaaagtgccacaattgaggatctgtatcttgcatatgagcatctgaaagttgatgattcttctttgtttgcttgcattggaattgctggcgctgaatctggtgaagatacaaatgatgatgagcttgatgtggatcttcatggcatggctcccatgggaggccggggtctttcaacaatgaccagaccaaccacatgatcaccattgggatggccagcccttccaaggtgacatattaaatgctgtgttactgcatcatggacaagttgtgctgaaacctactcggaattggttgtggatctttatatggattttaaccttgctcctgaagacaggagccacatggccctaggagactattctcgtttcccagcaaaacggtttaaagataattgaaacattggatctgtatctggggagactattgtttgtttcctatgagccacaaccaaaaagcttggccgttgcatttccccccgagaagaagcgttggagttaatgactcgcaaggtcgtggaaaggagataatatttttcgaggtcattatgtagcttggcatgtacaggaaagcaggctgattcttgcatacagcagttgtaactaggtcgttgagggcattgaagataggatgacagtagaatcacatataagttgctggtctgcgaattcggaaataatgatgaaggcgtaggctagtaacattttggtgttattctttttttttttaatcaaaaaattgtagcctttgttaccggtaataaatagatccatagctttgatgaaaaaagaaaattcaaaaaatattttgtcaagaatgggatttgaacccatgccctttcggaccagtacctgaaactggc

SEQ ID NO: 58446 - DNA, 4241 bp, Zea Mays
ccatccgaccccatggcctcggcctcattccagcccgtcgcggcgtcggcggcctccgcgccgccgcgcccggccccgcgccaccccttcgcagccgctgccgccgcgcgccgctcctctctctcgttacgccccgccgcgcaccgtcccgttatcccgctccgctcctccgccgtcgcggctaacaccctccgcgccacgcaccgccgtgccgtctcggcgaggtcgaggagacgcgcgcaagggctcggcgcggcgcccgcgttggctgcgtcgacctggggcggcggtgacaagggaggttgcctctcttgcttccccaagagtaggcggggcaggtcggggctcgcgccttgcgcgctcccgcacgcgtcgggactatcgtttcgcagccggttgagcgggtcgaaggtcaggcctagccatatattgcacgccgctggtcctgatgaaccacatgttgcaagtccaacatggtccgatacttcccttgatacaactgacatggatcatgctattagtaaggaggagcttgaagatgtcctcaacactccgcttcccgagcatccgaagctaattcgtggtcaattgaagaatggcctccggtatcttatcttaccaaataaagttccagcaaacagattcgaggctcacatggaagttcatgttggatcaattgatgaggaggaggacgagcagggaattgcacatatgattgaacatgttgcgtttcttggcagtaaaaaacgtgaaaaaattttggggaccggtgcgaggtctaatgcatataccgacttccatcatacggtgttccatatccactctccaactaaaacaaaggaatatggtgaagacttacttccttttgtgctggatgcattgagtgagatagcttttcatccaaagttttcttcatctcgtgttgagaaggagagaagagcaattctttctgagctccagatgatgaacacaatagagtatcgggttgattgccagttgttgcaacatctgcactcagaaaacaaactgagcaacagatttcctattggacttgaagagcaaatacataaatgggatcctgataagatccgcagatttcacgagcgttggtactaccctgcaaatgccactttatatctggtgggggaaattgatgatattcctagagctgtgcgggaaatagaggcggtatttgaacacactctttcagaaaatgaaggaaatcctgtaccgagcgctaatccatttgataaaataaagcctgcaaaaagggaaagacaagcagttaggccacctgtagagcataagtggtcccttcctggagttgctcaggatgccaaacccccagcaatttttcaacacgagttgattcagagtttctctatcaacatgttctgcaagatacctgttagcaaagttcagagctacaaggacctgcgcagtgtactcatgaaaaggatatttttgtctgccctacattttcgaatcaatacaagatacaagagctcaaaccctccttttacttcagttgagctggaccacagtgactctggaagggaagggtgcacggtcactactctcacagtaaccgctgaaccccaaaattggagaagtgcaatcaaagtcgctgttcatgaggtgcgaagactgaaagaatttggtgttacaatgggagaaatgacccgttacatggatgcactgataaaagatagtgagcagctggctatgatgattgacagtgttccctcagttgacaacttggacttcatcatggagagtgatgcacttggccacactgtcatggatcagttgcagggacatgaaagtttgcttgcagttgctgaaactgtcacccttgaagaggtcaacactgttggcgcggaagtattggagttcatttcagattttggaaaactcaatgctccccttcctgctgctattgtggcatgtgtcccccaaaaggtgcatgttgatggcgcaggtgaaactgaattcgagatatatccagaagaaatcactgaggctatcaaggcaggtcttgaggaacctatttaccgagagcccgagcttgaggtgccaaaggaattgattactcaatcagagctcgatgacctgaaatctcaatgcaatccttcatttgttcctttaaccaaagaggagaatgcggtgaaagtgtttgacagtgaaactggtatagcacaacgccgtctttctaatggaatttccatcaactacaagataacacaaaatgaagctagggttggtgtcatgcggctcatagtagggggagggagagcaacggaagattctgaatcaaagggatctgtcattgttggtgttcgtaccctgagtgaaggtggctgcgttggtaacttttctagggaacaggttgaacttttctgcgtcaataaccttatcaactgttcactggaatcgaatgaggaattcatatttatggaatttagatttgctttaagagacaatggcatgcgagctgctttccaacttcttcatatggtccttgagcataatgtatggctagaagatgcatttaatagagcaactcagttgtatttgtcttactatcgctctatccccaaaagtttggagcgttctacagctcataagcttatgttagccatgctaaaccatgatgaaaggttcgtagagccgtcaccacattcactgcagaagttgactcttcagtcagttaaaaatgctgtcatgaaccagtttgtgggtggcaacatggaggtcagtattgttggtgatttcactgaagaagaagtagaatcttgtgttcttgattatcttgggaccgtgagggcttcgagttctctaaacacagaggagcgtattgagaagatttccttccgaccatttccatcagatgttcatttccagcaagtatacataaaggacacagatgagagagcctgtgcgtatattgcaggccctgctcctaaccgttgggggttcactactgaaggaaatgacctatttaatgtcattcggatatctgatgctgatgcagaagtatctgaaccagtgagcttggatctaacagggaagagacacgttgatgttcgcagccacccccttttctttggcatcactttgagtctgcttgctgaaattattaattctaggctatttacaacagttcgagattccatgggattaacatatgatgtttcttttgaattaaacctttttgacaaattgggtcttggttggtatgtaatcgcggtcacttcaactcccagcaaggtccataaagctgttgatgcctgcaaaggtgttctgagaggattacatagtagtcgaattgtggaaagggagcttgaccgggcaaagaggacgctgttgatgaaacatgaggctgagacaaagacaaacgcgtactggcttggtttgctagcccatctacaatcttcatctgtaccaagaaaggatgtatcatgcatcagggaattgacgacattatatgaaagtgccacaattgaggatctgtatcttgcatatgagcatctgaaagttgatgattcttctttgtttgcttgcattggaattgctggcgctgaatctggtgaagatacaaatgatgatgagcttgatgtggatcttcatggcatggctcccatgggaggccggggtctttcaacaatgaccagaccaaccacatgatcaccattgggatggccagcccttccaaggagccacatggccctaggagactattctcgtttcccagcaaaacggtttaaagataattgaaacattggatctgtatctggggagactattgtttgtttcctatgagccacaaccaaaaagcttggccgttgcatttccccccgagaagaagcgttggagttaatgactcgcaaggtcgtggaaaggagataatatttttcgaggtcattatgtagcttggcatgtacaggaaagcaggctgattcttgcatacagcagttgtaactaggtcgttgagggcattgaagataggatgacagtagaatcacatataagttgctggtctgcgaattcggaaataatgatgaaggcgtaggctagtaacattttggtgttattctttttttttttaatcaaaaaattgtagcctttgttaccggtaataaatagatccatagctttgatgaaaaaagaaaattcaaaaaatattttgtcaagaatgggatttgaacccatgccctttcggaccagtacctgaaactggc

SEQ ID NO: 58447 - DNA, 4296 bp, Zea Mays
ccatccgaccccatggcctcggcctcattccagcccgtcgcggcgtcggcggcctccgcgccgccgcgcccggccccgcgccaccccttcgcagccgctgccgccgcgcgccgctcctctctctcgttacgccccgccgcgcaccgtcccgttatcccgctccgctcctccgccgtcgcggctaacaccctccgcgccacgcaccgccgtgccgtctcggcgaggtcgaggagacgcgcgcaagggctcggcgcggcgcccgcgttggctgcgtcgacctggggcggcggtgacaagggaggttgcctctcttgcttccccaagagtaggcggggcaggtcggggctcgcgccttgcgcgctcccgcacgcgtcgggactatcgtttcgcagccggttgagcgggtcgaaggtcaggcctagccatatattgcacgccgctggtcctgatgaaccacatgttgcaagtccaacatggtccgatacttcccttgatacaactgacatggatcatgctattagtaaggaggagcttgaagatgtcctcaacactccgcttcccgagcatccgaagctaattcgtggtcaattgaagaatggcctccggtatcttatcttaccaaataaagttccagcaaacagattcgaggctcacatggaagttcatgttggatcaattgatgaggaggaggacgagcagggaattgcacatatgattgaacatgttgcgtttcttggcagtaaaaaacgtgaaaaaattttggggaccggtgcgaggtctaatgcatataccgacttccatcatacggtgttccatatccactctccaactaaaacaaaggaatatggtgaagacttacttccttttgtgctggatgcattgagtgagatagcttttcatccaaagttttcttcatctcgtgttgagaaggagagaagagcaattctttctgagctccagatgatgaacacaatagagtatcgggttgattgccagttgttgcaacatctgcactcagaaaacaaactgagcaacagatttcctattggacttgaagagcaaatacataaatgggatcctgataagatccgcagatttcacgagcgttggtactaccctgcaaatgccactttatatctggtgggggaaattgatgatattcctagagctgtgcgggaaatagaggcggtatttgaacacactctttcagaaaatgaaggaaatcctgtaccgagcgctaatccatttggtgctatggcaagcctttttgcaccaaagctcccaggtggttttacttcaaacctaactggtgaaaaatcacctgccacagataaaataaagcctgcaaaaagggaaagacaagcagttaggccacctgtagagcataagtggtcccttcctggagttgctcaggatgccaaacccccagcaatttttcaacacgagttgattcagagtttctctatcaacatgttctgcaagatacctgttagcaaagttcagagctacaaggacctgcgcagtgtactcatgaaaaggatatttttgtctgccctacattttcgaatcaatacaagatacaagagctcaaaccctccttttacttcagttgagctggaccacagtgactctggaagggaagggtgcacggtcactactctcacagtaaccgctgaaccccaaaattggagaagtgcaatcaaagtcgctgttcatgaggtgcgaagactgaaagaatttggtgttacaatgggagaaatgacccgttacatggatgcactgataaaagatagtgagcagctggctatgatgattgacagtgttccctcagttgacaacttggacttcatcatggagagtgatgcacttggccacactgtcatggatcagttgcagggacatgaaagtttgcttgcagttgctgaaactgtcacccttgaagaggtcaacactgttggcgcggaagtattggagttcatttcagattttggaaaactcaatgctccccttcctgctgctattgtggcatgtgtcccccaaaaggtgcatgttgatggcgcaggtgaaactgaattcgagatatatccagaagaaatcactgaggctatcaaggcaggtcttgaggaacctatttaccgagagcccgagcttgaggtgccaaaggaattgattactcaatcagagctcgatgacctgaaatctcaatgcaatccttcatttgttcctttaaccaaagaggagaatgcggtgaaagtgtttgacagtgaaactggtatagcacaacgccgtctttctaatggaatttccatcaactacaagataacacaaaatgaagctagggttggtgtcatgcggctcatagtagggggagggagagcaacggaagattctgaatcaaagggatctgtcattgttggtgttcgtaccctgagtgaaggtggctgcgttggtaacttttctagggaacaggttgaacttttctgcgtcaataaccttatcaactgttcactggaatcgaatgaggaattcatatttatggaatttagatttgctttaagagacaatggcatgcgagctgctttccaacttcttcatatggtccttgaggttcgtagagccgtcaccacattcactgcagaagttgactcttcagtcagttaaaaatgctgtcatgaaccagtttgtgggtggcaacatggaggtcagtattgttggtgatttcactgaagaagaagtagaatcttgtgttcttgattatcttgggaccgtgagggcttcgagttctctaaacacagaggagcgtattgagaagatttccttccgaccatttccatcagatgttcatttccagcaagtatacataaaggacacagatgagagagcctgtgcgtatattgcaggccctgctcctaaccgttgggggttcactactgaaggaaatgacctatttaatgtcattcggatatctgatgctgatgcagaagtatctgaaccagtgagcttggatctaacagggaagagacacgttgatgttcgcagccacccccttttctttggcatcactttgagtctgcttgctgaaattattaattctaggctatttacaacagttcgagattccatgggattaacatatgatgtttcttttgaattaaacctttttgacaaattgggtcttggttggtatgtaatcgcggtcacttcaactcccagcaaggtccataaagctgttgatgcctgcaaaggtgttctgagaggattacatagtagtcgaattgtggaaagggagcttgaccgggcaaagaggacgctgttgatgaaacatgaggctgagacaaagacaaacgcgtactggcttggtttgctagcccatctacaatcttcatctgtaccaagaaaggatgtatcatgcatcagggaattgacgacattatatgaaagtgccacaattgaggatctgtatcttgcatatgagcatctgaaagttgatgattcttctttgtttgcttgcattggaattgctggcgctgaatctggtgaagatacaaatgatgatgagcttgatgtggatcttcatggcatggctcccatgggaggccggggtctttcaacaatgaccagaccaaccacatgatcaccattgggatggccagcccttccaaggtgacatattaaatgctgtgttactgcatcatggacaagttgtgctgaaacctactcggaattggttgtggatctttatatggattttaaccttgctcctgaagacaggagccacatggccctaggagactattctcgtttcccagcaaaacggtttaaagataattgaaacattggatctgtatctggggagactattgtttgtttcctatgagccacaaccaaaaagcttggccgttgcatttccccccgagaagaagcgttggagttaatgactcgcaaggtcgtggaaaggagataatatttttcgaggtcattatgtagcttggcatgtacaggaaagcaggctgattcttgcatacagcagttgtaactaggtcgttgagggcattgaagataggatgacagtagaatcacatataagttgctggtctgcgaattcggaaataatgatgaaggcgtaggctagtaacattttggtgttattctttttttttttaatcaaaaaattgtagcctttgttaccggtaataaatagatccatagctttgatgaaaaaagaaaattcaaaaaatattttgtcaagaatgggatttgaacccatgccctttcggaccagtacctgaaactggc

SEQ ID NO: 58448 - DNA, 579 bp, Zea Mays
cttctcggcactcggcagactggtaaatggaaacacacccagacaccctacagtttcagttcgattaacaaacgcaatacgccaatgaggcaactcatggcgggtcccccaggcttggccatggcccctctacaacttccctctctctctctctctctcctgagaggcggatcggcgacagaggggagacgctcagtctacacacatcggcaaagggcactcgagtgggtggagtgtggcgaggagggggacgacggcgccattgcgacggagcgaggggacaggtcacaggttctccatattgcaactactgctcaggagaagatgaagtcgtggtggaggatttccaggagttccaagagtacgatgagttctaggcgtggattagcggtaaacccccagtcggctgcctgtgaaggccgtgtttagctacgtttcgtttttgcactttgatatatgttaatgactatgtggatgtctcggacatcatgatgtaataaactattaccctcttttatgttattatttgagcactgtgtgatgatgttcggttatgtaactgctgtgtacgtgaattgc

SEQ ID NO: 58449 - DNA, 549 bp, Zea Mays
agacaccctacagtttcagttcgattaacaaacgcaatacgccaatgaggcaactcatggcgggtcccccaggcttggccatggcccctctacaacttccctctctctctctctctctcctgagaggcggatcggcgacagaggggagacgctcagtctacacacatcggcaaagggcactcgagtgggtggagtgtggcgaggagggggacgacggcgccattgcgacggagcgaggggacaggtcacagtccagggacctgaccctctgcactggtggacaagcccatgaaatcccaggaatgggtggtgcgcagtcgcctctttgtgtttgggaacaccgagacgacgccaggcatctctgaagaaattgaagacgcgcatcagaattattaggcgcctttttggcatcacagctagctagactcatttaggggccgtctgtttgggaaatgaaacccgtataatctactcagactatgatgtaatctaacttgttttggaccaagattaaattctaaaagagtagcctgtgttgtgaaactaatt

SEQ ID NO: 58450 - DNA, 242 bp, Zea Mays
tgaggcaactcatggcgggtcccccaggcttggccatggcccctctacaacttccctctctctctctctctctcctgagaggcggatcggcgacagaggggagacgctcagtctacacacatcggcaaagggcactcgagtgggtggagtgtggcgaggagggggacgacggcgccattgcgacggagcgaggggacaggtcacaggagaccatgacggatacacgctcttcacgagagctg

SEQ ID NO: 58451 - DNA, 496 bp, Zea Mays
ggcaactcatggcgggtcccccaggcttggccatggcccctctacaacttccctctctctctctctctctcctgagaggcggatcggcgacagaggggagacgctcagtctacacacatcggcaaagggcactcgagtgggtggagtgtggcgaggagggggacgacggcgccattgcgacggagcgaggggacaggtcacagggacctgaccctctgcactggtggacaagcccatgaaatcccaggaatgggtggtgcgcagtcgcctctttgtgtttgggaacaccgagacgacgccaggcatctctgaagaaattgaagacgcgcatcagaattattaggcgcctttttggcatcacagctagctagactcatttaggggccgtctgtttgggaaatgaaacccgtataatctactcagactatgatgtaatctaacttgttttggaccaagattaaattctaaaagagtagcctgtgttgtgaaactaatt

SEQ ID NO: 58452 - DNA, 210 bp, Zea Mays
ccccaggcttggccatggcccctctacaacttccctctctctctctctctctcctgagaggcggatcggcgacagaggggagacgctcagtctacacacatcggcaaagggcactcgagtgggtggagtgtggcgaggagggggacgacggcgccattgcgacggagcgaggggacaggtcacagattgatcgcggttagcttctgatat

SEQ ID NO: 58453 - DNA, 367 bp, Zea Mays
atcgtcacgcgagcatcacttccatttccatgccaagacaaagagccaaaaacgtaacctcgaggaggcacatccacgtgttctccatattgcaactactgctcaggagaagatgaagtcgtggtggaggatttccaggagttccaagagtacgatgagttctaggcgtggattagcggtaaacccccagtcggctgcctgtgaaggccgtgtttagctacgtttcgtttttgcactttgatatatgttaatgactatgtggatgtctcggacatcatgatgtaataaactattaccctcttttatgttattatttgagcactgtgtgatgatgttcggttatgtaactgctgtgtacgtgaattgc

SEQ ID NO: 58454 - DNA, 1836 bp, Zea Mays
gtcctctccctccctccctcctgcctggccgtccaggcttggcgcgttcgttgcttggcagatggcaaaagagtttaccaactcccttctccctccccttccccgccccgctcccgcgtaatctaaccgctgctccgattagcgccatcccaccgctataattacgctcccgccctgcgcgcgcgggcctatcagcgctagcttagctatccggccgcatccgctgctcgcctcctcacttgcgcgtgtgtcgtgtagcatttagtcagctgctcctgcttgctagggttagggtttgcgggcgcgcgcgcgcgtgcccgcgcgtgagctggccgcgggagggatgacgccgcaccggtcgccggcggggaccggaggaagtggcggcggagggccgccggcgctacactacctgagcggcccttacggagacaccaccttcaccaaggttttcgtgggcggcctcgcctgggagacgcggagtgaggggcttcgcgcccactttgaggtctacggggacatcctcgaggccgttgtcatcaccgaccgcgccacaggccgctccaagggctacggattcgtaaccttccaggacccagagtcggcgaggatggcctgcatggacccatatccagtgatcgatggccggcgtgctaattgcaatcttgccatcttagggcgtcctggtccagctgtgcctttcgtagcacctataaggccggtcatcccttacaatggaggtgtggcggttccagggggcatgtatgtgcaaagcccaacatatcagcaatccccttacaactacccacaggcctttgtatattcttcttatgggccatcagcatatggacctgaatacctatatcagcagaatgcatatggtccatatgttggacaacagtatattccagtttacggtggcccaaggacagtaggcccagcagtctacccatatgggcagtctggccaacctgtaccaagtgatcatgcttattctcttggttatgccccaagtcgtgttctcccactatcgaatcagaatgttaacgctgcaaatgttgtgcgcataccaccacttcaacaatttcctccaggagctccacgacctcagcaacagcttttggcccctgctcgtgcaccgccattcccacagaacaacgtttctgaacaagcgacaggttgacaaggatgccagaaagtgacgaattttaggtatcctatagtctgcagcaggactaagaaaagttgtaccgctaaattgggcggcatgcttttttcttgcaaattgttttcgtttgctctctaaaggttgtccctatccatggttacctgaacttcttataacgtgagtgtctgatctgctccgcgggaaggggcaggcaagctcgagcgactgaagatgaagcccctcttgctcagcttctgtcagtgtctgtacattccccatctgccagacatcctgatagctgatggtctgtgcaggaccaaagtggatgccggaaatggagtccggcctccaacctgtgtataatataggtcatgtagtggtccaaatcgtagaacaggtccattctttgaaaacatctggttgtgtatattaattctcttagcaccttcagtgcatgttttcatgtctcattagagggaataggtatttcaatgtcattgcattgtcagtgagtcatgtacattattatactgaaaatgtaaactatatatgtcatctgtgtcaactgacaactgtaatcaaataatgacatccctatcttgggaaagaacatgatttattgcaagttgcaacggatggggaaaactagggatggatacggatactta

SEQ ID NO: 58455 - DNA, 1713 bp, Zea Mays
gtcctctccctccctccctcctgcctggccgtccaggcttggcgcgttcgttgcttggcagatggcaaaagagtttaccaactcccttctccctccccttccccgccccgctcccgcgtaatctaaccgctgctccgattagcgccatcccaccgctataattacgctcccgccctgcgcgcgcgggcctatcagcgctagcttagctatccggccgcatccgctgctcgcctcctcacttgcgcgtgtgtcgtgtagcatttagtcagctgctcctgcttgctagggttagggtttgcgggcgcgcgcgcgcgtgcccgcgcgtgagctggccgcgggagggatgacgccgcaccggtcgccggcggggaccggaggaagtggcggcggagggccgccggcgctacactacctgagcggcccttacggagacaccaccttcaccaaggttttcgtgggcggcctcgcctgggagacgcggagtgaggggcttcgcgcccactttgaggtctacggggacatcctcgaggccgttgtcatcaccgaccgcgccacaggccgctccaagggctacggattcgtaaccttccaggacccagagtcggcgaggatggcctgcatggacccatatccagtgatcgatggccggcgtgctaattgcaatcttgccatcttagggcgtcctggtccagctgtgcctttcggccatcagcatatggacctgaatacctatatcagcagaatgcatatggtccatatgttggacaacagtatattccagtttacggtggcccaaggacagtaggcccagcagtctacccatatgggcagtctggccaacctgtaccaagtgatcatgcttattctcttggttatgccccaagtcgtgttctcccactatcgaatcagaatgttaacgctgcaaatgttgtgcgcataccaccacttcaacaatttcctccaggagctccacgacctcagcaacagcttttggcccctgctcgtgcaccgccattcccacagaacaacgtttctgaacaagcgacaggttgacaaggatgccagaaagtgacgaattttaggtatcctatagtctgcagcaggactaagaaaagttgtaccgctaaattgggcggcatgcttttttcttgcaaattgttttcgtttgctctctaaagtctgcaggttgtccctatccatggttacctgaacttcttataacgtgagtgtctgatctgctccgcgggaaggggcaggcaagctcgagcgactgaagatgaagcccctcttgctcagcttctgtcagtgtctgtacattccccatctgccagacatcctgatagctgatggtctgtgcaggaccaaagtggatgccggaaatggagtccggcctccaacctgtgtataatataggtcatgtagtggtccaaatcgtagaacaggtccattctttgaaaacatctggttgtgtatattaattctcttagcaccttcagtgcatgttttcatgtctcattagagggaataggtatttcaatgtcattgcattgtcagtgagtcatgtacattattatactgaaaatgtaaactatatatgtcatctgtgtcaactgacaactgtaatcaaataatgacatccctatcttgggaaagaacatgatttattgcaagttgcaacggatggggaaaactagggatggatacggatactta

SEQ ID NO: 58456 - DNA, 88 bp, Zea Mays
ggcaggtgcagccgtgcaggcaacccctccaaaccactttccactaggccggctgctgcgcctgtttccagtcgtccccatcaagcaa

SEQ ID NO: 58457 - DNA, 815 bp, Zea Mays
cgcacatcaatgggggagcacaacaacgatggggtgagcagcacatcaaccatgaggacggcacgccctcggacgccgacgatgctgccgccgacgcggcccaagataaagatcatccacatcatcgcgccggagatcatcaagaccgacgtcgcccacttccgggacctcgtgcagcggctcaccggcaaggctgccttctgcgccgccaccgacgtcgtcacatcgacgccgccggtaggtgaggacgatgagacggagacgtccaagaagaggccgaggccggcactggctccggtggccaacgacgagaagagcggttttacggtgcaagtgcaagaagagacggcgaccaagaagaggaagatcaagtgcgaggtgaaggtggaggaaggaggcttcggtggttatgagctcggccgtagcaacctgtggatggacctcagcacgggaggagggttcttgagcttcctggaggaggacgaaggcgtcttccaaggcctggctgctgacattgacttcttgcagccttttggctcgtccaggatggactttgttggtgaaatgtacgcgtcttgacaacaattcctaggtctagagcttgagggatttttttttttggtgcgccgtgagttggtcgagagacttggacagattggtcatctgggtgcttatatttcagacagtgaagcgaatgtaagcacccagatgaccaatctaagggggaagaaaccaggagtgcaatgccaatagtgaattatatgtgtgtaagggccactggtgaaatcatatatagtaagattgatcaatctggg

SEQ ID NO: 58458 - DNA, 2494 bp, Zea Mays
attttatctcttataatttaactaatggctaaacatttgattttattattaaacttatccctatgaacgccgcctcaccacctgcacctttgtattactgtatatgcatcgcgtcttctttgatcttgaaaccaggtggtgcgcaaggaagcttggaagttggttccctctgcaccacttttcgagtctgaaacacactttccagctctcctccgacaaagactcagaccgccggcggcatgctcctcctcgacggcgaccttgtcctctcctcctccggaagcaccggcgctgcctctcgcacgagcgacagcgggagggagctcgtggcggcgctcttggagagccccgggatccgccacgcggtcgaccggctgaaggtcgcgccggagaggcggatctcggcagggcaggagggggcgccgaagcacgtctacgtgttccagcgggagtacgccacggtggatccggcgcgcgtcgaggtgcgtggagttgccttgtcgcggcttggtctaatagggttggggaatttcgttccccacctgcctttgggtgataaaaacgggatcttgttacgtcgttgatggagttccttgtgtatctgatcgattatatgtgtagctcagtgatgatttgtgctgtgaaggtgaacttcgttttcctgtctaaatcatcactgttgctgtcgagacaaagggctcaggttctgaagtagtggatcggcaagtcttcgtagtttcacttcactcgatttgggaattggttcgggacgaagcagaaacctttttgggtgcgaaggataaagcagggattcttgtgctgggagctttggggacgttgtcaggggttactgctgctacctgtaaaactagggtttggcagtcatcttagcagctttttttttaccttttattagctggtttcttaggtttttttacctgtactttaccaactttgtggattgtgatgatttactagtattggaacctgtactcctaaagcctttgtgtccaccaaatttcatgattcttatattttttatgaatcaattacttgcattttttcatggttttcttaaaaaccagtatctgtcatagctccgctatagcggtgctatagctttatagcttctgggaaaaatatgccactacttactatagcccgcaatttgaaaccttgcatatgtcatttaaaattgaataacacctgagttaatatgtcttttgcgttatagttagttggcacagatgaggctactacatgcattggtgttgtaattcgcaacaacaagactggaatgacctctgttagccatatggattttccagaaattgtggagggagggatcaagcagatgttagaattacttggtgatgacaatgcaccatttgatgttcaccttattggtggctttgctgatgcttccacaaaggttgttcgttcctctggaaagaaacacatcaaacaggaagggtattcctatccactatgttgcaaaatagttgaagtgctgcataagtcccagctacaattccaccttcgatcattttgtgtccttgagaataacacgaagagtgactcatttggaaatgcgctacctataattggtggatttgtggttgaaacctcatctggagttgtgataccagcaacctttgatatggattcaaggtgcccagatgaagttgtcaggagaattcgtgtgagcgttagctcttatgatccaacttggcaaggaaggttgctggagacttacgatactcaggacgatgttttccaaattgcacctgcctgctggatgccagattgggccgatatagcgtcctcactcaaccagctctcggactccgaagtcctgctgcggtgctccacctctccagccgcagaaccacctcacttcgtggaaaacgaaagaaggatctggaaatacctgatcgataacccggactgggaagagacgttcccaaaacacaagccccgggtgttccatagggcaagcgacggaagctggtcaaggtactcgtagtgcaagccaagggcttccatcgtctgctgttatcgtcggtgctcccacacatggaacgaaccagaagggaaacccccctctccgttgatttgaacagtgacatattaagtttgagtgcaaagttttctgcgcactgcgattagcacatccgtggacgcttggagatgggagtaaattttataaagtctcttggagatggcagctgctctaaggaccagctaaaaactaaaaaaacgcatgctcttgggccgaaaatgatgagcgattcctcacatctccgttctttttctttatcgaaattttcatttctacgcagttttgtatttttctgaagttataaggttccttgttttgtgcacaaacttataatgcaacttccccaaaactcatataacaccacttcctgcataaacttcaccgaggaacttgtgggcgtaagtttatttattcgtgcataacttttctcag

SEQ ID NO: 58459 - DNA, 1802 bp, Zea Mays
tttatctcttataatttaactaatggctaaacatttgattttattattaaacttatccctatgaacgccgcctcaccacctgcacctttgtattactgtatatgcatcgcgtcttctttgatcttgaaaccaggtggtgcgcaaggaagcttggaagttggttccctctgcaccacttttcgagtctgaaacacactttccagctctcctccgacaaagactcagaccgccggcggcatgctcctcctcgacggcgaccttgtcctctcctcctccggaagcaccggcgctgcctctcgcacgagcgacagcgggagggagctcgtggcggcgctcttggagagccccgggatccgccacgcggtcgaccggctgaaggtcgcgccggagaggcggatctcggcagggcaggagggggcgccgaagcacgtctacgtgttccagcgggagtacgccacggtggatccggcgcgcgtcgagttagttggcacagatgaggctactacatgcattggtgttgtaattcgcaacaacaagactggaatgacctctgttagccatatggattttccagaaattgtggagggagggatcaagcagatgttagaattacttggtgatgacaatgcaccatttgatgttcaccttattggtggctttgctgatgcttccacaaaggttgttcgttcctctggaaagaaacacatcaaacaggaagggtattcctatccactatgttgcaaaatagttgaagtgctgcataagtcccagctacaattccaccttcgatcattttgtgtccttgagaataacacgaagagtgactcatttggaaatgcgctacctataattggtggatttgtggttgaaacctcatctggagttgtgataccagcaacctttgatatggattcaaggtgcccagatgaagttgtcaggagaattcgtgtgagcgttagctcttatgatccaacttggcaaggaaggttgctggagacttacgatactcaggacgatgttttccaaattgcacctgcctgctgtacatgccttgtttgcttacagttttcccttaccataaaatccatcgcctgttgatacataggatgccagattgggccgatatagcgtcctcactcaaccagctctcggactccgaagtcctgctgcggtgctccacctctccagccgcagaaccacctcacttcgtggaaaacgaaagaaggatctggaaatacctgatcgataacccggactgggaagagacgttcccaaaacacaagccccgggtgttccatagggcaagcgacggaagctggtcaaggtactcgtagtgcaagccaagggcttccatcgtctgctgttatcgtcggtgctcccacacatggaacgaaccagaagggaaacccccctctccgttgatttgaacagtgacatattaagtttgagtgcaaagttttctgcgcactgcgattagcacatccgtggacgcttggagatgggagtaaattttataaagtctcttggagatggcagctgctctaaggaccagctaaaaactaaaaaaacgcatgctcttgggccgaaaatgatgagcgattcctcacatctccgttctttttctttatcgaaattttcatttctacgcagttttgtatttttctgaagttataaggttccttgttttgtgcacaaacttataatgcaacttccccaaaactcatataacaccacttcctgcataaacttcaccgaggaacttgtgggcgtaagtttatttattcgtgcataacttttctcag

SEQ ID NO: 58460 - DNA, 1697 bp, Zea Mays
ctatgaacgccgcctcaccacctgcacctttgtattactgtatatgcatcgcgtcttctttgatcttgaaaccaggtggtgcgcaaggaagcttggaagttggttccctctgcaccacttttcgagtctgaaacacactttccagctctcctccgacaaagactcagaccgccggcggcatgctcctcctcgacggcgaccttgtcctctcctcctccggaagcaccggcgctgcctctcgcacgagcgacagcgggagggagctcgtggcggcgctcttggagagccccgggatccgccacgcggtcgaccggctgaaggtcgcgccggagaggcggatctcggcagggcaggagggggcgccgaagcacgtctacgtgttccagcgggagtacgccacggtggatccggcgcgcgtcgagttagttggcacagatgaggctactacatgcattggtgttgtaattcgcaacaacaagactggaatgtaagtgaaaaagaagacctctgttagccatatggattttccagaaattgtggagggagggatcaagcagatgttagaattacttggtgatgacaatgcaccatttgatgttcaccttattggtggctttgctgatgcttccacaaaggttgttcgttcctctggaaagaaacacatcaaacaggaagggtattcctatccactatgttgcaaaatagttgaagtgctgcataagtcccagctacaattccaccttcgatcattttgtgtccttgagaataacacgaagagtgactcatttggaaatgcgctacctataattggtggatttgtggttgaaacctcatctggagttgtgataccagcaacctttgatatggattcaaggtgcccagatgaagttgtcaggagaattcgtgtgagcgttagctcttatgatccaacttggcaaggaaggttgctggagacttacgatactcaggacgatgttttccaaattgcacctgcctgctggatgccagattgggccgatatagcgtcctcactcaaccagctctcggactccgaagtcctgctgcggtgctccacctctccagccgcagaaccacctcacttcgtggaaaacgaaagaaggatctggaaatacctgatcgataacccggactgggaagagacgttcccaaaacacaagccccgggtgttccatagggcaagcgacggaagctggtcaaggtactcgtagtgcaagccaagggcttccatcgtctgctgttatcgtcggtgctcccacacatggaacgaaccagaagggaaacccccctctccgttgatttgaacagtgacatattaagtttgagtgcaaagttttctgcgcactgcgattagcacatccgtggacgcttggagatgggagtaaattttataaagtctcttggagatggcagctgctctaaggaccagctaaaaactaaaaaaacgcatgctcttgggccgaaaatgatgagcgattcctcacatctccgttctttttctttatcgaaattttcatttctacgcagttttgtatttttctgaagttataaggttccttgttttgtgcacaaacttataatgcaacttccccaaaactcatataacaccacttcctgcataaacttcaccgaggaacttgtgggcgtaagtttatttattcgtgcataacttttctcag

SEQ ID NO: 58461 - DNA, 2464 bp, Zea Mays
aacgccgcctcaccacctgcacctttgtattactgtatatgcatcgcgtcttctttgatcttgaaaccaggtggtgcgcaaggaagcttggaagttggttccctctgcaccacttttcgagtctgaaacacactttccagctctcctccgacaaagactcagaccgccggcggcatgctcctcctcgacggcgaccttgtcctctcctcctccggaagcaccggcgctgcctctcgcacgagcgacagcgggagggagctcgtggcggcgctcttggagagccccgggatccgccacgcggtcgaccggctgaaggtcgcgccggagaggcggatctcggcagggcaggagggggcgccgaagcacgtctacgtgttccagcgggagtacgccacggtggatccggcgcgcgtcgaggtgcgtggagttgccttgtcgcggcttggtctaatagggttggggaatttcgttccccacctgcctttgggtgataaaaacgggatcttgttacgtcgttgatggagttccttgtgtatctgatcgattatatgtgtagctcagtgatgatttgtgctgtgaaggtgaacttcgttttcctgtctaaatcatcactgttgctgtcgagacaaagggctcaggttctgaagtagtggatcggcaagtcttcgtagtttcacttcactcgatttgggaattggttcgggacgaagcagaaacctttttgggtgcgaaggataaagcagggattcttgtgctgggagctttggggacgttgtcaggggttactgctgctacctgtaaaactagggtttggcagtcatcttagcagctttttttttaccttttattagctggtttcttaggtttttttacctgtactttaccaactttgtggattgtgatgatttactagtattggaacctgtactcctaaagcctttgtgtccaccaaatttcatgattcttatattttttatgaatcaattacttgcattttttcatggttttcttaaaaaccagtatctgtcatagctccgctatagcggtgctatagctttatagcttctgggaaaaatatgccactacttactatagcccgcaatttgaaaccttgcatatgtcatttaaaattgaataacacctgagttaatatgtcttttgcgttatagttagttggcacagatgaggctactacatgcattggtgttgtaattcgcaacaacaagactggaatgtaagtgaaaaagaagtgagcatttatctgatcctgacctctgttagccatatggattttccagaaattgtggagggagggatcaagcagatgttagaattacttggtgatgacaatgcaccatttgatgttcaccttattggtggctttgctgatgcttccacaaaggttgttcgttcctctggaaagaaacacatcaaacaggaagggtattcctatccactatgttgcaaaatagttgaagtgctgcataagtcccagctacaattccaccttcgatcattttgtgtccttgagaataacacgaagagtgactcatttggaaatgcgctacctataattggtggatttgtggttgaaacctcatctggagttgtgataccagcaacctttgatatggattcaaggtgcccagatgaagttgtcaggagaattcgtgtgagcgttagctcttatgatccaacttggcaaggaaggttgctggagacttacgatactcaggacgatgttttccaaattgcacctgcctgctggatgccagattgggccgatatagcgtcctcactcaaccagctctcggactccgaagtcctgctgcggtgctccacctctccagccgcagaaccacctcacttcgtggaaaacgaaagaaggatctggaaatacctgatcgataacccggactgggaagagacgttcccaaaacacaagccccgggtgttccatagggcaagcgacggaagctggtcaaggtactcgtagtgcaagccaagggcttccatcgtctgctgttatcgtcggtgctcccacacatggaacgaaccagaagggaaacccccctctccgttgatttgaacagtgacatattaagtttgagtgcaaagttttctgcgcactgcgattagcacatccgtggacgcttggagatgggagtaaattttataaagtctcttggagatggcagctgctctaaggaccagctaaaaactaaaaaaacgcatgctcttgggccgaaaatgatgagcgattcctcacatctccgttctttttctttatcgaaattttcatttctacgcagttttgtatttttctgaagttataaggttccttgttttgtgcacaaacttataatgcaacttccccaaaactcatataacaccacttcctgcataaacttcaccgaggaacttgtgggcgtaagtttatttattcgtgcataacttttctcag

SEQ ID NO: 58462 - DNA, 2403 bp, Zea Mays
gccgcctcaccacctgcacctttgtattactgtatatgcatcgcgtcttctttgatcttgaaaccaggtggtgcgcaaggaagcttggaagttggttccctctgcaccacttttcgagtctgaaacacactttccagctctcctccgacaaagactcagaccgccggcggcatgctcctcctcgacggcgaccttgtcctctcctcctccggaagcaccggcgctgcctctcgcacgagcgacagcgggagggagctcgtggcggcgctcttggagagccccgggatccgccacgcggtcgaccggctgaaggtcgcgccggagaggcggatctcggcagggcaggagggggcgccgaagcacgtctacgtgttccagcgggagtacgccacggtggatccggcgcgcgtcgaggtgcgtggagttgccttgtcgcggcttggtctaatagggttggggaatttcgttccccacctgcctttgggtgataaaaacgggatcttgttacgtcgttgatggagttccttgtgtatctgatcgattatatgtgtagctcagtgatgatttgtgctgtgaaggtgaacttcgttttcctgtctaaatcatcactgttgctgtcgagacaaagggctcaggttctgaagtagtggatcggcaagtcttcgtagtttcacttcactcgatttgggaattggttcgggacgaagcagaaacctttttgggtgcgaaggataaagcagggattcttgtgctgggagctttggggacgttgtcaggggttactgctgctacctgtaaaactagggtttggcagtcatcttagcagctttttttttaccttttattagctggtttcttaggtttttttacctgtactttaccaactttgtggattgtgatgatttactagtattggaacctgtactcctaaagcctttgtgtccaccaaatttcatgattcttatattttttatgaatcaattacttgcattttttcatggttttcttaaaaaccagtatctgtcatagctccgctatagcggtgctatagctttatagcttctgggaaaaatatgccactacttactatagcccgcaatttgaaaccttgcatatgtcatttaaaattgaataacacctgagttaatatgtcttttgcgttatagttagttggcacagatgaggctactacatgcattggtgttgtaattcgcaacaacaagactggaatgacctctgttagccatatggattttccagaaattgtggagggagggatcaagcagatgttagaattacttggttcaccttattggtggctttgctgatgcttccacaaaggttgttcgttcctctggaaagaaacacatcaaacaggaagggtattcctatccactatgttgcaaaatagttgaagtgctgcataagtcccagctacaattccaccttcgatcattttgtgtccttgagaataacacgaagagtgactcatttggaaatgcgctacctataattggtggatttgtggttgaaacctcatctggagttgtgataccagcaacctttgatatggattcaaggtgcccagatgaagttgtcaggagaattcgtgtgagcgttagctcttatgatccaacttggcaaggaaggttgctggagacttacgatactcaggacgatgttttccaaattgcacctgcctgctggatgccagattgggccgatatagcgtcctcactcaaccagctctcggactccgaagtcctgctgcggtgctccacctctccagccgcagaaccacctcacttcgtggaaaacgaaagaaggatctggaaatacctgatcgataacccggactgggaagagacgttcccaaaacacaagccccgggtgttccatagggcaagcgacggaagctggtcaaggtactcgtagtgcaagccaagggcttccatcgtctgctgttatcgtcggtgctcccacacatggaacgaaccagaagggaaacccccctctccgttgatttgaacagtgacatattaagtttgagtgcaaagttttctgcgcactgcgattagcacatccgtggacgcttggagatgggagtaaattttataaagtctcttggagatggcagctgctctaaggaccagctaaaaactaaaaaaacgcatgctcttgggccgaaaatgatgagcgattcctcacatctccgttctttttctttatcgaaattttcatttctacgcagttttgtatttttctgaagttataaggttccttgttttgtgcacaaacttataatgcaacttccccaaaactcatataacaccacttcctgcataaacttcaccgaggaacttgtgggcgtaagtttatttattcgtgcataacttttctcag

SEQ ID NO: 58463 - DNA, 2425 bp, Zea Mays
ctgcacctttgtattactgtatatgcatcgcgtcttctttgatcttgaaaccaggtggtgcgcaaggaagcttggaagttggttccctctgcaccacttttcgagtctgaaacacactttccagctctcctccgacaaagactcagaccgccggcggcatgctcctcctcgacggcgaccttgtcctctcctcctccggaagcaccggcgctgcctctcgcacgagcgacagcgggagggagctcgtggcggcgctcttggagagccccgggatccgccacgcggtcgaccggctgaaggtcgcgccggagaggcggatctcggcagggcaggagggggcgccgaagcacgtctacgtgttccagcgggagtacgccacggtggatccggcgcgcgtcgaggtgcgtggagttgccttgtcgcggcttggtctaatagggttggggaatttcgttccccacctgcctttgggtgataaaaacgggatcttgttacgtcgttgatggagttccttgtgtatctgatcgattatatgtgtagctcagtgatgatttgtgctgtgaaggtgaacttcgttttcctgtctaaatcatcactgttgctgtcgagacaaagggctcaggttctgaagtagtggatcggcaagtcttcgtagtttcacttcactcgatttgggaattggttcgggacgaagcagaaacctttttgggtgcgaaggataaagcagggattcttgtgctgggagctttggggacgttgtcaggggttactgctgctacctgtaaaactagggtttggcagtcatcttagcagctttttttttaccttttattagctggtttcttaggtttttttacctgtactttaccaactttgtggattgtgatgatttactagtattggaacctgtactcctaaagcctttgtgtccaccaaatttcatgattcttatattttttatgaatcaattacttgcattttttcatggttttcttaaaaaccagtatctgtcatagctccgctatagcggtgctatagctttatagcttctgggaaaaatatgccactacttactatagcccgcaatttgaaaccttgcatatgtcatttaaaattgaataacacctgagttaatatgtcttttgcgttatagttagttggcacagatgaggctactacatgcattggtgttgtaattcgcaacaacaagactggaatgtaagtgaaaaagaagtgagcatttatctgatcctgacctctgttagccatatggattttccagaaattgtggagggagggatcaagcagatgttagaattacttggttcaccttattggtggctttgctgatgcttccacaaaggttgttcgttcctctggaaagaaacacatcaaacaggaagggtattcctatccactatgttgcaaaatagttgaagtgctgcataagtcccagctacaattccaccttcgatcattttgtgtccttgagaataacacgaagagtgactcatttggaaatgcgctacctataattggtggatttgtggttgaaacctcatctggagttgtgataccagcaacctttgatatggattcaaggtgcccagatgaagttgtcaggagaattcgtgtgagcgttagctcttatgatccaacttggcaaggaaggttgctggagacttacgatactcaggacgatgttttccaaattgcacctgcctgctggatgccagattgggccgatatagcgtcctcactcaaccagctctcggactccgaagtcctgctgcggtgctccacctctccagccgcagaaccacctcacttcgtggaaaacgaaagaaggatctggaaatacctgatcgataacccggactgggaagagacgttcccaaaacacaagccccgggtgttccatagggcaagcgacggaagctggtcaaggtactcgtagtgcaagccaagggcttccatcgtctgctgttatcgtcggtgctcccacacatggaacgaaccagaagggaaacccccctctccgttgatttgaacagtgacatattaagtttgagtgcaaagttttctgcgcactgcgattagcacatccgtggacgcttggagatgggagtaaattttataaagtctcttggagatggcagctgctctaaggaccagctaaaaactaaaaaaacgcatgctcttgggccgaaaatgatgagcgattcctcacatctccgttctttttctttatcgaaattttcatttctacgcagttttgtatttttctgaagttataaggttccttgttttgtgcacaaacttataatgcaacttccccaaaactcatataacaccacttcctgcataaacttcaccgaggaacttgtgggcgtaagtttatttattcgtgcataacttttctcag

SEQ ID NO: 58464 - DNA, 2822 bp, Zea Mays
ctttgtattactgtatatgcatcgcgtcttctttgatcttgaaaccaggtggtgcgcaaggaagcttggaagttggttccctctgcaccacttttcgagtctgaaacacactttccagctctcctccgacaaagactcagaccgccggcggcatgctcctcctcgacggcgaccttgtcctctcctcctccggaagcaccggcgctgcctctcgcacgagcgacagcgggagggagctcgtggcggcgctcttggagagccccgggatccgccacgcggtcgaccggctgaaggtcgcgccggagaggcggatctcggcagggcaggagggggcgccgaagcacgtctacgtgttccagcgggagtacgccacggtggatccggcgcgcgtcgaggtgcgtggagttgccttgtcgcggcttggtctaatagggttggggaatttcgttccccacctgcctttgggtgataaaaacgggatcttgttacgtcgttgatggagttccttgtgtatctgatcgattatatgtgtagctcagtgatgatttgtgctgtgaaggtgaacttcgttttcctgtctaaatcatcactgttgctgtcgagacaaagggctcaggttctgaagtagtggatcggcaagtcttcgtagtttcacttcactcgatttgggaattggttcgggacgaagcagaaacctttttgggtgcgaaggataaagcagggattcttgtgctgggagctttggggacgttgtcaggggttactgctgctacctgtaaaactagggtttggcagtcatcttagcagctttttttttaccttttattagctggtttcttaggtttttttacctgtactttaccaactttgtggattgtgatgatttactagtattggaacctgtactcctaaagcctttgtgtccaccaaatttcatgattcttatattttttatgaatcaattacttgcattttttcatggttttcttaaaaaccagtatctgtcatagctccgctatagcggtgctatagctttatagcttctgggaaaaatatgccactacttactatagcccgcaatttgaaaccttgcatatgtcatttaaaattgaataacacctgagttaatatgtcttttgcgttatagttagttggcacagatgaggctactacatgcattggtgttgtaattcgcaacaacaagactggaatgtaagtgaaaaagaagtgagcatttatctgatcctgtaaggcttcagtttcttgttaactttataactcttgtattttctgaatgaactgagattaaggacttatgacaatgcttgtgatcttccattgcttactccaggacctctgttagccatatggattttccagaaattgtggagggagggatcaagcagatgttagaattacttggttcaccttattggtggctttgctgatgcttccacaaaggttgttcgttcctctggaaagaaacacatcaaacaggaagggtattcctatccactatgttgcaaaatagttgaagtgctgcataagtcccagctacaattccaccttcgatcattttgtgtccttgagaataacacgaagagtgactcatttggaaatgcgctacctataattggtggatttgtggttagtgatttcctctcttctgcatccgttacattgttggttagttggcaccaatctgcttagaaccagtacatagcagttccgatgccttcctacagaatgtccttgaaggtctcattgaaggttaatccaaagttatattctgcagtcacctctccatttccccctacatccatttttgtgtttggtttcggtgcggatttcaaatattcatgcatacaatagagctttagcactgtgaatttgaacatacaaaacttgagattgattgttcacataggctgacctggtttcttcaggttgaaacctcatctggagttgtgataccagcaacctttgatatggattcaaggtgcccagatgaagttgtcaggagaattcgtgtgagcgttagctcttatgatccaacttggcaaggaaggttgctggagacttacgatactcaggacgatgttttccaaattgcacctgcctgctggatgccagattgggccgatatagcgtcctcactcaaccagctctcggactccgaagtcctgctgcggtgctccacctctccagccgcagaaccacctcacttcgtggaaaacgaaagaaggatctggaaatacctgatcgataacccggactgggaagagacgttcccaaaacacaagccccgggtgttccatagggcaagcgacggaagctggtcaaggtactcgtagtgcaagccaagggcttccatcgtctgctgttatcgtcggtgctcccacacatggaacgaaccagaagggaaacccccctctccgttgatttgaacagtgacatattaagtttgagtgcaaagttttctgcgcactgcgattagcacatccgtggacgcttggagatgggagtaaattttataaagtctcttggagatggcagctgctctaaggaccagctaaaaactaaaaaaacgcatgctcttgggccgaaaatgatgagcgattcctcacatctccgttctttttctttatcgaaattttcatttctacgcagttttgtatttttctgaagttataaggttccttgttttgtgcacaaacttataatgcaacttccccaaaactcatataacaccacttcctgcataaacttcaccgaggaacttgtgggcgtaagtttatttattcgtgcataacttttctcag

SEQ ID NO: 58465 - DNA, 2745 bp, Zea Mays
ctttgtattactgtatatgcatcgcgtcttctttgatcttgaaaccaggtggtgcgcaaggaagcttggaagttggttccctctgcaccacttttcgagtctgaaacacactttccagctctcctccgacaaagactcagaccgccggcggcatgctcctcctcgacggcgaccttgtcctctcctcctccggaagcaccggcgctgcctctcgcacgagcgacagcgggagggagctcgtggcggcgctcttggagagccccgggatccgccacgcggtcgaccggctgaaggtcgcgccggagaggcggatctcggcagggcaggagggggcgccgaagcacgtctacgtgttccagcgggagtacgccacggtggatccggcgcgcgtcgaggtgcgtggagttgccttgtcgcggcttggtctaatagggttggggaatttcgttccccacctgcctttgggtgataaaaacgggatcttgttacgtcgttgatggagttccttgtgtatctgatcgattatatgtgtagctcagtgatgatttgtgctgtgaaggtgaacttcgttttcctgtctaaatcatcactgttgctgtcgagacaaagggctcaggttctgaagtagtggatcggcaagtcttcgtagtttcacttcactcgatttgggaattggttcgggacgaagcagaaacctttttgggtgcgaaggataaagcagggattcttgtgctgggagctttggggacgttgtcaggggttactgctgctacctgtaaaactagggtttggcagtcatcttagcagctttttttttaccttttattagctggtttcttaggtttttttacctgtactttaccaactttgtggattgtgatgatttactagtattggaacctgtactcctaaagcctttgtgtccaccaaatttcatgattcttatattttttatgaatcaattacttgcattttttcatggttttcttaaaaaccagtatctgtcatagctccgctatagcggtgctatagctttatagcttctgggaaaaatatgccactacttactatagcccgcaatttgaaaccttgcatatgtcatttaaaattgaataacacctgagttaatatgtcttttgcgttatagttagttggcacagatgaggctactacatgcattggtgttgtaattcgcaacaacaagactggaatgacctctgttagccatatggattttccagaaattgtggagggagggatcaagcagatgttagaattacttggttcaccttattggtggctttgctgatgcttccacaaaggttgttcgttcctctggaaagaaacacatcaaacaggaagggtattcctatccactatgttgcaaaatagttgaagtgctgcataagtcccagctacaattccaccttcgatcattttgtgtccttgagaataacacgaagagtgactcatttggaaatgcgctacctataattggtggatttgtggttagtgatttcctctcttctgcatccgttacattgttggttagttggcaccaatctgcttagaaccagtacatagcagttccgatgccttcctacagaatgtccttgaaggtctcattgaaggttaatccaaagttatattctgcagtcacctctccatttccccctacatccatttttgtgtttggtttcggtgcggatttcaaatattcatgcatacaatagagctttagcactgtgaatttgaacatacaaaacttgagattgattgttcacataggctgacctggtttcttcaggttgaaacctcatctggagttgtgataccagcaacctttgatatggattcaaggtgcccagatgaagttgtcaggagaattcgtgtgagcgttagctcttatgatccaacttggcaaggaaggttgctggagacttacgatactcaggacgatgttttccaaattgcacctgcctgctgtacatgccttgtttgcttacagttttcccttaccataaaatccatcgcctgttgatacataggatgccagattgggccgatatagcgtcctcactcaaccagctctcggactccgaagtcctgctgcggtgctccacctctccagccgcagaaccacctcacttcgtggaaaacgaaagaaggatctggaaatacctgatcgataacccggactgggaagagacgttcccaaaacacaagccccgggtgttccatagggcaagcgacggaagctggtcaaggtactcgtagtgcaagccaagggcttccatcgtctgctgttatcgtcggtgctcccacacatggaacgaaccagaagggaaacccccctctccgttgatttgaacagtgacatattaagtttgagtgcaaagttttctgcgcactgcgattagcacatccgtggacgcttggagatgggagtaaattttataaagtctcttggagatggcagctgctctaaggaccagctaaaaactaaaaaaacgcatgctcttgggccgaaaatgatgagcgattcctcacatctccgttctttttctttatcgaaattttcatttctacgcagttttgtatttttctgaagttataaggttccttgttttgtgcacaaacttataatgcaacttccccaaaactcatataacaccacttcctgcataaacttcaccgaggaacttgtgggcgtaagtttatttattcgtgcataacttttctcag

SEQ ID NO: 58466 - DNA, 2585 bp, Zea Mays
ctttgtattactgtatatgcatcgcgtcttctttgatcttgaaaccaggtggtgcgcaaggaagcttggaagttggttccctctgcaccacttttcgagtctgaaacacactttccagctctcctccgacaaagactcagaccgccggcggcatgctcctcctcgacggcgaccttgtcctctcctcctccggaagcaccggcgctgcctctcgcacgagcgacagcgggagggagctcgtggcggcgctcttggagagccccgggatccgccacgcggtcgaccggctgaaggtcgcgccggagaggcggatctcggcagggcaggagggggcgccgaagcacgtctacgtgttccagcgggagtacgccacggtggatccggcgcgcgtcgaggtgcgtggagttgccttgtcgcggcttggtctaatagggttggggaatttcgttccccacctgcctttgggtgataaaaacgggatcttgttacgtcgttgatggagttccttgtgtatctgatcgattatatgtgtagctcagtgatgatttgtgctgtgaaggtgaacttcgttttcctgtctaaatcatcactgttgctgtcgagacaaagggctcaggttctgaagtagtggatcggcaagtcttcgtagtttcacttcactcgatttgggaattggttcgggacgaagcagaaacctttttgggtgcgaaggataaagcagggattcttgtgctgggagctttggggacgttgtcaggggttactgctgctacctgtaaaactagggtttggcagtcatcttagcagctttttttttaccttttattagctggtttcttaggtttttttacctgtactttaccaactttgtggattgtgatgatttactagtattggaacctgtactcctaaagcctttgtgtccaccaaatttcatgattcttatattttttatgaatcaattacttgcattttttcatggttttcttaaaaaccagtatctgtcatagctccgctatagcggtgctatagctttatagcttctgggaaaaatatgccactacttactatagcccgcaatttgaaaccttgcatatgtcatttaaaattgaataacacctgagttaatatgtcttttgcgttatagttagttggcacagatgaggctactacatgcattggtgttgtaattcgcaacaacaagactggaatgtaagtgaaaaagaagtgagcatttatctgatcctgtaaggcttcagtttcttgttaactttataactcttgtattttctgaatgaactgagattaaggacttatgacaatgcttgtgatcttccattgcttactccaggacctctgttagccatatggattttccagaaattgtggagggagggatcaagcagatgttagaattacttggttcaccttattggtggctttgctgatgcttccacaaaggttgttcgttcctctggaaagaaacacatcaaacaggaagggtattcctatccactatgttgcaaaatagttgaagtgctgcataagtcccagctacaattccaccttcgatcattttgtgtccttgagaataacacgaagagtgactcatttggaaatgcgctacctataattggtggatttgtggttgaaacctcatctggagttgtgataccagcaacctttgatatggattcaaggtgcccagatgaagttgtcaggagaattcgtgtgagcgttagctcttatgatccaacttggcaaggaaggttgctggagacttacgatactcaggacgatgttttccaaattgcacctgcctgctgtacatgccttgtttgcttacagttttcccttaccataaaatccatcgcctgttgatacataggatgccagattgggccgatatagcgtcctcactcaaccagctctcggactccgaagtcctgctgcggtgctccacctctccagccgcagaaccacctcacttcgtggaaaacgaaagaaggatctggaaatacctgatcgataacccggactgggaagagacgttcccaaaacacaagccccgggtgttccatagggcaagcgacggaagctggtcaaggtactcgtagtgcaagccaagggcttccatcgtctgctgttatcgtcggtgctcccacacatggaacgaaccagaagggaaacccccctctccgttgatttgaacagtgacatattaagtttgagtgcaaagttttctgcgcactgcgattagcacatccgtggacgcttggagatgggagtaaattttataaagtctcttggagatggcagctgctctaaggaccagctaaaaactaaaaaaacgcatgctcttgggccgaaaatgatgagcgattcctcacatctccgttctttttctttatcgaaattttcatttctacgcagttttgtatttttctgaagttataaggttccttgttttgtgcacaaacttataatgcaacttccccaaaactcatataacaccacttcctgcataaacttcaccgaggaacttgtgggcgtaagtttatttattcgtgcataacttttctcag

SEQ ID NO: 58467 - DNA, 1931 bp, Zea Mays
ctttgtattactgtatatgcatcgcgtcttctttgatcttgaaaccaggtggtgcgcaaggaagcttggaagttggttccctctgcaccacttttcgagtctgaaacacactttccagctctcctccgacaaagactcagaccgccggcggcatgctcctcctcgacggcgaccttgtcctctcctcctccggaagcaccggcgctgcctctcgcacgagcgacagcgggagggagctcgtggcggcgctcttggagagccccgggatccgccacgcggtcgaccggctgaaggtcgcgccggagaggcggatctcggcagggcaggagggggcgccgaagcacgtctacgtgttccagcgggagtacgccacggtggatccggcgcgcgtcgagttagttggcacagatgaggctactacatgcattggtgttgtaattcgcaacaacaagactggaatgacctctgttagccatatggattttccagaaattgtggagggagggatcaagcagatgttagaattacttggttcaccttattggtggctttgctgatgcttccacaaaggttgttcgttcctctggaaagaaacacatcaaacaggaagggtattcctatccactatgttgcaaaatagttgaagtgctgcataagtcccagctacaattccaccttcgatcattttgtgtccttgagaataacacgaagagtgactcatttggaaatgcgctacctataattggtggatttgtggttagtgatttcctctcttctgcatccgttacattgttggttagttggcaccaatctgcttagaaccagtacatagcagttccgatgccttcctacagaatgtccttgaaggtctcattgaaggttaatccaaagttatattctgcagtcacctctccatttccccctacatccatttttgtgtttggtttcggtgcggatttcaaatattcatgcatacaatagagctttagcactgtgaatttgaacatacaaaacttgagattgattgttcacataggctgacctggtttcttcaggttgaaacctcatctggagttgtgataccagcaacctttgatatggattcaaggtgcccagatgaagttgtcaggagaattcgtgtgagcgttagctcttatgatccaacttggcaaggaaggttgctggagacttacgatactcaggacgatgttttccaaattgcacctgcctgctggatgccagattgggccgatatagcgtcctcactcaaccagctctcggactccgaagtcctgctgcggtgctccacctctccagccgcagaaccacctcacttcgtggaaaacgaaagaaggatctggaaatacctgatcgataacccggactgggaagagacgttcccaaaacacaagccccgggtgttccatagggcaagcgacggaagctggtcaaggtactcgtagtgcaagccaagggcttccatcgtctgctgttatcgtcggtgctcccacacatggaacgaaccagaagggaaacccccctctccgttgatttgaacagtgacatattaagtttgagtgcaaagttttctgcgcactgcgattagcacatccgtggacgcttggagatgggagtaaattttataaagtctcttggagatggcagctgctctaaggaccagctaaaaactaaaaaaacgcatgctcttgggccgaaaatgatgagcgattcctcacatctccgttctttttctttatcgaaattttcatttctacgcagttttgtatttttctgaagttataaggttccttgttttgtgcacaaacttataatgcaacttccccaaaactcatataacaccacttcctgcataaacttcaccgaggaacttgtgggcgtaagtttatttattcgtgcataacttttctcag

SEQ ID NO: 58468 - DNA, 1667 bp, Zea Mays
ctttgtattactgtatatgcatcgcgtcttctttgatcttgaaaccaggtggtgcgcaaggaagcttggaagttggttccctctgcaccacttttcgagtctgaaacacactttccagctctcctccgacaaagactcagaccgccggcggcatgctcctcctcgacggcgaccttgtcctctcctcctccggaagcaccggcgctgcctctcgcacgagcgacagcgggagggagctcgtggcggcgctcttggagagccccgggatccgccacgcggtcgaccggctgaaggtcgcgccggagaggcggatctcggcagggcaggagggggcgccgaagcacgtctacgtgttccagcgggagtacgccacggtggatccggcgcgcgtcgagttagttggcacagatgaggctactacatgcattggtgttgtaattcgcaacaacaagactggaatgtaagtgaaaaagaagtgagcatttatctgatcctgacctctgttagccatatggattttccagaaattgtggagggagggatcaagcagatgttagaattacttggttcaccttattggtggctttgctgatgcttccacaaaggttgttcgttcctctggaaagaaacacatcaaacaggaagggtattcctatccactatgttgcaaaatagttgaagtgctgcataagtcccagctacaattccaccttcgatcattttgtgtccttgagaataacacgaagagtgactcatttggaaatgcgctacctataattggtggatttgtggttgaaacctcatctggagttgtgataccagcaacctttgatatggattcaaggtgcccagatgaagttgtcaggagaattcgtgtgagcgttagctcttatgatccaacttggcaaggaaggttgctggagacttacgatactcaggacgatgttttccaaattgcacctgcctgctggatgccagattgggccgatatagcgtcctcactcaaccagctctcggactccgaagtcctgctgcggtgctccacctctccagccgcagaaccacctcacttcgtggaaaacgaaagaaggatctggaaatacctgatcgataacccggactgggaagagacgttcccaaaacacaagccccgggtgttccatagggcaagcgacggaagctggtcaaggtactcgtagtgcaagccaagggcttccatcgtctgctgttatcgtcggtgctcccacacatggaacgaaccagaagggaaacccccctctccgttgatttgaacagtgacatattaagtttgagtgcaaagttttctgcgcactgcgattagcacatccgtggacgcttggagatgggagtaaattttataaagtctcttggagatggcagctgctctaaggaccagctaaaaactaaaaaaacgcatgctcttgggccgaaaatgatgagcgattcctcacatctccgttctttttctttatcgaaattttcatttctacgcagttttgtatttttctgaagttataaggttccttgttttgtgcacaaacttataatgcaacttccccaaaactcatataacaccacttcctgcataaacttcaccgaggaacttgtgggcgtaagtttatttattcgtgcataacttttctcag

SEQ ID NO: 58469 - DNA, 1813 bp, Zea Mays
ctttgtattactgtatatgcatcgcgtcttctttgatcttgaaaccaggtggtgcgcaaggaagcttggaagttggttccctctgcaccacttttcgagtctgaaacacactttccagctctcctccgacaaagactcagaccgccggcggcatgctcctcctcgacggcgaccttgtcctctcctcctccggaagcaccggcgctgcctctcgcacgagcgacagcgggagggagctcgtggcggcgctcttggagagccccgggatccgccacgcggtcgaccggctgaaggtcgcgccggagaggcggatctcggcagggcaggagggggcgccgaagcacgtctacgtgttccagcgggagtacgccacggtggatccggcgcgcgtcgagttagttggcacagatgaggctactacatgcattggtgttgtaattcgcaacaacaagactggaatgtaagtgaaaaagaagtgagcatttatctgatcctgacctctgttagccatatggattttccagaaattgtggagggagggatcaagcagatgttagaattacttggtgatgacaatgcaccatttgatgttcaccttattggtggctttgctgatgcttccacaaaggttgttcgttcctctggaaagaaacacatcaaacaggaagggtattcctatccactatgttgcaaaatagttgaagtgctgcataagtcccagctacaattccaccttcgatcattttgtgtccttgagaataacacgaagagtgactcatttggaaatgcgctacctataattggtggatttgtggttagtgatttcctctcttctgcatccgttacattgttggttagttggcaccaatctgcttagaaccagtacatagcagttccgatgccttcctacagaatgtccttgaaggtctcattgaaggttgaaacctcatctggagttgtgataccagcaacctttgatatggattcaaggtgcccagatgaagttgtcaggagaattcgtgtgagcgttagctcttatgatccaacttggcaaggaaggttgctggagacttacgatactcaggacgatgttttccaaattgcacctgcctgctggatgccagattgggccgatatagcgtcctcactcaaccagctctcggactccgaagtcctgctgcggtgctccacctctccagccgcagaaccacctcacttcgtggaaaacgaaagaaggatctggaaatacctgatcgataacccggactgggaagagacgttcccaaaacacaagccccgggtgttccatagggcaagcgacggaagctggtcaaggtactcgtagtgcaagccaagggcttccatcgtctgctgttatcgtcggtgctcccacacatggaacgaaccagaagggaaacccccctctccgttgatttgaacagtgacatattaagtttgagtgcaaagttttctgcgcactgcgattagcacatccgtggacgcttggagatgggagtaaattttataaagtctcttggagatggcagctgctctaaggaccagctaaaaactaaaaaaacgcatgctcttgggccgaaaatgatgagcgattcctcacatctccgttctttttctttatcgaaattttcatttctacgcagttttgtatttttctgaagttataaggttccttgttttgtgcacaaacttataatgcaacttccccaaaactcatataacaccacttcctgcataaacttcaccgaggaacttgtgggcgtaagtttatttattcgtgcataacttttctcag

SEQ ID NO: 58470 - DNA, 1389 bp, Zea Mays
tcaaaacttattggtggttcaccattttgttgttcgttcctctggaaagaaacacatcaaacaggaagggtattcctatccactatgttgcaaaatagttgaagtgctgcataagtcccagctacaattccaccttcgatcattttgtgtccttgagaataacacgaagagtgactcatttggaaatgcgctacctataattggtggatttgtggttagtgatttcctctcttctgcatccgttacattgttggttagttggcaccaatctgcttagaaccagtacatagcagttccgatgccttcctacagaatgtccttgaaggtctcattgaaggttaatccaaagttatattctgcagtcacctctccatttccccctacatccatttttgtgtttggtttcggtgcggatttcaaatattcatgcatacaatagagctttagcactgtgaatttgaacatacaaaacttgagattgattgttcacataggctgacctggtttcttcaggttgaaacctcatctggagttgtgataccagcaacctttgatatggattcaaggtgcccagatgaagttgtcaggagaattcgtgtgagcgttagctcttatgatccaacttggcaaggaaggttgctggagacttacgatactcaggacgatgttttccaaattgcacctgcctgctggatgccagattgggccgatatagcgtcctcactcaaccagctctcggactccgaagtcctgctgcggtgctccacctctccagccgcagaaccacctcacttcgtggaaaacgaaagaaggatctggaaatacctgatcgataacccggactgggaagagacgttcccaaaacacaagccccgggtgttccatagggcaagcgacggaagctggtcaaggtactcgtagtgcaagccaagggcttccatcgtctgctgttatcgtcggtgctcccacacatggaacgaaccagaagggaaacccccctctccgttgatttgaacagtgacatattaagtttgagtgcaaagttttctgcgcactgcgattagcacatccgtggacgcttggagatgggagtaaattttataaagtctcttggagatggcagctgctctaaggaccagctaaaaactaaaaaaacgcatgctcttgggccgaaaatgatgagcgattcctcacatctccgttctttttctttatcgaaattttcatttctacgcagttttgtatttttctgaagttataaggttccttgttttgtgcacaaacttataatgcaacttccccaaaactcatataacaccacttcctgcataaacttcaccgaggaacttgtgggcgtaagtttatttattcgtgcataacttttctcag

SEQ ID NO: 58471 - DNA, 1088 bp, Zea Mays
aaaacttattggtggttcaccattttgttgttcgttcctctggaaagaaacacatcaaacaggaagggtattcctatccactatgttgcaaaatagttgaagtgctgcataagtcccagctacaattccaccttcgatcattttgtgtccttgagaataacacgaagagtgactcatttggaaatgcgctacctataattggtggatttgtggttgaaacctcatctggagttgtgataccagcaacctttgatatggattcaaggtgcccagatgaagttgtcaggagaattcgtgtgagcgttagctcttatgatccaacttggcaaggaaggttgctggagacttacgatactcaggacgatgttttccaaattgcacctgcctgctggatgccagattgggccgatatagcgtcctcactcaaccagctctcggactccgaagtcctgctgcggtgctccacctctccagccgcagaaccacctcacttcgtggaaaacgaaagaaggatctggaaatacctgatcgataacccggactgggaagagacgttcccaaaacacaagccccgggtgttccatagggcaagcgacggaagctggtcaaggtactcgtagtgcaagccaagggcttccatcgtctgctgttatcgtcggtgctcccacacatggaacgaaccagaagggaaacccccctctccgttgatttgaacagtgacatattaagtttgagtgcaaagttttctgcgcactgcgattagcacatccgtggacgcttggagatgggagtaaattttataaagtctcttggagatggcagctgctctaaggaccagctaaaaactaaaaaaacgcatgctcttgggccgaaaatgatgagcgattcctcacatctccgttctttttctttatcgaaattttcatttctacgcagttttgtatttttctgaagttataaggttccttgttttgtgcacaaacttataatgcaacttccccaaaactcatataacaccacttcctgcataaacttcaccgaggaacttgtgggcgtaagtttatttattcgtgcataacttttctcag

SEQ ID NO: 58472 - DNA, 1455 bp, Zea Mays
aaaacggaccggatcccgacccaatttaaccaagcccccatcagttgcggccgcgcgctcgtgccgttgcgctgcggcaaagcctccccccacacctctctcctccacccgccgcccccgcgggaccgaaaccctagctagggttctgcccgccgccgccgccgccttcgatccagacgcggccaggcttcccgcaacaccgccatggacacgggccgcaagcggaccgcaccggagggcgccaacggcgcgggcggccccaagcgcgcgagagcactgcgggttgcccctttggtgcaagttgccattttctccataacttcccgggtggctaccaggccgtttcaaagatgaccaacttgggtggaccgcctgttccggctccaccaggaagaatgcctatgggacctggtggtcctgatgggccaccttcacctgctgtgaagactcgcatgtgtaacaagtacaacactgccgaaggatgtaaatgggggagcaagtgccactttgctcatggagagagggagcttggaaagcccctgcagatggacaacccgatgggacctcctccaatggggccagggcccaacgggcacttcatgccaccgccaatgcctttcccagacatggttcctccctccacattcggtgcttccgccacagccaagatcagcgtcgatgcatcccttgctggtgccatcattgggaagggtggtaccaacacaaagcatatatcccgagtgactggggccaagttagccatccgggacaacgaggctgatcccaaccataaaaacatcgagctcgagggaacatttgaccagatcaagcacgctagcgcaatggtcacagagttgattgtccgcatcagtggtaagccgcctccacaagccaagaacaacccaggtagggggcctggttctcatgccgggggtcctggaagcaacttcaaaaccaaattgtgcgagaacttcaacaaaggctcctgcacctttggagacaggtgccacttcgcccatggcgaaggtgagctgcgcaaacctgctgctgcttgacaggcatgcttattgtggcctgtggtgattaatctgcctgtatggctgaataacaccatgaccaaggacagtggcgccagcgccatggtgaagtgtgctgagccacatgctgcctgagagagagcatttccctgtggctcgtatttgatcttaatgctgtaacaaactctcctcgatggagattaagcaatggccgtttatttaggatttgtaggattgccgtattggtcacccttttatctatcctgtttttgtaccgtttcttaggcactcttggctggcagatcattgtgagtctgttgaacttgagaatagttgctattgatgttatcggtttgtggattcttactagctcatttgaagtccagacggctaatctgaaatcccgacgtcattagtg

SEQ ID NO: 58473 - DNA, 2801 bp, Zea Mays
atacactctggagtctggacttcacttcgtccccgtcgaacactccacgccgctctagcactctctgcgctctcccatcctcctcgctagccgtactcttcaccgccgaagcttctggttcctcatcgccgccgctacgcgtgagatcgacccgccgccgtcggtctttttccctgactggtaatctagtgttcattctcttaattcaaatggtttcctcccacggagcaagatgaggaaatattcaaactgctcttagccgtgtagcacgacaagtttgttgcagaggtggacagctgggatttcttggcactttgtcaagtccacgagtagaagtgtggtggaagattgtcttcgttcaagatgatgcagaggccactgctccgtccggaggagtactccttgaaggagacctcacctcaccttggtggtgcagctgctggtgacaagctcaccaccacctatgacctggttgagcagatgcagtacctttatgtaagagttgtaaaagcaaaggaacttccaaacatggacatcactgggagctgtgacccgtatgttgaggtgaagctaggaaattataaggggcaaactcagcatttcgagaagaagaacaacccagagtggaatcaggtctttgccttctcaaaggagcgtattcagtcatcagttgtggagattgtagtcaaggacaaggatcttgtcaaggatgacttcattggccgtgttatatttgatctgaatgaggtcccaaagagagtgccacctgatagcccgttggctccacagtggtatcggttggaagaccgaaatgggcacaaggtgaagggggagttgatgttggctgtttggatgggcactcaagctgatgaagcattccctgaagcatggcattctgacgcagcctcggtccctggtgatggccttgcaagcattagatcgaaagtgtatcttactccaaagctttggtatctccgtgtcaatgtcattgaagcccaggatcttataccaaatgacagggccaggttccctgaagtttatgtcaaagcaatgctaggcaatcaagtcctcagaaccagggcaccgagccggaccttgaatccaatgtggaatgaagacttgatgtttgtcgcagctgagccatttgaagaacacctaattttgagtgtagaggacagggtggccccaggaaaggatgaagtaattggaaggacaatgatttcactgcaccatgtaccccggaggctggatcacaggttgctaaccagccagtggtataaccttgagaagcatgtgattattgatggtgagcagaagaaagagaccaagttttcaagtcggattcacttgagaatatgcctcgaaggtggatatcatgtcttggatgagtcaacacattacagtagtgatttaaggccaactgcgaagcctctgtggaaacctagcataggcatgcttgagcttggtatcttgacagcacaaggcctgttgccaatgaagaccaaggatgggcgtggcacaactgatgcgtactgtgttgcaaagtatggacagaaatgggtgcgtactaggactataatcgacagcttcactcccaaatggaatgaacagtacacctgggaggtgtatgatccatgcactgtggtcacaattggtgtatttgacaactgccacctgaacggcggggaaaaggtcaatggtgccagggataccagaatcgggagggtccgcatccgtctctcgacgcttgaaactgatcgggtgtatacccactcataccctcttattgtcctgacacctggtggcgttaagaagatgggcgaggtgcagcttgctgtccgtttcacgtgttcgtcactgctcaacatgatgcatctgtacacacagcccttgctgcccaagatgcactacgtgcacccgctgtccgtgatgcaggtggacaacctcaggcgccaagccacgaacattgtctcgacaaggctgggccgcgcagagccaccgctgcgaaaggaaatcgtggagtacatgctcgacgtggactcgcacatgtggagcatgaggaagagcaaggcgaatttcttccgcatcatgagcgtcttgagccccttggtcgcggtgacaaagtggttcgatcagatctgccgctggaggaacccactgaccaccatactgatccatgtcctcttcatgatactggttctttacccagagctgatactgcccacagtcttcctctacctgttcctgataggggtgtggtactaccggtggcgtctgaggcagccgccacacatggacacccgcctctcccacgcggagactgcccaccccgacgagctggacgaggagtttgacaccttccccacttcccgcccgccagacgtcgtgcggatgcggtacgacaggctgcgcagcgtcgcggggaggatccagaccgtggtcggcgaccttgcgacgcagggcgagcggttgcagtcgctgctgagctggagggacccgagggccaccgccctgttcgttgtcttctgcttcgttgccgccatcgtgctgtacgtcacaccgttccgggtcgtggtcttcctcgcgggcctgtacatgctgaggcaccccaggttccgccacaagatgccgtccgtcccgctcaacttcttcaggcgtctgccggcgaggactgacagcatgctgtaggttgtgggcttgtggcagatgcctggctccattgctggttcagtggtttcacccgtcagttgcagctcacagatggtcactctcctaagaaccagcccaaacagactgaagct

SEQ ID NO: 58474 - DNA, 1259 bp, Zea Mays
cttggctcctggcttcctctcctctcccatcttctccttccttgaccccagccctgcggagccggaaccggagccagggccggggagcgtgcgagtgcgaacgcaggagcagctcacgcgcgtgcggcacaccacctctcgcctcagcgccgccccacccccactataaataacgggaccatcctccccttcccctgcctccacctccgctccagtcccgtgtcctcctcccgccgtctctctcgtcccggacgcctccgccgcgccaatgcgccacgcctcgccaccgcaggagctccccgccgccgggcgcgagatccaggcggcgctggcccccgccaacggcaacgccgcgggcgcccgcgggggcggaggctccttcacggcgctgctgggactccccactccgcaggccatggagctgctcctcccccgcacgacgccgcccgccctagccctagccccagccgcagcgcccgcgcccacgcccaccttcccctccgacccgcacctcgtggaccgcgccgggcgcttctccacgttcgcgcccccgtcgccgccctccccatccccaacgcagcagcctccaccgccccctcccgccgccgtcgccggcaagcgcaaggccgaccccgtcgaccgcgcctccaaggggaaggcggcgaagaaggggaagacggcggaggagaagcccgcggccgccggcggcgaggacgagaagccggcgtacgtgcacgtgcgggccaggcggggccaggccacggacagccacagcctcgccgagcgggcgagacgcgagaagatcaatgcgaggatggagctgctcaaggagctggtccccggctgcagtaaggtatcaggaacagcgttggtgctagatgagatcatcaatcatgttcagtctctccaaaggcaagttgagtacttgtcaatgaggcttgcaactgtaaacccgaggggcgattttggtgggctagatagctttctgaccacggagtgtggaaggatagcaagcttcaactgcaagaacggaatcgacttggagcaggtaacctggccagaaatgggtgttcatggagcaaggcagctgatgcaactccaacagcagttctggcatggtgatttggcgcatccacaccaagtggcttcacagtgggaaaagcggggggatggccatcctcccgtcttcagcaactccagtccctctctcttcggctatgatctaacaagctctggcttataacaccgctccagctttt

SEQ ID NO: 58475 - DNA, 321 bp, Zea Mays
ctgctcagtacactgaatgttgcaaccagtgattgttgcaaccagtagactataaaacttagcaaatgaatgttgtttttcttgctattatttttggttctgaagtctgaaccgcctattgtatatttttgctttggttaattagtttattacataggtaatgctactcgattgttctatgttctgaaaaccgctaaaacatttagctgcggcgatatctagatatatccttctctagctgttaaaaaaggccgaggataaatgccttagcccgctattttaaacactgagtaagacacggacagatggatgatatgcatg

SEQ ID NO: 58476 - DNA, 3265 bp, Zea Mays
gaatattagctataacctatgtttgattgtgtatatttgtatacttttattgtgtttcaggaaggacaaaatcatgttgtacaggatcctcccacatatggtgcaccaaagtttgatagaacccccagttagtcatgtcgtgacatgttcttatctctactactaattatgtgcctatcgtaggcgttcacaattccttggttctgtcgtcgcgctcgcctgccatctccctccgcgctccatccgccaccatccgcgctcgcctcccttcgcgcatcctacaaccgcgtgctccttccttcgatggtgcggatcccccgtgactaccatctccctccgccctcccgcgctccatccgccaccatccgcgcttcctacagccgcgcgctccttcgacggcgcggatcccgcaccctcgaatcacgccagcagatcccacaatcaagcagcggcgacaggaataggggcgggctacgcgggcgctactacgacgagggtgagggcgagcgctccggcgccgcggcgccattcatcataatcggtcgagctcctggagggaacggctgcagagcggacgagatcgaggagcgggcgggcgggtgccgcccgtgacggcgcctaggctcaggctccgcgacggccgccacctcgccgcgcaaaggtctcaccggctcccgagaggacagcgcccgcgcctcccaggtttcaaaaaaccttctgagaaggcctgttgatattctaaggaaattgtttgatgggaacaccttgagatcacaaatcaaagaattctttaatcgctttggtgctggagaggctgctgcaatgtgcttaatgatagctgcgaagctactttatgttgaagatagtctgataagcaattctgtttctgagaaagccactgaggcatttgaggaccctgggcttgttgggatgcctcaaattgttggtaccactgctttatctaatacacgaacttaggctggaggctttactatgggccaagttgttcaagaagcataacctttgttttctggtgcatatgaagggctttgtttgtgctcgtcaagactactttatctcatatgggagtttcctattatagtgattcgaagaccggctggtactaataaatgcaaggatggtgtaattgtttgtaggctttcagctggggccatgaaaattcttgagagcaagattcattcactggaaacatttttaagatctagaagaaataagagaaggggccacgcagtaccattgacacttaccctcaaggcctacagttgttgtaattgaagcgggtcaagacatagcatttgcaaagatttagttcattctgatcactctgcaatatttcggtagtcgatggatggagaatggtggatcgaggagaccgatgacatactgctgcatcccgtgctgctcaatgggaagcagtaccggccagtctggtcaaacgacggcaccgtgatccacgcagatttctagttaagtttcttctgatggtgatggtactaaagaggactatgttcatatccgggcaaagcgaggccaagccactaacagccaaagccttgcagaaagactagggagaaagaagataagtgagaggatgaagcttcttcaagatcttgttcctgaatgcagtaagatcattggcaaggcaatcatgctcgatgagattatcaactatgtgcagtcattgcaacgacaagtcgagatcatatccaaacaagtaaagccacccactcgatcaccatatctccctctaggatcaagcggccttactggcccatttaaccaaggaatcatgcagccataattgatgtgcaccattgccaatcccgttgatgttttgcatggagctattcacgaggcgtcaacaatgaaccattattgatttgtccactgttatgttcgttgctggtgcaatcatgggatacattatgttcactgaatctacactcccagttcacactgaacttacccctaaatcttgtggcttccaagattgcagtctagactacggtgatgaatccaataaccaaatatccttggacttttattgtagctttttgtgtgcatttgttccgatacttaacaattaacattatatgacaccatagtttctctaatcacatgtaactccatctagccatctaggtttgtcctaagtcaaacatatcttttaattttgattagaaatatctataaaaaataattgtcttaaataagcagagttatttggttttagtaatgaatttagcaatgccaatgctatttttatcgttctatataaattttagatattcatggtcaaacttaaaaatgtttgacttggacaaatatagatagacctacacatgcattgtgattttaggaagtcctacaattctcctccccaaagtctgctatcaacttctaacagttagtccagttttcatgaacaaatttagttttaatcattctatgttgtgccaaccgccagcaactaataatcagagctgggtcatatcatcatatcatagtagattgtatagctttcttccctgtgcatgcttactggttactagatgaaaaaggtcgtgttacgttatggcgcactcctctcctttgaataggacatgctttcacactctcaattcggcatatccttctagagactagctcacactccaatggtcttctaaatgaatagcacactatagtcaagagtatgacttaccaaattcattattggttccaagcatcttgaaagagaagtccatcgtctctcttactgtcatctcagcatggctaacagaagcacgcagtaggagtttctccaccttcctttcatcatgctacttcttgctgagggtggcgtgaaaaagtcagcaacaagttcctctatggtggcgacagagaagacaagggaggctctggcgacattgtggcgacgacgagaagcgagcaaggatataaatcgatctgtttctttggaaattagctgtagtagaatatttacgtgatacaaatctctattctctatatctctatatctattacgtttctcatgtctctatttttattataatggtttggaaaaatgtcgctcatcttctgctctaatctttcgaaattaggtgtagtggaatattattgccagatattgctacactacaatagtgaaattattgtccaaaattgaagattgccgtatgccttaggtcactataaaatcgagttattttataataatagttttttgttttacataagcccc

SEQ ID NO: 58477 - DNA, 3077 bp, Zea Mays
gaatattagctataacctatgtttgattgtgtatatttgtatacttttattgtgtttcaggaaggacaaaatcatgttgtacaggatcctcccacatatggtgcaccaaagtttgatagaacccccagttagtcatgtcgtgacatgttcttatctctactactaattatgtgcctatcgtaggcgttcacaattccttggttctgtcgtcgcgctcgcctgccatctccctccgcgctccatccgccaccatccgcgctcgcctcccttcgcgcatcctacaaccgcgtgctccttccttcgatggtgcggatcccccgtgactaccatctccctccgccctcccgcgctccatccgccaccatccgcgcttcctacagccgcgcgctccttcgacggcgcggatcccgcaccctcgaatcacgccagcagatcccacaatcaagcagcggcgacaggaataggggcgggctacgcgggcgctactacgacgagggtgagggcgagcgctccggcgccgcggcgccattcatcataatcggtcgagctcctggagggaacggctgcagagcggacgagatcgaggagcgggcgggcgggtgccgcccgtgacggcgcctaggctcaggctccgcgacggccgccacctcgccgcgcaaaggtctcaccggctcccgagaggacagcgcccgcgcctcccaggtttcaaaaaaccttctgagaaggcatgtataaaactttgggcaaaaggagatcttcctacctagcatatcttgcctcggaggagggttgttatattcaatactatgggtttgatggagttgttgtaattgaagcgggtcaagacatagcatttgcaaagatttagttcattctgatcactctgcaatatttcggtcgatggatggagaatggtggatcgaggagaccgatgacatactgctgcatcccgtgctgctcaatgggaagcagtaccggccagtctggtcaaacgacggcaccgtgatccacgcagatttctagttaagtttcttctgatggtgatggtactaaagaggactatgttcatatccgggcaaagcgaggccaagccactaacagccaaagccttgcagaaagactagggagaaagaagataagtgagaggatgaagcttcttcaagatcttgttcctgaatgcagtaagatcattggcaaggcaatcatgctcgatgagattatcaactatgtgcagtcattgcaacgacaagtcgagatcatatccaaacaagatcaagcggccttactggcccatttaaccaaggaatcatgcagccataattgatgtgcaccattgccaatcccgttgatgttttgcatggagctattcacgaggcgtcaacaatgaaccattattgatttgtccactgttatgttcgttgctggtgcaatcatgggatacattatgttcactgaatctacactcccagttcacactgaacttacccctaaatcttgtggcttccaagattgcagtctagactacggtgatgaatccaataaccaaatatccttggacttttattgtagctttttgtgtgcatttgttccgatacttaacaattaacattatatgacaccatagtttctctaatcacatgtaactccatctagccatctaggtttgtcctaagtcaaacatatcttttaattttgattagaaatatctataaaaaataattgtcttaaataagcagagttatttggttttagtaatgaatttagcaatgccaatgctatttttatcgttctatataaattttagatattcatggtcaaacttaaaaatgtttgacttggacaaatatagatagacctacacatgcattgtgattttaggaagtcctacaattctcctccccaaagtctgctatcaacttctaacagttagtccagttttcatgaacaaatttagttttaatcattctatgttgtgccaaccgccagcaactaataatcagagctgggtcatatcatcatatcatagtagattgtatagctttcttccctgtgcatgcttactggttactagatgaaaaaggtcgtgttacgttatggcgcactcctctcctttgaataggacatgctttcacactctcaattcggcatatccttctagagactagctgtgagttgggtcctaaatgtttcttccatgttcaattcgaatggcattgttgtgttaattagccgtcctgttttgtatttttttcctacaagttatagtggttacattaatgactaaatcaagatcttgacccactttattgatgacacccttttttcttcttattgcttctcctatcgtctctgagtttgtcattccattcaaacacgaaatttgtgtcagtatagatgccatggaaattttggtttagcttgagtattttgtagatacttcattcttgagtattcttgagtttgccttgttataaattgcagcacactccaatggtcttctaaatgaatagcacactatagtcaagagtatgacttaccaaattcattattggttccaagcatcttgaaagagaagtccatcgtctctcttactgtcatctcagcatggctaacagaagcacgcagtaggagtttctccaccttcctttcatcatgctacttcttgctgagggtggcgtgaaaaagtcagcaacaagttcctctatggtggcgacagagaagacaagggaggctctggcgacattgtggcgacgacgagaagcgagcaaggatataaatcgatctgtttctttggaaattagctgtagtagaatatttacgtgatacaaatctctattctctatatctctatatctattacgtttctcatgtctctatttttattataatggtttggaaaaatgtcgctcatcttctgctctaatctttcgaaattaggtgtagtggaatattattgccagatattgctacactacaatagtgaaattattgtccaaaattgaagattgccgtatgccttaggtcactataaaatcgagttattttataataatagttttttgttttacataagcccc

SEQ ID NO: 58478 - DNA, 2426 bp, Zea Mays
gaatattagctataacctatgtttgattgtgtatatttgtatacttttattgtgtttcaggaaggacaaaatcatgttgtacaggatcctcccacatatggtgcaccaaagtttgatagaacccccagttagtcatgtcgtgacatgttcttatctctactactaattatgtgcctatcgtaggcgttcacaattccttggttctgtcgtcgcgctcgcctgccatctccctccgcgctccatccgccaccatccgcgctcgcctcccttcgcgcatcctacaaccgcgtgctccttccttcgatggtgcggatcccccgtgactaccatctccctccgccctcccgcgctccatccgccaccatccgcgcttcctacagccgcgcgctccttcgacggcgcggatcccgcaccctcgaatcacgccagcagatcccacaatcaagcagcggcgacaggaataggggcgggctacgcgggcgctactacgacgagggtgagggcgagcgctccggcgccgcggcgccattcatcataatcggtcgagctcctggagggaacggctgcagagcggacgagatcgaggagcgggcgggcgggtgccgcccgtgacggcgcctaggctcaggctccgcgacggccgccacctcgccgcgcaaaggtctcaccggctcccgagaggacagcgcccgcgcctcccaggtttcaaaaaaccttctgagaaggcctgttgatattctaaggaaattgtttgatgggaacaccttgagatcacaaatcaaagaattctttaatcgctttggtgctggagaggctgctgcaatgtgcttaatgatagctgcgaagctactttatgttgaagatagtctgataagcaattctgtttctgagaaagccactgaggcatttgaggaccctgggcttgttgggatgcctcaaattgttggtaccactgctttatctaatacacgaacttaggctggaggctttactatgggccaagttgttcaagaagcataacctttgttttctggtgcatatgaagggctttgtttgtgctcgtcaagactactttatctcatatgggagtttcctattatagtgattcgaagaccggctggtactaataaatgcaaggatggtgtaattgtttgtaggctttcagctggggccatgaaaattcttgagagcaagattcattcactggaaacatttttaagatctagaagaaataagagaaggggccacgcagtaccattgacacttaccctcaaggtcgatggatggagaatggtggatcgaggagaccgatgacatactgctgcatcccgtgctgctcaatgggaagcagtaccggccagtctggtcaaacgacggcaccgtgatccacgcagatttctagttaagtttcttctgatggtgatggtactaaagaggactatgttcatatccgggcaaagcgaggccaagccactaacagccaaagccttgcagaaagactagggagaaagaagataagtgagaggatgaagcttcttcaagatcttgttcctgaatgcagtaagtcaaaccaggatcaagcggccttactggcccatttaaccaaggaatcatgcagccataattgatgtgcaccattgccaatcccgttgatgttttgcatggagctattcacgaggcgtcaacaatgaaccattattgatttgtccactgttatgttcgttgctggtgcaatcatgggatacattatgttcactgaatctacactcccagttcacactgaacttacccctaaatcttgtggcttccaagattgcagtctagactacgcacactccaatggtcttctaaatgaatagcacactatagtcaagagtatgacttaccaaattcattattggttccaagcatcttgaaagagaagtccatcgtctctcttactgtcatctcagcatggctaacagaagcacgcagtaggagtttctccaccttcctttcatcatgctacttcttgctgagggtggcgtgaaaaagtcagcaacaagttcctctatggtggcgacagagaagacaagggaggctctggcgacattgtggcgacgacgagaagcgagcaaggatataaatcgatctgtttctttggaaattagctgtagtagaatatttacgtgatacaaatctctattctctatatctctatatctattacgtttctcatgtctctatttttattataatggtttggaaaaatgtcgctcatcttctgctctaatctttcgaaattaggtgtagtggaatattattgccagatattgctacactacaatagtgaaattattgtccaaaattgaagattgccgtatgccttaggtcactataaaatcgagttattttataataatagttttttgttttacataagcccc

SEQ ID NO: 58479 - DNA, 3016 bp, Zea Mays
gaatattagctataacctatgtttgattgtgtatatttgtatacttttattgtgtttcaggaaggacaaaatcatgttgtacaggatcctcccacatatggtgcaccaaagtttgatagaacccccagttagtcatgtcgtgacatgttcttatctctactactaattatgtgcctatcgtaggcgttcacaattccttggttctgtcgtcgcgctcgcctgccatctccctccgcgctccatccgccaccatccgcgctcgcctcccttcgcgcatcctacaaccgcgtgctccttccttcgatggtgcggatcccccgtgactaccatctccctccgccctcccgcgctccatccgccaccatccgcgcttcctacagccgcgcgctccttcgacggcgcggatcccgcaccctcgaatcacgccagcagatcccacaatcaagcagcggcgacaggaataggggcgggctacgcgggcgctactacgacgagggtgagggcgagcgctccggcgccgcggcgccattcatcataatcggtcgagctcctggagggaacggctgcagagcggacgagatcgaggagcgggcgggcgggtgccgcccgtgacggcgcctaggctcaggctccgcgacggccgccacctcgccgcgcaaaggtctcaccggctcccgagaggacagcgcccgcgcctcccaggtttcaaaaaaccttctgagaaggcctgttgatattctaaggaaattgtttgatgggaacaccttgagatcacaaatcaaagaattctttaatcgctttggtgctggagaggctgctgcaatgtgcttaatgatagctgcgaagctactttatgttgaagatagtctgataagcaattctgtttctgagaaagccactgaggcatttgaggaccctgggcttgttgggatgcctcaaattgttggtaccactgctttatctaatacacgaacttaggctggaggctttactatgggccaagttgttcaagaagcataacctttgttttctggtgcatatgaagggctttgtttgtgctcgtcaagactactttatctcatatgggagtttcctattatagtgattcgaagaccggctggtactaataaatgcaaggatggtgtaattgtttgtaggctttcagctggggccatgaaaattcttgagagcaagattcattcactggaaacatttttaagatctagaagaaataagagaaggggccacgcagtaccattgacacttaccctcaaggttgttgtaattgaagcgggtcaagacatagcatttgcaaagatttagttcattctgatcactctgcaatatttcggtagtcgatggatggagaatggtggatcgaggagaccgatgacatactgctgcatcccgtgctgctcaatgggaagcagtaccggccagtctggtcaaacgacggcaccgtgatccacgcagatttctagttaagtttcttctgatggtgatggtactaaagaggactatgttcatatccgggcaaagcgaggccaagccactaacagccaaagccttgcagaaagactagggagaaagaagataagtgagaggatgaagcttcttcaagatcttgttcctgaatgcagtaagatcattggcaaggcaatcatgctcgatgagattatcaactatgtgcagtcattgcaacgacaagtcgagatcatatccaaacaagtaaagccacccactcgatcaccatatctccctctaggatcaagcggccttactggcccatttaaccaaggaatcatgcagccataattgatgtgcaccattgccaatcccgttgatgttttgcatggagctattcacgaggcgtcaacaatgaaccattattgatttgtccactgttatgttcgttgctggtgcaatcatgggatacattatgttcactgaatctacactcccagttcacactgaacttacccctaaatcttgtggcttccaagattgcagtctagactacggtgatgaatccaataaccaaatatccttggacttttattgtagctttttgtgtgcatttgttccgatacttaacaattaacattatatgacaccatagtttctctaatcacatgtaactccatctagccatctaggtttgtcctaagtcaaacatatcttttaattttgattagaaatatctataaaaaataattgtcttaaataagcagagttatttggttttagtaatgaatttagcaatgccaatgctatttttatcgttctatataaattttagatattcatggtcaaacttaaaaatgtttgacttggacaaatatagatagacctacacatgcattgtgattttaggaagtcctacaattctcctccccaaagtctgctatcaacttctaacacacactccaatggtcttctaaatgaatagcacactatagtcaagagtatgacttaccaaattcattattggttccaagcatcttgaaagagaagtccatcgtctctcttactgtcatctcagcatggctaacagaagcacgcagtaggagtttctccaccttcctttcatcatgctacttcttgctgagggtggcgtgaaaaagtcagcaacaagttcctctatggtggcgacagagaagacaagggaggctctggcgacattgtggcgacgacgagaagcgagcaaggatataaatcgatctgtttctttggaaattagctgtagtagaatatttacgtgatacaaatctctattctctatatctctatatctattacgtttctcatgtctctatttttattataatggtttggaaaaatgtcgctcatcttctgctctaatctttcgaaattaggtgtagtggaatattattgccagatattgctacactacaatagtgaaattattgtccaaaattgaagattgccgtatgccttaggtcactataaaatcgagttattttataataatagttttttgttttacataagcccc

SEQ ID NO: 58480 - DNA, 2917 bp, Zea Mays
gaatattagctataacctatgtttgattgtgtatatttgtatacttttattgtgtttcaggaaggacaaaatcatgttgtacaggatcctcccacatatggtgcaccaaagtttgatagaacccccagttagtcatgtcgtgacatgttcttatctctactactaattatgtgcctatcgtaggcgttcacaattccttggttctgtcgtcgcgctcgcctgccatctccctccgcgctccatccgccaccatccgcgctcgcctcccttcgcgcatcctacaaccgcgtgctccttccttcgatggtgcggatcccccgtgactaccatctccctccgccctcccgcgctccatccgccaccatccgcgcttcctacagccgcgcgctccttcgacggcgcggatcccgcaccctcgaatcacgccagcagatcccacaatcaagcagcggcgacaggaataggggcgggctacgcgggcgctactacgacgagggtgagggcgagcgctccggcgccgcggcgccattcatcataatcggtcgagctcctggagggaacggctgcagagcggacgagatcgaggagcgggcgggcgggtgccgcccgtgacggcgcctaggctcaggctccgcgacggccgccacctcgccgcgcaaaggtctcaccggctcccgagaggacagcgcccgcgcctcccaggtttcaaaaaaccttctgagaaggcatgtataaaactttgggcaaaaggagatcttcctacctagcatatcttgcctcggaggagggttgttatattcaatactatgggtttgatggagtcgatggatggagaatggtggatcgaggagaccgatgacatactgctgcatcccgtgctgctcaatgggaagcagtaccggccagtctggtcaaacgacggcaccgtgatccacgcagatttctagttaagtttcttctgatggtgatggtactaaagaggactatgttcatatccgggcaaagcgaggccaagccactaacagccaaagccttgcagaaagactagggagaaagaagataagtgagaggatgaagcttcttcaagatcttgttcctgaatgcagtaagtgcatctgcagttcttgtcaatgaaactcgcaactgttaaccccgagcttggctttgacattgagcagatcatatccaaacaaatgctgctttcacaagactgacatcttgctttctatggagtcaaaccaggatcaagcggccttactggcccatttaaccaaggaatcatgcagccataattgatgtgcaccattgccaatcccgttgatgttttgcatggagctattcacgaggcgtcaacaatgaaccattattgatttgtccactgttatgttcgttgctggtgcaatcatgggatacattatgttcactgaatctacactcccagttcacactgaacttacccctaaatcttgtggcttccaagattgcagtctagactacggtgatgaatccaataaccaaatatccttggacttttattgtagctttttgtgtgcatttgttccgatacttaacaattaacattatatgacaccatagtttctctaatcacatgtaactccatctagccatctaggtttgtcctaagtcaaacatatcttttaattttgattagaaatatctataaaaaataattgtcttaaataagcagagttatttggttttagtaatgaatttagcaatgccaatgctatttttatcgttctatataaattttagatattcatggtcaaacttaaaaatgtttgacttggacaaatatagatagacctacacatgcattgtgattttaggaagtcctacaattctcctccccaaagtctgctatcaacttctaacagttagtccagttttcatgaacaaatttagttttaatcattctatgttgtgccaaccgccagcaactaataatcagagctgggtcatatcatcatatcatagtagattgtatagctttcttccctgtgcatgcttactggttactagatgaaaaaggtcgtgttacgttatggcgcactcctctcctttgaataggacatgctttcacactctcaattcggcatatccttctagagactagctcacactccaatggtcttctaaatgaatagcacactatagtcaagagtatgacttaccaaattcattattggttccaagcatcttgaaagagaagtccatcgtctctcttactgtcatctcagcatggctaacagaagcacgcaggtactgtggtgttgaataattcatttattatccattgtacatgacttttcctttgaattgttgtcaattgttgtccattagaaaatatatactatagtcgatgataacatatgcgcaaaggttttatcgaataatttttgtgttctcgcaacttacgtgcattgtattatactaatataaagtaggagtttctccaccttcctttcatcatgctacttcttgctgagggtggcgtgaaaaagtcagcaacaagttcctctatggtggcgacagagaagacaagggaggctctggcgacattgtggcgacgacgagaagcgagcaaggatataaatcgatctgtttctttggaaattagctgtagtagaatatttacgtgatacaaatctctattctctatatctctatatctattacgtttctcatgtctctatttttattataatggtttggaaaaatgtcgctcatcttctgctctaatctttcgaaattaggtgtagtggaatattattgccagatattgctacactacaatagtgaaattattgtccaaaattgaagattgccgtatgccttaggtcactataaaatcgagttattttataataatagttttttgttttacataagcccc

SEQ ID NO: 58481 - DNA, 3048 bp, Zea Mays
gaatattagctataacctatgtttgattgtgtatatttgtatacttttattgtgtttcaggaaggacaaaatcatgttgtacaggatcctcccacatatggtgcaccaaagtttgatagaacccccagttagtcatgtcgtgacatgttcttatctctactactaattatgtgcctatcgtaggcgttcacaattccttggttctgtcgtcgcgctcgcctgccatctccctccgcgctccatccgccaccatccgcgctcgcctcccttcgcgcatcctacaaccgcgtgctccttccttcgatggtgcggatcccccgtgactaccatctccctccgccctcccgcgctccatccgccaccatccgcgcttcctacagccgcgcgctccttcgacggcgcggatcccgcaccctcgaatcacgccagcagatcccacaatcaagcagcggcgacaggaataggggcgggctacgcgggcgctactacgacgagggtgagggcgagcgctccggcgccgcggcgccattcatcataatcggtcgagctcctggagggaacggctgcagagcggacgagatcgaggagcgggcgggcgggtgccgcccgtgacggcgcctaggctcaggctccgcgacggccgccacctcgccgcgcaaaggtctcaccggctcccgagaggacagcgcccgcgcctcccaggtttcaaaaaaccttctgagaaggcatgtataaaactttgggcaaaaggagatcttcctacctagcatatcttgcctcggaggagggttgttatattcaatactatgggtttgatggagtcgatggatggagaatggtggatcgaggagaccgatgacatactgctgcatcccgtgctgctcaatgggaagcagtaccggccagtctggtcaaacgacggcaccgtgatccacgcagatttctagttaagtttcttctgatggtgatggtactaaagaggactatgttcatatccgggcaaagcgaggccaagccactaacagccaaagccttgcagaaagactagggagaaagaagataagtgagaggatgaagcttcttcaagatcttgttcctgaatgcagtaagatcattggcaaggcaatcatgctcgatgagattatcaactatgtgcagtcattgcaacgacaagtcgagatcatatccaaacaagtaaagccacccactcgatcaccatatctccctctaggatcaagcggccttactggcccatttaaccaaggaatcatgcagccataattgatgtgcaccattgccaatcccgttgatgttttgcatggagctattcacgaggcgtcaacaatgaaccattattgatttgtccactgttatgttcgttgctggtgcaatcatgggatacattatgttcactgaatctacactcccagttcacactgaacttacccctaaatcttgtggcttccaagattgcagtctagactacggtgatgaatccaataaccaaatatccttggacttttattgtagctttttgtgtgcatttgttccgatacttaacaattaacattatatgacaccatagtttctctaatcacatgtaactccatctagccatctaggtttgtcctaagtcaaacatatcttttaattttgattagaaatatctataaaaaataattgtcttaaataagcagagttatttggttttagtaatgaatttagcaatgccaatgctatttttatcgttctatataaattttagatattcatggtcaaacttaaaaatgtttgacttggacaaatatagatagacctacacatgcattgtgattttaggaagtcctacaattctcctccccaaagtctgctatcaacttctaacagttagtccagttttcatgaacaaatttagttttaatcattctatgttgtgccaaccgccagcaactaataatcagagctgggtcatatcatcatatcatagtagattgtatagctttcttccctgtgcatgcttactggttactagatgaaaaaggtcgtgttacgttatggcgcactcctctcctttgaataggacatgctttcacactctcaattcggcatatccttctagagactagctgtgagttgggtcctaaatgtttcttccatgttcaattcgaatggcattgttgtgttaattagccgtcctgttttgtatttttttcctacaagttatagtggttacattaatgactaaatcaagatcttgacccactttattgatgacacccttttttcttcttattgcttctcctatcgtctctgagtttgtcattccattcaaacacgaaatttgtgtcagtatagatgccatggaaattttggtttagcttgagtattttgtagatacttcattcttgagtattcttgagtttgccttgttataaattgcagcacactccaatggtcttctaaatgaatagcacactatagtcaagagtatgacttaccaaattcattattggttccaagcatcttgaaagagaagtccatcgtctctcttactgtcatctcagcatggctaacagaagcacgcagcgacaagattaccccacatgttgtatcatggtttactagctagagaggctactcaagatgaggaatttgaagttatgtatggtgaggacgatgatgaagacaaagatgacgaggatgatgatgattatgatacaaagaccaagggggctactggagggggaagggcagcagcgaacgacctgttgagtgcaagcaggagtgagtgctgcacattgaatattggcatgcattggttgtggagcaattagtctggttctacttgatgcaaggtcattgagttattgaagtgatattttgtcgaatattttatatgccattgcaaagcacgggcatctaactagtctttcttatatatgtacactacaatacataatcatttatgccattgtttactacaaatatatatattaggcaactcttgaactggttgcaaggaatatttccactaaatctgcagttgct

SEQ ID NO: 58482 - DNA, 3124 bp, Zea Mays
gaatattagctataacctatgtttgattgtgtatatttgtatacttttattgtgtttcaggaaggacaaaatcatgttgtacaggatcctcccacatatggtgcaccaaagtttgatagaacccccagttagtcatgtcgtgacatgttcttatctctactactaattatgtgcctatcgtaggcgttcacaattccttggttctgtcgtcgcgctcgcctgccatctccctccgcgctccatccgccaccatccgcgctcgcctcccttcgcgcatcctacaaccgcgtgctccttccttcgatggtgcggatcccccgtgactaccatctccctccgccctcccgcgctccatccgccaccatccgcgcttcctacagccgcgcgctccttcgacggcgcggatcccgcaccctcgaatcacgccagcagatcccacaatcaagcagcggcgacaggaataggggcgggctacgcgggcgctactacgacgagggtgagggcgagcgctccggcgccgcggcgccattcatcataatcggtcgagctcctggagggaacggctgcagagcggacgagatcgaggagcgggcgggcgggtgccgcccgtgacggcgcctaggctcaggctccgcgacggccgccacctcgccgcgcaaaggtctcaccggctcccgagaggacagcgcccgcgcctcccaggtttcaaaaaaccttctgagaaggcctgttgatattctaaggaaattgtttgatgggaacaccttgagatcacaaatcaaagaattctttaatcgctttggtgctggagaggctgctgcaatgtgcttaatgatagctgcgaagctactttatgttgaagatagtctgataagcaattctgtttctgagaaagccactgaggcatttgaggaccctgggcttgttgggatgcctcaaattgttggtaccactgctttatctaatacacgaacttaggctggaggctttactatgggccaagttgttcaagaagcataacctttgttttctggtgcatatgaagggctttgtttgtgctcgtcaagactactttatctcatatgggagtttcctattatagtgattcgaagaccggctggtactaataaatgcaaggatggtgtaattgtttgtaggctttcagctggggccatgaaaattcttgagagcaagattcattcactggaaacatttttaagatctagaagaaataagagaaggggccacgcagtaccattgacacttaccctcaaggcctacagttgttgtaattgaagcgggtcaagacatagcatttgcaaagatttagttcattctgatcactctgcaatatttcggtagtcgatggatggagaatggtggatcgaggagaccgatgacatactgctgcatcccgtgctgctcaatgggaagcagtaccggccagtctggtcaaacgacggcaccgtgatccacgcagatttctagttaagtttcttctgatggtgatggtactaaagaggactatgttcatatccgggcaaagcgaggccaagccactaacagccaaagccttgcagaaagactagggagaaagaagataagtgagaggatgaagcttcttcaagatcttgttcctgaatgcagtaagtcaaaccaggatcaagcggccttactggcccatttaaccaaggaatcatgcagccataattgatgtgcaccattgccaatcccgttgatgttttgcatggagctattcacgaggcgtcaacaatgaaccattattgatttgtccactgttatgttcgttgctggtgcaatcatgggatacattatgttcactgaatctacactcccagttcacactgaacttacccctaaatcttgtggcttccaagattgcagtctagactacggtgatgaatccaataaccaaatatccttggacttttattgtagctttttgtgtgcatttgttccgatacttaacaattaacattatatgacaccatagtttctctaatcacatgtaactccatctagccatctaggtttgtcctaagtcaaacatatcttttaattttgattagaaatatctataaaaaataattgtcttaaataagcagagttatttggttttagtaatgaatttagcaatgccaatgctatttttatcgttctatataaattttagatattcatggtcaaacttaaaaatgtttgacttggacaaatatagatagacctacacatgcattgtgattttaggaagtcctacaattctcctccccaaagtctgctatcaacttctaacagttagtccagttttcatgaacaaatttagttttaatcattctatgttgtgccaaccgccagcaactaataatcagagctgggtcatatcatcatatcatagtagattgtatagctttcttccctgtgcatgcttactggttactagatgaaaaaggtcgtgttacgttatggcgcactcctctcctttgaataggacatgctttcacactctcaattcggcatatccttctagagactagctcacactccaatggtcttctaaatgaatagcacactatagtcaagagtatgacttaccaaattcattattggttccaagcatcttgaaagagaagtccatcgtctctcttactgtcatctcagcatggctaacagaagcacgcagctagagaggctactcaagatgaggaatttgaagttatgtatggtgaggacgatgatgaagacaaagatgacgaggatgatgatgattatgatacaaagaccaagggggctactggagggggaagggcagcagcgaacgacctgttgagtgcaagcaggagtgagtgctgcacattgaatattggcatgcattggttgtggagcaattagtctggttctacttgatgcaaggtcattgagttattgaagtgatattttgtcgaatattttatatgccattgcaaagcacgggcatctaactagtctttcttatatatgtacactacaatacataatcatttatgccattgtttactacaaatatatatattaggcaactcttgaactggttgcaaggaatatttccactaaatctgcagttgct

SEQ ID NO: 58483 - DNA, 4337 bp, Zea Mays
gaatattagctataacctatgtttgattgtgtatatttgtatacttttattgtgtttcaggaaggacaaaatcatgttgtacaggatcctcccacatatggtgcaccaaagtttgatagaacccccagttagtcatgtcgtgacatgttcttatctctactactaattatgtgcctatcgtaggcgttcacaattccttggttctgtcgtcgcgctcgcctgccatctccctccgcgctccatccgccaccatccgcgctcgcctcccttcgcgcatcctacaaccgcgtgctccttccttcgatggtgcggatcccccgtgactaccatctccctccgccctcccgcgctccatccgccaccatccgcgcttcctacagccgcgcgctccttcgacggcgcggatcccgcaccctcgaatcacgccagcagatcccacaatcaagcagcggcgacaggaataggggcgggctacgcgggcgctactacgacgagggtgagggcgagcgctccggcgccgcggcgccattcatcataatcggtcgagctcctggagggaacggctgcagagcggacgagatcgaggagcgggcgggcgggtgccgcccgtgacggcgcctaggctcaggctccgcgacggccgccacctcgccgcgcaaaggtctcaccggctcccgagaggacagcgcccgcgcctcccaggtttcaaaaaaccttctgagaaggcctgttgatattctaaggaaattgtttgatgggaacaccttgagatcacaaatcaaagaattctttaatcgctttggtgctggagaggctgctgcaatgtgcttaatgatagctgcgaagctactttatgttgaagatagtctgataagcaattctgtttctgagaaagccactgaggcatttgaggaccctgggcttgttgggatgcctcaaattgttggtaccactgctttatctaatacacgaacttaggctggaggctttactatgggccaagttgttcaagaagcataacctttgttttctggtgcatatgaagggctttgtttgtgctcgtcaagactactttatctcatatgggagtttcctattatagtgattcgaagaccggctggtactaataaatgcaaggatggtgtaattgtttgtaggctttcagctggggccatgaaaattcttgagagcaagattcattcactggaaacatttttaagatctagaagaaataagagaaggggccacgcagtaccattgacacttaccctcaaggcctacagttgttgtaattgaagcgggtcaagacatagcatttgcaaagatttagttcattctgatcactctgcaatatttcggtagtcgatggatggagaatggtggatcgaggagaccgatgacatactgctgcatcccgtgctgctcaatgggaagcagtaccggccagtctggtcaaacgacggcaccgtgatccacgcagatttctagttaagtttcttctgatggtgatggtactaaagaggactatgttcatatccgggcaaagcgaggccaagccactaacagccaaagccttgcagaaagactagggagaaagaagataagtgagaggatgaagcttcttcaagatcttgttcctgaatgcagtaagatcattggcaaggcaatcatgctcgatgagattatcaactatgtgcagtcattgcaacgacaagtcgagatcatatccaaacaagtaaagccacccactcgatcaccatatctccctctagtcaaaccaggatcaagcggccttactggcccatttaaccaaggaatcatgcagccataattgatgtgcaccattgccaatcccgttgatgttttgcatggagctattcacgaggcgtcaacaatgaaccattattgatttgtccactgttatgttcgttgctggtgcaatcatgggatacattatgttcactgaatctacactcccagttcacactgaacttacccctaaatcttgtggcttccaagattgcagtctagactacggtgatgaatccaataaccaaatatccttggacttttattgtagctttttgtgtgcatttgttccgatacttaacaattaacattatatgacaccatagtttctctaatcacatgtaactccatctagccatctaggtttgtcctaagtcaaacatatcttttaattttgattagaaatatctataaaaaataattgtcttaaataagcagagttatttggttttagtaatgaatttagcaatgccaatgctatttttatcgttctatataaattttagatattcatggtcaaacttaaaaatgtttgacttggacaaatatagatagacctacacatgcattgtgattttaggaagtcctacaattctcctccccaaagtctgctatcaacttctaacagttagtccagttttcatgaacaaatttagttttaatcattctatgttgtgccaaccgccagcaactaataatcagagctgggtcatatcatcatatcatagtagattgtatagctttcttccctgtgcatgcttactggttactagatgaaaaaggtcgtgttacgttatggcgcactcctctcctttgaataggacatgctttcacactctcaattcggcatatccttctagagactagctgtgagttgggtcctaaatgtttcttccatgttcaattcgaatggcattgttgtgttaattagccgtcctgttttgtatttttttcctacaagttatagtggttacattaatgactaaatcaagatcttgacccactttattgatgacacccttttttcttcttattgcttctcctatcgtctctgagtttgtcattccattcaaacacgaaatttgtgtcagtatagatgccatggaaattttggtttagcttgagtattttgtagatacttcattcttgagtattcttgagtttgccttgttataaattgcagcacactccaatggtcttctaaatgaatagcacactatagtcaagagtatgacttaccaaattcattattggttccaagcatcttgaaagagaagtccatcgtctctcttactgtcatctcagcatggctaacagaagcacgcaggtactgtggtgttgaataattcatttattatccattgtacatgacttttcctttgaattgttgtcaattgttgtccattagaaaatatatactatagtcgatgataacatatgcgcaaaggttttatcgaataatttttgtgttctcgcaacttacgtgcattgtattatactaatataaagtaggagtttctccaccttcctttcatcatgctacttcttgctgagggtggcgtgaaaaagtcagcaacaagttcctctatggtggcgacagagaagacaagggaggctctggcgacattgtggcgacgacgagaagcgagcaaggatataaatcgatctgtttctttggaaattagctgtagtagaatatttacgtgatacaaatctctattctctatatctctatatctattacgtttctcatgtctctatttttattataatggtttggaaaaatgtcgctcatcttctgctctaatctttcgaaattaggtgtagtggaatattattgccagatattgctacactacaatagtgaaattattgtccaaaattgaagattgccgtatgccttaggtcactataaaatcgagttattttataataatagttttttgttttacataagccccactcttttatctaaaagcccataaattattgtccaaaatggaagattaagagtttgtttattacttctaaattatcctttctatatctaccatatgtaccatcagcgacaagattaccccacatgttgtatcatggtttactagctagagaggctactcaagatgaggaatttgaagttatgtatggtgaggacgatgatgaagacaaagatgacgaggatgatgatgattatgatacaaagaccaagggggctactggagggggaagggcagcagcgaacgacctgttgagtgcaagcaggagtgagtgctgcacattgaatattggcatgcattggttgtggagcaattagtctggttctacttgatgcaaggtcattgagttattgaagtgatattttgtcgaatattttatatgccattgcaaagcacgggcatctaactagtctttcttatatatgtacactacaatacataatcatttatgccattgtttactacaaatatatatattaggcaactcttgaactggttgcaaggaatatttccactaaatctgcagttgct

SEQ ID NO: 58484 - DNA, 3238 bp, Zea Mays
gaatattagctataacctatgtttgattgtgtatatttgtatacttttattgtgtttcaggaaggacaaaatcatgttgtacaggatcctcccacatatggtgcaccaaagtttgatagaacccccagttagtcatgtcgtgacatgttcttatctctactactaattatgtgcctatcgtaggcgttcacaattccttggttctgtcgtcgcgctcgcctgccatctccctccgcgctccatccgccaccatccgcgctcgcctcccttcgcgcatcctacaaccgcgtgctccttccttcgatggtgcggatcccccgtgactaccatctccctccgccctcccgcgctccatccgccaccatccgcgcttcctacagccgcgcgctccttcgacggcgcggatcccgcaccctcgaatcacgccagcagatcccacaatcaagcagcggcgacaggaataggggcgggctacgcgggcgctactacgacgagggtgagggcgagcgctccggcgccgcggcgccattcatcataatcggtcgagctcctggagggaacggctgcagagcggacgagatcgaggagcgggcgggcgggtgccgcccgtgacggcgcctaggctcaggctccgcgacggccgccacctcgccgcgcaaaggtctcaccggctcccgagaggacagcgcccgcgcctcccaggtttcaaaaaaccttctgagaaggcctgttgatattctaaggaaattgtttgatgggaacaccttgagatcacaaatcaaagaattctttaatcgctttggtgctggagaggctgctgcaatgtgcttaatgatagctgcgaagctactttatgttgaagatagtctgataagcaattctgtttctgagaaagccactgaggcatttgaggaccctgggcttgttgggatgcctcaaattgttggtaccactgctttatctaatacacgaacttaggctggaggctttactatgggccaagttgttcaagaagcataacctttgttttctggtgcatatgaagggctttgtttgtgctcgtcaagactactttatctcatatgggagtttcctattatagtgattcgaagaccggctggtactaataaatgcaaggatggtgtaattgtttgtaggctttcagctggggccatgaaaattcttgagagcaagattcattcactggaaacatttttaagatctagaagaaataagagaaggggccacgcagtaccattgacacttaccctcaaggcctacagttgttgtaattgaagcgggtcaagacatagcatttgcaaagatttagttcattctgatcactctgcaatatttcggtagtcgatggatggagaatggtggatcgaggagaccgatgacatactgctgcatcccgtgctgctcaatgggaagcagtaccggccagtctggtcaaacgacggcaccgtgatccacgcagatttctagttaagtttcttctgatggtgatggtactaaagaggactatgttcatatccgggcaaagcgaggccaagccactaacagccaaagccttgcagaaagactagggagaaagaagataagtgagaggatgaagcttcttcaagatcttgttcctgaatgcagtaagatcattggcaaggcaatcatgctcgatgagattatcaactatgtgcagtcattgcaacgacaagtcgagatcatatccaaacaagatcaagcggccttactggcccatttaaccaaggaatcatgcagccataattgatgtgcaccattgccaatcccgttgatgttttgcatggagctattcacgaggcgtcaacaatgaaccattattgatttgtccactgttatgttcgttgctggtgcaatcatgggatacattatgttcactgaatctacactcccagttcacactgaacttacccctaaatcttgtggcttccaagattgcagtctagactacggtgatgaatccaataaccaaatatccttggacttttattgtagctttttgtgtgcatttgttccgatacttaacaattaacattatatgacaccatagtttctctaatcacatgtaactccatctagccatctaggtttgtcctaagtcaaacatatcttttaattttgattagaaatatctataaaaaataattgtcttaaataagcagagttatttggttttagtaatgaatttagcaatgccaatgctatttttatcgttctatataaattttagatattcatggtcaaacttaaaaatgtttgacttggacaaatatagatagacctacacatgcattgtgattttaggaagtcctacaattctcctccccaaagtctgctatcaacttctaacagttagtccagttttcatgaacaaatttagttttaatcattctatgttgtgccaaccgccagcaactaataatcagagctgggtcatatcatcatatcatagtagattgtatagctttcttccctgtgcatgcttactggttactagatgaaaaaggtcgtgttacgttatggcgcactcctctcctttgaataggacatgctttcacactctcaattcggcatatccttctagagactagctcacactccaatggtcttctaaatgaatagcacactatagtcaagagtatgacttaccaaattcattattggttccaagcatcttgaaagagaagtccatcgtctctcttactgtcatctcagcatggctaacagaagcacgcagcgacaagattaccccacatgttgtatcatggtttactagctagagaggctactcaagatgaggaatttgaagttatgtatggtgaggacgatgatgaagacaaagatgacgaggatgatgatgattatgatacaaagaccaagggggctactggagggggaagggcagcagcgaacgacctgttgagtgcaagcaggagtgagtgctgcacattgaatattggcatgcattggttgtggagcaattagtctggttctacttgatgcaaggtcattgagttattgaagtgatattttgtcgaatattttatatgccattgcaaagcacgggcatctaactagtctttcttatatatgtacactacaatacataatcatttatgccattgtttactacaaatatatatattaggcaactcttgaactggttgcaaggaatatttccactaaatctgcagttgct

SEQ ID NO: 58485 - DNA, 3589 bp, Zea Mays
gaatattagctataacctatgtttgattgtgtatatttgtatacttttattgtgtttcaggaaggacaaaatcatgttgtacaggatcctcccacatatggtgcaccaaagtttgatagaacccccagttagtcatgtcgtgacatgttcttatctctactactaattatgtgcctatcgtaggcgttcacaattccttggttctgtcgtcgcgctcgcctgccatctccctccgcgctccatccgccaccatccgcgctcgcctcccttcgcgcatcctacaaccgcgtgctccttccttcgatggtgcggatcccccgtgactaccatctccctccgccctcccgcgctccatccgccaccatccgcgcttcctacagccgcgcgctccttcgacggcgcggatcccgcaccctcgaatcacgccagcagatcccacaatcaagcagcggcgacaggaataggggcgggctacgcgggcgctactacgacgagggtgagggcgagcgctccggcgccgcggcgccattcatcataatcggtcgagctcctggagggaacggctgcagagcggacgagatcgaggagcgggcgggcgggtgccgcccgtgacggcgcctaggctcaggctccgcgacggccgccacctcgccgcgcaaaggtctcaccggctcccgagaggacagcgcccgcgcctcccaggtttcaaaaaaccttctgagaaggcctgttgatattctaaggaaattgtttgatgggaacaccttgagatcacaaatcaaagaattctttaatcgctttggtgctggagaggctgctgcaatgtgcttaatgatagctgcgaagctactttatgttgaagatagtctgataagcaattctgtttctgagaaagccactgaggcatttgaggaccctgggcttgttgggatgcctcaaattgttggtaccactgctttatctaatacacgaacttaggctggaggctttactatgggccaagttgttcaagaagcataacctttgttttctggtgcatatgaagggctttgtttgtgctcgtcaagactactttatctcatatgggagtttcctattatagtgattcgaagaccggctggtactaataaatgcaaggatggtgtaattgtttgtaggctttcagctggggccatgaaaattcttgagagcaagattcattcactggaaacatttttaagatctagaagaaataagagaaggggccacgcagtaccattgacacttaccctcaaggcctacagttgttgtaattgaagcgggtcaagacatagcatttgcaaagatttagttcattctgatcactctgcaatatttcggtagtcgatggatggagaatggtggatcgaggagaccgatgacatactgctgcatcccgtgctgctcaatgggaagcagtaccggccagtctggtcaaacgacggcaccgtgatccacgcagatttctagttaagtttcttctgatggtgatggtactaaagaggactatgttcatatccgggcaaagcgaggccaagccactaacagccaaagccttgcagaaagactagggagaaagaagataagtgagaggatgaagcttcttcaagatcttgttcctgaatgcagtaagatcattggcaaggcaatcatgctcgatgagattatcaactatgtgcagtcattgcaacgacaagtcgagatcatatccaaacaagtaaagccacccactcgatcaccatatctccctctaggatcaagcggccttactggcccatttaaccaaggaatcatgcagccataattgatgtgcaccattgccaatcccgttgatgttttgcatggagctattcacgaggcgtcaacaatgaaccattattgatttgtccactgttatgttcgttgctggtgcaatcatgggatacattatgttcactgaatctacactcccagttcacactgaacttacccctaaatcttgtggcttccaagattgcagtctagactacggtgatgaatccaataaccaaatatccttggacttttattgtagctttttgtgtgcatttgttccgatacttaacaattaacattatatgacaccatagtttctctaatcacatgtaactccatctagccatctaggtttgtcctaagtcaaacatatcttttaattttgattagaaatatctataaaaaataattgtcttaaataagcagagttatttggttttagtaatgaatttagcaatgccaatgctatttttatcgttctatataaattttagatattcatggtcaaacttaaaaatgtttgacttggacaaatatagatagacctacacatgcattgtgattttaggaagtcctacaattctcctccccaaagtctgctatcaacttctaacagttagtccagttttcatgaacaaatttagttttaatcattctatgttgtgccaaccgccagcaactaataatcagagctgggtcatatcatcatatcatagtagattgtatagctttcttccctgtgcatgcttactggttactagatgaaaaaggtcgtgttacgttatggcgcactcctctcctttgaataggacatgctttcacactctcaattcggcatatccttctagagactagctgtgagttgggtcctaaatgtttcttccatgttcaattcgaatggcattgttgtgttaattagccgtcctgttttgtatttttttcctacaagttatagtggttacattaatgactaaatcaagatcttgacccactttattgatgacacccttttttcttcttattgcttctcctatcgtctctgagtttgtcattccattcaaacacgaaatttgtgtcagtatagatgccatggaaattttggtttagcttgagtattttgtagatacttcattcttgagtattcttgagtttgccttgttataaattgcagcacactccaatggtcttctaaatgaatagcacactatagtcaagagtatgacttaccaaattcattattggttccaagcatcttgaaagagaagtccatcgtctctcttactgtcatctcagcatggctaacagaagcacgcagcgacaagattaccccacatgttgtatcatggtttactagctagagaggctactcaagatgaggaatttgaagttatgtatggtgaggacgatgatgaagacaaagatgacgaggatgatgatgattatgatacaaagaccaagggggctactggagggggaagggcagcagcgaacgacctgttgagtgcaagcaggagtgagtgctgcacattgaatattggcatgcattggttgtggagcaattagtctggttctacttgatgcaaggtcattgagttattgaagtgatattttgtcgaatattttatatgccattgcaaagcacgggcatctaactagtctttcttatatatgtacactacaatacataatcatttatgccattgtttactacaaatatatatattaggcaactcttgaactggttgcaaggaatatttccactaaatctgcagttgct

SEQ ID NO: 58486 - DNA, 3810 bp, Zea Mays
gaatattagctataacctatgtttgattgtgtatatttgtatacttttattgtgtttcaggaaggacaaaatcatgttgtacaggatcctcccacatatggtgcaccaaagtttgatagaacccccagttagtcatgtcgtgacatgttcttatctctactactaattatgtgcctatcgtaggcgttcacaattccttggttctgtcgtcgcgctcgcctgccatctccctccgcgctccatccgccaccatccgcgctcgcctcccttcgcgcatcctacaaccgcgtgctccttccttcgatggtgcggatcccccgtgactaccatctccctccgccctcccgcgctccatccgccaccatccgcgcttcctacagccgcgcgctccttcgacggcgcggatcccgcaccctcgaatcacgccagcagatcccacaatcaagcagcggcgacaggaataggggcgggctacgcgggcgctactacgacgagggtgagggcgagcgctccggcgccgcggcgccattcatcataatcggtcgagctcctggagggaacggctgcagagcggacgagatcgaggagcgggcgggcgggtgccgcccgtgacggcgcctaggctcaggctccgcgacggccgccacctcgccgcgcaaaggtctcaccggctcccgagaggacagcgcccgcgcctcccaggtttcaaaaaaccttctgagaaggcatgtataaaactttgggcaaaaggagatcttcctacctagcatatcttgcctcggaggagggttgttatattcaatactatgggtttgatggaggctttcagctggggccatgaaaattcttgagagcaagattcattcactggaaacatttttaagatctagaagaaataagagaaggggccacgcagtaccattgacacttaccctcaaggcctacagttgttgtaattgaagcgggtcaagacatagcatttgcaaagatttagttcattctgatcactctgcaatatttcggtagtcgatggatggagaatggtggatcgaggagaccgatgacatactgctgcatcccgtgctgctcaatgggaagcagtaccggccagtctggtcaaacgacggcaccgtgatccacgcagatttctagttaagtttcttctgatggtgatggtactaaagaggactatgttcatatccgggcaaagcgaggccaagccactaacagccaaagccttgcagaaagactagggagaaagaagataagtgagaggatgaagcttcttcaagatcttgttcctgaatgcagtaagatcattggcaaggcaatcatgctcgatgagattatcaactatgtgcagtcattgcaacgacaagtcgagatcatatccaaacaagtaaagccacccactcgatcaccatatctccctctaggatcaagcggccttactggcccatttaaccaaggaatcatgcagccataattgatgtgcaccattgccaatcccgttgatgttttgcatggagctattcacgaggcgtcaacaatgaaccattattgatttgtccactgttatgttcgttgctggtgcaatcatgggatacattatgttcactgaatctacactcccagttcacactgaacttacccctaaatcttgtggcttccaagattgcagtctagactacggtgatgaatccaataaccaaatatccttggacttttattgtagctttttgtgtgcatttgttccgatacttaacaattaacattatatgacaccatagtttctctaatcacatgtaactccatctagccatctaggtttgtcctaagtcaaacatatcttttaattttgattagaaatatctataaaaaataattgtcttaaataagcagagttatttggttttagtaatgaatttagcaatgccaatgctatttttatcgttctatataaattttagatattcatggtcaaacttaaaaatgtttgacttggacaaatatagatagacctacacatgcattgtgattttaggaagtcctacaattctcctccccaaagtctgctatcaacttctaacagttagtccagttttcatgaacaaatttagttttaatcattctatgttgtgccaaccgccagcaactaataatcagagctgggtcatatcatcatatcatagtagattgtatagctttcttccctgtgcatgcttactggttactagatgaaaaaggtcgtgttacgttatggcgcactcctctcctttgaataggacatgctttcacactctcaattcggcatatccttctagagactagctgtgagttgggtcctaaatgtttcttccatgttcaattcgaatggcattgttgtgttaattagccgtcctgttttgtatttttttcctacaagttatagtggttacattaatgactaaatcaagatcttgacccactttattgatgacacccttttttcttcttattgcttctcctatcgtctctgagtttgtcattccattcaaacacgaaatttgtgtcagtatagatgccatggaaattttggtttagcttgagtattttgtagatacttcattcttgagtattcttgagtttgccttgttataaattgcagcacactccaatggtcttctaaatgaatagcacactatagtcaagagtatgacttaccaaattcattattggttccaagcatcttgaaagagaagtccatcgtctctcttactgtcatctcagcatggctaacagaagcacgcagtaggagtttctccaccttcctttcatcatgctacttcttgctgagggtggcgtgaaaaagtcagcaacaagttcctctatggtggcgacagagaagacaagggaggctctggcgacattgtggcgacgacgagaagcgagcaaggatataaatcgatctgtttctttggaaattagctgtagtagaatatttacgtgatacaaatctctattctctatatctctatatctattacgtttctcatgtctctatttttattataatggtttggaaaaatgtcgctcatcttctgctctaatctttcgaaattaggtgtagtggaatattattgccagatattgctacactacaatagtgaaattattgtccaaaattgaagattgccgtatgccttaggtcactataaaatcgagttattttataataatagttttttgttttacataagccccactcttttatctaaaagcccataaattattgtccaaaatggaagattaagagtttgtttattacttctaaattatcctttctatatctaccatatgtaccatcagcgacaagattaccccacatgttgtatcatggtttactagctagagaggctactcaagatgaggaatttgaagttatgtatggtgaggacgatgatgaagacaaagatgacgaggatgatgatgattatgatacaaagaccaagggggctactggagggggaagggcagcagcgaacgacctgttgagtgcaagcaggagtgagtgctgcacattgaatattggcatgcattggttgtggagcaattagtctggttctacttgatgcaaggtcattgagttattgaagtgatattttgtcgaatattttatatgccattgcaaagcacgggcatctaactagtctttcttatatatgtacactacaatacataatcatttatgccattgtttactacaaatatatatattaggcaactcttgaactggttgcaaggaatatttccactaaatctgcagttgct

SEQ ID NO: 58487 - DNA, 4289 bp, Zea Mays
gaatattagctataacctatgtttgattgtgtatatttgtatacttttattgtgtttcaggaaggacaaaatcatgttgtacaggatcctcccacatatggtgcaccaaagtttgatagaacccccagttagtcatgtcgtgacatgttcttatctctactactaattatgtgcctatcgtaggcgttcacaattccttggttctgtcgtcgcgctcgcctgccatctccctccgcgctccatccgccaccatccgcgctcgcctcccttcgcgcatcctacaaccgcgtgctccttccttcgatggtgcggatcccccgtgactaccatctccctccgccctcccgcgctccatccgccaccatccgcgcttcctacagccgcgcgctccttcgacggcgcggatcccgcaccctcgaatcacgccagcagatcccacaatcaagcagcggcgacaggaataggggcgggctacgcgggcgctactacgacgagggtgagggcgagcgctccggcgccgcggcgccattcatcataatcggtcgagctcctggagggaacggctgcagagcggacgagatcgaggagcgggcgggcgggtgccgcccgtgacggcgcctaggctcaggctccgcgacggccgccacctcgccgcgcaaaggtctcaccggctcccgagaggacagcgcccgcgcctcccaggtttcaaaaaaccttctgagaaggcctgttgatattctaaggaaattgtttgatgggaacaccttgagatcacaaatcaaagaattctttaatcgctttggtgctggagaggctgctgcaatgtgcttaatgatagctgcgaagctactttatgttgaagatagtctgataagcaattctgtttctgagaaagccactgaggcatttgaggaccctgggcttgttgggatgcctcaaattgttggtaccactgctttatctaatacacgaacttaggctggaggctttactatgggccaagttgttcaagaagcataacctttgttttctggtgcatatgaagggctttgtttgtgctcgtcaagactactttatctcatatgggagtttcctattatagtgattcgaagaccggctggtactaataaatgcaaggatggtgtaattgtttgtaggctttcagctggggccatgaaaattcttgagagcaagattcattcactggaaacatttttaagatctagaagaaataagagaaggggccacgcagtaccattgacacttaccctcaaggttgttgtaattgaagcgggtcaagacatagcatttgcaaagatttagttcattctgatcactctgcaatatttcggtagtcgatggatggagaatggtggatcgaggagaccgatgacatactgctgcatcccgtgctgctcaatgggaagcagtaccggccagtctggtcaaacgacggcaccgtgatccacgcagatttctagttaagtttcttctgatggtgatggtactaaagaggactatgttcatatccgggcaaagcgaggccaagccactaacagccaaagccttgcagaaagactagggagaaagaagataagtgagaggatgaagcttcttcaagatcttgttcctgaatgcagtaagatcattggcaaggcaatcatgctcgatgagattatcaactatgtgcagtcattgcaacgacaagtcgaggtagtatcatatccaaacaagatcaagcggccttactggcccatttaaccaaggaatcatgcagccataattgatgtgcaccattgccaatcccgttgatgttttgcatggagctattcacgaggcgtcaacaatgaaccattattgatttgtccactgttatgttcgttgctggtgcaatcatgggatacattatgttcactgaatctacactcccagttcacactgaacttacccctaaatcttgtggcttccaagattgcagtctagactacggtgatgaatccaataaccaaatatccttggacttttattgtagctttttgtgtgcatttgttccgatacttaacaattaacattatatgacaccatagtttctctaatcacatgtaactccatctagccatctaggtttgtcctaagtcaaacatatcttttaattttgattagaaatatctataaaaaataattgtcttaaataagcagagttatttggttttagtaatgaatttagcaatgccaatgctatttttatcgttctatataaattttagatattcatggtcaaacttaaaaatgtttgacttggacaaatatagatagacctacacatgcattgtgattttaggaagtcctacaattctcctccccaaagtctgctatcaacttctaacagttagtccagttttcatgaacaaatttagttttaatcattctatgttgtgccaaccgccagcaactaataatcagagctgggtcatatcatcatatcatagtagattgtatagctttcttccctgtgcatgcttactggttactagatgaaaaaggtcgtgttacgttatggcgcactcctctcctttgaataggacatgctttcacactctcaattcggcatatccttctagagactagctgtgagttgggtcctaaatgtttcttccatgttcaattcgaatggcattgttgtgttaattagccgtcctgttttgtatttttttcctacaagttatagtggttacattaatgactaaatcaagatcttgacccactttattgatgacacccttttttcttcttattgcttctcctatcgtctctgagtttgtcattccattcaaacacgaaatttgtgtcagtatagatgccatggaaattttggtttagcttgagtattttgtagatacttcattcttgagtattcttgagtttgccttgttataaattgcagcacactccaatggtcttctaaatgaatagcacactatagtcaagagtatgacttaccaaattcattattggttccaagcatcttgaaagagaagtccatcgtctctcttactgtcatctcagcatggctaacagaagcacgcaggtactgtggtgttgaataattcatttattatccattgtacatgacttttcctttgaattgttgtcaattgttgtccattagaaaatatatactatagtcgatgataacatatgcgcaaaggttttatcgaataatttttgtgttctcgcaacttacgtgcattgtattatactaatataaagtaggagtttctccaccttcctttcatcatgctacttcttgctgagggtggcgtgaaaaagtcagcaacaagttcctctatggtggcgacagagaagacaagggaggctctggcgacattgtggcgacgacgagaagcgagcaaggatataaatcgatctgtttctttggaaattagctgtagtagaatatttacgtgatacaaatctctattctctatatctctatatctattacgtttctcatgtctctatttttattataatggtttggaaaaatgtcgctcatcttctgctctaatctttcgaaattaggtgtagtggaatattattgccagatattgctacactacaatagtgaaattattgtccaaaattgaagattgccgtatgccttaggtcactataaaatcgagttattttataataatagttttttgttttacataagccccactcttttatctaaaagcccataaattattgtccaaaatggaagattaagagtttgtttattacttctaaattatcctttctatatctaccatatgtaccatcagcgacaagattaccccacatgttgtatcatggtttactagctagagaggctactcaagatgaggaatttgaagttatgtatggtgaggacgatgatgaagacaaagatgacgaggatgatgatgattatgatacaaagaccaagggggctactggagggggaagggcagcagcgaacgacctgttgagtgcaagcaggagtgagtgctgcacattgaatattggcatgcattggttgtggagcaattagtctggttctacttgatgcaaggtcattgagttattgaagtgatattttgtcgaatattttatatgccattgcaaagcacgggcatctaactagtctttcttatatatgtacactacaatacataatcatttatgccattgtttactacaaatatatatattaggcaactcttgaactggttgcaaggaatatttccactaaatctgcagttgct

SEQ ID NO: 58488 - DNA, 3012 bp, Zea Mays
gaatattagctataacctatgtttgattgtgtatatttgtatacttttattgtgtttcaggaaggacaaaatcatgttgtacaggatcctcccacatatggtgcaccaaagtttgatagaacccccagttagtcatgtcgtgacatgttcttatctctactactaattatgtgcctatcgtaggcgttcacaattccttggttctgtcgtcgcgctcgcctgccatctccctccgcgctccatccgccaccatccgcgctcgcctcccttcgcgcatcctacaaccgcgtgctccttccttcgatggtgcggatcccccgtgactaccatctccctccgccctcccgcgctccatccgccaccatccgcgcttcctacagccgcgcgctccttcgacggcgcggatcccgcaccctcgaatcacgccagcagatcccacaatcaagcagcggcgacaggaataggggcgggctacgcgggcgctactacgacgagggtgagggcgagcgctccggcgccgcggcgccattcatcataatcggtcgagctcctggagggaacggctgcagagcggacgagatcgaggagcgggcgggcgggtgccgcccgtgacggcgcctaggctcaggctccgcgacggccgccacctcgccgcgcaaaggtctcaccggctcccgagaggacagcgcccgcgcctcccaggtttcaaaaaaccttctgagaaggcatgtataaaactttgggcaaaaggagatcttcctacctagcatatcttgcctcggaggagggttgttatattcaatactatgggtttgatggagtagtcgatggatggagaatggtggatcgaggagaccgatgacatactgctgcatcccgtgctgctcaatgggaagcagtaccggccagtctggtcaaacgacggcaccgtgatccacgcagatttctagttaagtttcttctgatggtgatggtactaaagaggactatgttcatatccgggcaaagcgaggccaagccactaacagccaaagccttgcagaaagactagggagaaagaagataagtgagaggatgaagcttcttcaagatcttgttcctgaatgcagtaagatcattggcaaggcaatcatgctcgatgagattatcaactatgtgcagtcattgcaacgacaagtcgagatcatatccaaacaagtaaagccacccactcgatcaccatatctccctctaggatcaagcggccttactggcccatttaaccaaggaatcatgcagccataattgatgtgcaccattgccaatcccgttgatgttttgcatggagctattcacgaggcgtcaacaatgaaccattattgatttgtccactgttatgttcgttgctggtgcaatcatgggatacattatgttcactgaatctacactcccagttcacactgaacttacccctaaatcttgtggcttccaagattgcagtctagactacggtgatgaatccaataaccaaatatccttggacttttattgtagctttttgtgtgcatttgttccgatacttaacaattaacattatatgacaccatagtttctctaatcacatgtaactccatctagccatctaggtttgtcctaagtcaaacatatcttttaattttgattagaaatatctataaaaaataattgtcttaaataagcagagttatttggttttagtaatgaatttagcaatgccaatgctatttttatcgttctatataaattttagatattcatggtcaaacttaaaaatgtttgacttggacaaatatagatagacctacacatgcattgtgattttaggaagtcctacaattctcctccccaaagtctgctatcaacttctaacagttagtccagttttcatgaacaaatttagttttaatcattctatgttgtgccaaccgccagcaactaataatcagagctgggtcatatcatcatatcatagtagattgtatagctttcttccctgtgcatgcttactggttactagatgaaaaaggtcgtgttacgttatggcgcactcctctcctttgaataggacatgctttcacactctcaattcggcatatccttctagagactagctgtgagttgggtcctaaatgtttcttccatgttcaattcgaatggcattgttgtgttaattagccgtcctgttttgtatttttttcctacaagttatagtggttacattaatgactaaatcaagatcttgacccactttattgatgacacccttttttcttcttattgcttctcctatcgtctctgagtttgtcattccattcaaacacgaaatttgtgtcagtatagatgccatggaaattttggtttagcttgagtattttgtagatacttcattcttgagtattcttgagtttgccttgttataaattgcagcacactccaatggtcttctaaatgaatagcacactatagtcaagagtatgacttaccaaattcattattggttccaagcatcttgaaagagaagtccatcgtctctcttactgtcatctcagcatggctaacagaagcacgcagctagagaggctactcaagatgaggaatttgaagttatgtatggtgaggacgatgatgaagacaaagatgacgaggatgatgatgattatgatacaaagaccaagggggctactggagggggaagggcagcagcgaacgacctgttgagtgcaagcaggagtgagtgctgcacattgaatattggcatgcattggttgtggagcaattagtctggttctacttgatgcaaggtcattgagttattgaagtgatattttgtcgaatattttatatgccattgcaaagcacgggcatctaactagtctttcttatatatgtacactacaatacataatcatttatgccattgtttactacaaatatatatattaggcaactcttgaactggttgcaaggaatatttccactaaatctgcagttgct

SEQ ID NO: 58489 - DNA, 3586 bp, Zea Mays
gaatattagctataacctatgtttgattgtgtatatttgtatacttttattgtgtttcaggaaggacaaaatcatgttgtacaggatcctcccacatatggtgcaccaaagtttgatagaacccccagttagtcatgtcgtgacatgttcttatctctactactaattatgtgcctatcgtaggcgttcacaattccttggttctgtcgtcgcgctcgcctgccatctccctccgcgctccatccgccaccatccgcgctcgcctcccttcgcgcatcctacaaccgcgtgctccttccttcgatggtgcggatcccccgtgactaccatctccctccgccctcccgcgctccatccgccaccatccgcgcttcctacagccgcgcgctccttcgacggcgcggatcccgcaccctcgaatcacgccagcagatcccacaatcaagcagcggcgacaggaataggggcgggctacgcgggcgctactacgacgagggtgagggcgagcgctccggcgccgcggcgccattcatcataatcggtcgagctcctggagggaacggctgcagagcggacgagatcgaggagcgggcgggcgggtgccgcccgtgacggcgcctaggctcaggctccgcgacggccgccacctcgccgcgcaaaggtctcaccggctcccgagaggacagcgcccgcgcctcccaggtttcaaaaaaccttctgagaaggcctgttgatattctaaggaaattgtttgatgggaacaccttgagatcacaaatcaaagaattctttaatcgctttggtgctggagaggctgctgcaatgtgcttaatgatagctgcgaagctactttatgttgaagatagtctgataagcaattctgtttctgagaaagccactgaggcatttgaggaccctgggcttgttgggatgcctcaaattgttggtaccactgctttatctaatacacgaacttaggctggaggctttactatgggccaagttgttcaagaagcataacctttgttttctggtgcatatgaagggctttgtttgtgctcgtcaagactactttatctcatatgggagtttcctattatagtgattcgaagaccggctggtactaataaatgcaaggatggtgtaattgtttgtaggctttcagctggggccatgaaaattcttgagagcaagattcattcactggaaacatttttaagatctagaagaaataagagaaggggccacgcagtaccattgacacttaccctcaaggcctacagttgttgtaattgaagcgggtcaagacatagcatttgcaaagatttagttcattctgatcactctgcaatatttcggtcgatggatggagaatggtggatcgaggagaccgatgacatactgctgcatcccgtgctgctcaatgggaagcagtaccggccagtctggtcaaacgacggcaccgtgatccacgcagatttctagttaagtttcttctgatggtgatggtactaaagaggactatgttcatatccgggcaaagcgaggccaagccactaacagccaaagccttgcagaaagactagggagaaagaagataagtgagaggatgaagcttcttcaagatcttgttcctgaatgcagtaagatcattggcaaggcaatcatgctcgatgagattatcaactatgtgcagtcattgcaacgacaagtcgagatcatatccaaacaagtaaagccacccactcgatcaccatatctccctctaggatcaagcggccttactggcccatttaaccaaggaatcatgcagccataattgatgtgcaccattgccaatcccgttgatgttttgcatggagctattcacgaggcgtcaacaatgaaccattattgatttgtccactgttatgttcgttgctggtgcaatcatgggatacattatgttcactgaatctacactcccagttcacactgaacttacccctaaatcttgtggcttccaagattgcagtctagactacggtgatgaatccaataaccaaatatccttggacttttattgtagctttttgtgtgcatttgttccgatacttaacaattaacattatatgacaccatagtttctctaatcacatgtaactccatctagccatctaggtttgtcctaagtcaaacatatcttttaattttgattagaaatatctataaaaaataattgtcttaaataagcagagttatttggttttagtaatgaatttagcaatgccaatgctatttttatcgttctatataaattttagatattcatggtcaaacttaaaaatgtttgacttggacaaatatagatagacctacacatgcattgtgattttaggaagtcctacaattctcctccccaaagtctgctatcaacttctaacagttagtccagttttcatgaacaaatttagttttaatcattctatgttgtgccaaccgccagcaactaataatcagagctgggtcatatcatcatatcatagtagattgtatagctttcttccctgtgcatgcttactggttactagatgaaaaaggtcgtgttacgttatggcgcactcctctcctttgaataggacatgctttcacactctcaattcggcatatccttctagagactagctgtgagttgggtcctaaatgtttcttccatgttcaattcgaatggcattgttgtgttaattagccgtcctgttttgtatttttttcctacaagttatagtggttacattaatgactaaatcaagatcttgacccactttattgatgacacccttttttcttcttattgcttctcctatcgtctctgagtttgtcattccattcaaacacgaaatttgtgtcagtatagatgccatggaaattttggtttagcttgagtattttgtagatacttcattcttgagtattcttgagtttgccttgttataaattgcagcacactccaatggtcttctaaatgaatagcacactatagtcaagagtatgacttaccaaattcattattggttccaagcatcttgaaagagaagtccatcgtctctcttactgtcatctcagcatggctaacagaagcacgcagcgacaagattaccccacatgttgtatcatggtttactagctagagaggctactcaagatgaggaatttgaagttatgtatggtgaggacgatgatgaagacaaagatgacgaggatgatgatgattatgatacaaagaccaagggggctactggagggggaagggcagcagcgaacgacctgttgagtgcaagcaggagtgagtgctgcacattgaatattggcatgcattggttgtggagcaattagtctggttctacttgatgcaaggtcattgagttattgaagtgatattttgtcgaatattttatatgccattgcaaagcacgggcatctaactagtctttcttatatatgtacactacaatacataatcatttatgccattgtttactacaaatatatatattaggcaactcttgaactggttgcaaggaatatttccactaaatctgcagttgct

SEQ ID NO: 58490 - DNA, 4234 bp, Zea Mays
gaatattagctataacctatgtttgattgtgtatatttgtatacttttattgtgtttcaggaaggacaaaatcatgttgtacaggatcctcccacatatggtgcaccaaagtttgatagaacccccagttagtcatgtcgtgacatgttcttatctctactactaattatgtgcctatcgtaggcgttcacaattccttggttctgtcgtcgcgctcgcctgccatctccctccgcgctccatccgccaccatccgcgctcgcctcccttcgcgcatcctacaaccgcgtgctccttccttcgatggtgcggatcccccgtgactaccatctccctccgccctcccgcgctccatccgccaccatccgcgcttcctacagccgcgcgctccttcgacggcgcggatcccgcaccctcgaatcacgccagcagatcccacaatcaagcagcggcgacaggaataggggcgggctacgcgggcgctactacgacgagggtgagggcgagcgctccggcgccgcggcgccattcatcataatcggtcgagctcctggagggaacggctgcagagcggacgagatcgaggagcgggcgggcgggtgccgcccgtgacggcgcctaggctcaggctccgcgacggccgccacctcgccgcgcaaaggtctcaccggctcccgagaggacagcgcccgcgcctcccaggtttcaaaaaaccttctgagaaggcctgttgatattctaaggaaattgtttgatgggaacaccttgagatcacaaatcaaagaattctttaatcgctttggtgctggagaggctgctgcaatgtgcttaatgatagctgcgaagctactttatgttgaagatagtctgataagcaattctgtttctgagaaagccactgaggcatttgaggaccctgggcttgttgggatgcctcaaattgttggtaccactgctttatctaatacacgaacttaggctggaggctttactatgggccaagttgttcaagaagcataacctttgttttctggtgcatatgaagggctttgtttgtgctcgtcaagactactttatctcatatgggagtttcctattatagtgattcgaagaccggctggtactaataaatgcaaggatggtgtaattgtttgtaggctttcagctggggccatgaaaattcttgagagcaagattcattcactggaaacatttttaagatctagaagaaataagagaaggggccacgcagtaccattgacacttaccctcaaggcctacagttgttgtaattgaagcgggtcaagacatagcatttgcaaagatttagttcattctgatcactctgcaatatttcggtagtcgatggatggagaatggtggatcgaggagaccgatgacatactgctgcatcccgtgctgctcaatgggaagcagtaccggccagtctggtcaaacgacggcaccgtgatccacgcagatttctagttaagtttcttctgatggtgatggtactaaagaggactatgttcatatccgggcaaagcgaggccaagccactaacagccaaagccttgcagaaagactagggagaaagaagataagtgagaggatgaagcttcttcaagatcttgttcctgaatgcagtaagatcattggcaaggcaatcatgctcgatgagattatcaactatgtgcagtcattgcaacgacaagtcgaggtagtgttagtgcatctgtagctgaattgttttgtaatatatgtggcatcttgttagtgcatctgcagttcttgtcaatgaaactcgcaactgttaaccccgagcttggctttgacattgagcagatcatatccaaacaagatcaagcggccttactggcccatttaaccaaggaatcatgcagccataattgatgtgcaccattgccaatcccgttgatgttttgcatggagctattcacgaggcgtcaacaatgaaccattattgatttgtccactgttatgttcgttgctggtgcaatcatgggatacattatgttcactgaatctacactcccagttcacactgaacttacccctaaatcttgtggcttccaagattgcagtctagactacggtgatgaatccaataaccaaatatccttggacttttattgtagctttttgtgtgcatttgttccgatacttaacaattaacattatatgacaccatagtttctctaatcacatgtaactccatctagccatctaggtttgtcctaagtcaaacatatcttttaattttgattagaaatatctataaaaaataattgtcttaaataagcagagttatttggttttagtaatgaatttagcaatgccaatgctatttttatcgttctatataaattttagatattcatggtcaaacttaaaaatgtttgacttggacaaatatagatagacctacacatgcattgtgattttaggaagtcctacaattctcctccccaaagtctgctatcaacttctaacagttagtccagttttcatgaacaaatttagttttaatcattctatgttgtgccaaccgccagcaactaataatcagagctgggtcatatcatcatatcatagtagattgtatagctttcttccctgtgcatgcttactggttactagatgaaaaaggtcgtgttacgttatggcgcactcctctcctttgaataggacatgctttcacactctcaattcggcatatccttctagagactagctgtgagttgggtcctaaatgtttcttccatgttcaattcgaatggcattgttgtgttaattagccgtcctgttttgtatttttttcctacaagttatagtggttacattaatgactaaatcaagatcttgacccactttattgatgacacccttttttcttcttattgcttctcctatcgtctctgagtttgtcattccattcaaacacgaaatttgtgtcagtatagatgccatggaaattttggtttagcttgagtattttgtagatacttcattcttgagtattcttgagtttgccttgttataaattgcagcacactccaatggtcttctaaatgaatagcacactatagtcaagagtatgacttaccaaattcattattggttccaagcatcttgaaagagaagtccatcgtctctcttactgtcatctcagcatggctaacagaagcacgcagtaggagtttctccaccttcctttcatcatgctacttcttgctgagggtggcgtgaaaaagtcagcaacaagttcctctatggtggcgacagagaagacaagggaggctctggcgacattgtggcgacgacgagaagcgagcaaggatataaatcgatctgtttctttggaaattagctgtagtagaatatttacgtgatacaaatctctattctctatatctctatatctattacgtttctcatgtctctatttttattataatggtttggaaaaatgtcgctcatcttctgctctaatctttcgaaattaggtgtagtggaatattattgccagatattgctacactacaatagtgaaattattgtccaaaattgaagattgccgtatgccttaggtcactataaaatcgagttattttataataatagttttttgttttacataagccccactcttttatctaaaagcccataaattattgtccaaaatggaagattaagagtttgtttattacttctaaattatcctttctatatctaccatatgtaccatcagcgacaagattaccccacatgttgtatcatggtttactagctagagaggctactcaagatgaggaatttgaagttatgtatggtgaggacgatgatgaagacaaagatgacgaggatgatgatgattatgatacaaagaccaagggggctactggagggggaagggcagcagcgaacgacctgttgagtgcaagcaggagtgagtgctgcacattgaatattggcatgcattggttgtggagcaattagtctggttctacttgatgcaaggtcattgagttattgaagtgatattttgtcgaatattttatatgccattgcaaagcacgggcatctaactagtctttcttatatatgtacactacaatacataatcatttatgccattgtttactacaaatatatatattaggcaactcttgaactggttgcaaggaatatttccactaaatctgcagttgct

SEQ ID NO: 58491 - DNA, 3246 bp, Zea Mays
gaatattagctataacctatgtttgattgtgtatatttgtatacttttattgtgtttcaggaaggacaaaatcatgttgtacaggatcctcccacatatggtgcaccaaagtttgatagaacccccagttagtcatgtcgtgacatgttcttatctctactactaattatgtgcctatcgtaggcgttcacaattccttggttctgtcgtcgcgctcgcctgccatctccctccgcgctccatccgccaccatccgcgctcgcctcccttcgcgcatcctacaaccgcgtgctccttccttcgatggtgcggatcccccgtgactaccatctccctccgccctcccgcgctccatccgccaccatccgcgcttcctacagccgcgcgctccttcgacggcgcggatcccgcaccctcgaatcacgccagcagatcccacaatcaagcagcggcgacaggaataggggcgggctacgcgggcgctactacgacgagggtgagggcgagcgctccggcgccgcggcgccattcatcataatcggtcgagctcctggagggaacggctgcagagcggacgagatcgaggagcgggcgggcgggtgccgcccgtgacggcgcctaggctcaggctccgcgacggccgccacctcgccgcgcaaaggtctcaccggctcccgagaggacagcgcccgcgcctcccaggtttcaaaaaaccttctgagaaggcatgtataaaactttgggcaaaaggagatcttcctacctagcatatcttgcctcggaggagggttgttatattcaatactatgggtttgatggaggctttcagctggggccatgaaaattcttgagagcaagattcattcactggaaacatttttaagatctagaagaaataagagaaggggccacgcagtaccattgacacttaccctcaaggttgttgtaattgaagcgggtcaagacatagcatttgcaaagatttagttcattctgatcactctgcaatatttcggtagtcgatggatggagaatggtggatcgaggagaccgatgacatactgctgcatcccgtgctgctcaatgggaagcagtaccggccagtctggtcaaacgacggcaccgtgatccacgcagatttctagttaagtttcttctgatggtgatggtactaaagaggactatgttcatatccgggcaaagcgaggccaagccactaacagccaaagccttgcagaaagactagggagaaagaagataagtgagaggatgaagcttcttcaagatcttgttcctgaatgcagtaagatcattggcaaggcaatcatgctcgatgagattatcaactatgtgcagtcattgcaacgacaagtcgagatcatatccaaacaagtaaagccacccactcgatcaccatatctccctctaggatcaagcggccttactggcccatttaaccaaggaatcatgcagccataattgatgtgcaccattgccaatcccgttgatgttttgcatggagctattcacgaggcgtcaacaatgaaccattattgatttgtccactgttatgttcgttgctggtgcaatcatgggatacattatgttcactgaatctacactcccagttcacactgaacttacccctaaatcttgtggcttccaagattgcagtctagactacggtgatgaatccaataaccaaatatccttggacttttattgtagctttttgtgtgcatttgttccgatacttaacaattaacattatatgacaccatagtttctctaatcacatgtaactccatctagccatctaggtttgtcctaagtcaaacatatcttttaattttgattagaaatatctataaaaaataattgtcttaaataagcagagttatttggttttagtaatgaatttagcaatgccaatgctatttttatcgttctatataaattttagatattcatggtcaaacttaaaaatgtttgacttggacaaatatagatagacctacacatgcattgtgattttaggaagtcctacaattctcctccccaaagtctgctatcaacttctaacagttagtccagttttcatgaacaaatttagttttaatcattctatgttgtgccaaccgccagcaactaataatcagagctgggtcatatcatcatatcatagtagattgtatagctttcttccctgtgcatgcttactggttactagatgaaaaaggtcgtgttacgttatggcgcactcctctcctttgaataggacatgctttcacactctcaattcggcatatccttctagagactagctgtgagttgggtcctaaatgtttcttccatgttcaattcgaatggcattgttgtgttaattagccgtcctgttttgtatttttttcctacaagttatagtggttacattaatgactaaatcaagatcttgacccactttattgatgacacccttttttcttcttattgcttctcctatcgtctctgagtttgtcattccattcaaacacgaaatttgtgtcagtatagatgccatggaaattttggtttagcttgagtattttgtagatacttcattcttgagtattcttgagtttgccttgttataaattgcagcacactccaatggtcttctaaatgaatagcacactatagtcaagagtatgacttaccaaattcattattggttccaagcatcttgaaagagaagtccatcgtctctcttactgtcatctcagcatggctaacagaagcacgcagcgacaagattaccccacatgttgtatcatggtttactagctagagaggctactcaagatgaggaatttgaagttatgtatggtgaggacgatgatgaagacaaagatgacgaggatgatgatgattatgatacaaagaccaagggggctactggagggggaagggcagcagcgaacgacctgttgagtgcaagcaggagtgagtgctgcacattgaatattggcatgcattggttgtggagcaattagtctggttctacttgatgcaaggtcattgagttattgaagtgatattttgtcgaatattttatatgccattgcaaagcacgggcatctaactagtctttcttatatatgtacactacaatacataatcatttatgccattgtttactacaaatatatatattaggcaactcttgaactggttgcaaggaatatttccactaaatctgcagttgct

SEQ ID NO: 58492 - DNA, 4428 bp, Zea Mays
gaatattagctataacctatgtttgattgtgtatatttgtatacttttattgtgtttcaggaaggacaaaatcatgttgtacaggatcctcccacatatggtgcaccaaagtttgatagaacccccagttagtcatgtcgtgacatgttcttatctctactactaattatgtgcctatcgtaggcgttcacaattccttggttctgtcgtcgcgctcgcctgccatctccctccgcgctccatccgccaccatccgcgctcgcctcccttcgcgcatcctacaaccgcgtgctccttccttcgatggtgcggatcccccgtgactaccatctccctccgccctcccgcgctccatccgccaccatccgcgcttcctacagccgcgcgctccttcgacggcgcggatcccgcaccctcgaatcacgccagcagatcccacaatcaagcagcggcgacaggaataggggcgggctacgcgggcgctactacgacgagggtgagggcgagcgctccggcgccgcggcgccattcatcataatcggtcgagctcctggagggaacggctgcagagcggacgagatcgaggagcgggcgggcgggtgccgcccgtgacggcgcctaggctcaggctccgcgacggccgccacctcgccgcgcaaaggtctcaccggctcccgagaggacagcgcccgcgcctcccaggtttcaaaaaaccttctgagaaggcatgtataaaactttgggcaaaaggagatcttcctacctagcatatcttgcctcggaggagggttgttatattcaatactatgggtttgatggaggtaatttttaacaggcctgttgatattctaaggaaattgtttgatgggaacaccttgagatcacaaatcaaagaattctttaatcgctttggtgctggagaggctgctgcaatgtgcttaatgatagctgcgaagctactttatgttgaagatagtctgataagcaattctgtttctgagaaagccactgaggcatttgaggaccctgggcttgttgggatgcctcaaattgttggtaccactgctttatctaatacacgaacttaggctggaggctttactatgggccaagttgttcaagaagcataacctttgttttctggtgcatatgaagggctttgtttgtgctcgtcaagactactttatctcatatgggagtttcctattatagtgattcgaagaccggctggtactaataaatgcaaggatggtgtaattgtttgtaggctttcagctggggccatgaaaattcttgagagcaagattcattcactggaaacatttttaagatctagaagaaataagagaaggggccacgcagtaccattgacacttaccctcaaggttgttgtaattgaagcgggtcaagacatagcatttgcaaagatttagttcattctgatcactctgcaatatttcggtcgatggatggagaatggtggatcgaggagaccgatgacatactgctgcatcccgtgctgctcaatgggaagcagtaccggccagtctggtcaaacgacggcaccgtgatccacgcagatttctagttaagtttcttctgatggtgatggtactaaagaggactatgttcatatccgggcaaagcgaggccaagccactaacagccaaagccttgcagaaagactagggagaaagaagataagtgagaggatgaagcttcttcaagatcttgttcctgaatgcagtaagatcattggcaaggcaatcatgctcgatgagattatcaactatgtgcagtcattgcaacgacaagtcgagatcatatccaaacaagtaaagccacccactcgatcaccatatctccctctaggatcaagcggccttactggcccatttaaccaaggaatcatgcagccataattgatgtgcaccattgccaatcccgttgatgttttgcatggagctattcacgaggcgtcaacaatgaaccattattgatttgtccactgttatgttcgttgctggtgcaatcatgggatacattatgttcactgaatctacactcccagttcacactgaacttacccctaaatcttgtggcttccaagattgcagtctagactacggtgatgaatccaataaccaaatatccttggacttttattgtagctttttgtgtgcatttgttccgatacttaacaattaacattatatgacaccatagtttctctaatcacatgtaactccatctagccatctaggtttgtcctaagtcaaacatatcttttaattttgattagaaatatctataaaaaataattgtcttaaataagcagagttatttggttttagtaatgaatttagcaatgccaatgctatttttatcgttctatataaattttagatattcatggtcaaacttaaaaatgtttgacttggacaaatatagatagacctacacatgcattgtgattttaggaagtcctacaattctcctccccaaagtctgctatcaacttctaacagttagtccagttttcatgaacaaatttagttttaatcattctatgttgtgccaaccgccagcaactaataatcagagctgggtcatatcatcatatcatagtagattgtatagctttcttccctgtgcatgcttactggttactagatgaaaaaggtcgtgttacgttatggcgcactcctctcctttgaataggacatgctttcacactctcaattcggcatatccttctagagactagctgtgagttgggtcctaaatgtttcttccatgttcaattcgaatggcattgttgtgttaattagccgtcctgttttgtatttttttcctacaagttatagtggttacattaatgactaaatcaagatcttgacccactttattgatgacacccttttttcttcttattgcttctcctatcgtctctgagtttgtcattccattcaaacacgaaatttgtgtcagtatagatgccatggaaattttggtttagcttgagtattttgtagatacttcattcttgagtattcttgagtttgccttgttataaattgcagcacactccaatggtcttctaaatgaatagcacactatagtcaagagtatgacttaccaaattcattattggttccaagcatcttgaaagagaagtccatcgtctctcttactgtcatctcagcatggctaacagaagcacgcaggtactgtggtgttgaataattcatttattatccattgtacatgacttttcctttgaattgttgtcaattgttgtccattagaaaatatatactatagtcgatgataacatatgcgcaaaggttttatcgaataatttttgtgttctcgcaacttacgtgcattgtattatactaatataaagtaggagtttctccaccttcctttcatcatgctacttcttgctgagggtggcgtgaaaaagtcagcaacaagttcctctatggtggcgacagagaagacaagggaggctctggcgacattgtggcgacgacgagaagcgagcaaggatataaatcgatctgtttctttggaaattagctgtagtagaatatttacgtgatacaaatctctattctctatatctctatatctattacgtttctcatgtctctatttttattataatggtttggaaaaatgtcgctcatcttctgctctaatctttcgaaattaggtgtagtggaatattattgccagatattgctacactacaatagtgaaattattgtccaaaattgaagattgccgtatgccttaggtcactataaaatcgagttattttataataatagttttttgttttacataagccccactcttttatctaaaagcccataaattattgtccaaaatggaagattaagagtttgtttattacttctaaattatcctttctatatctaccatatgtaccatcagcgacaagattaccccacatgttgtatcatggtttactagctagagaggctactcaagatgaggaatttgaagttatgtatggtgaggacgatgatgaagacaaagatgacgaggatgatgatgattatgatacaaagaccaagggggctactggagggggaagggcagcagcgaacgacctgttgagtgcaagcaggagtgagtgctgcacattgaatattggcatgcattggttgtggagcaattagtctggttctacttgatgcaaggtcattgagttattgaagtgatattttgtcgaatattttatatgccattgcaaagcacgggcatctaactagtctttcttatatatgtacactacaatacataatcatttatgccattgtttactacaaatatatatattaggcaactcttgaactggttgcaaggaatatttccactaaatctgcagttgct

SEQ ID NO: 58493 - DNA, 3691 bp, Zea Mays
gaatattagctataacctatgtttgattgtgtatatttgtatacttttattgtgtttcaggaaggacaaaatcatgttgtacaggatcctcccacatatggtgcaccaaagtttgatagaacccccagttagtcatgtcgtgacatgttcttatctctactactaattatgtgcctatcgtaggcgttcacaattccttggttctgtcgtcgcgctcgcctgccatctccctccgcgctccatccgccaccatccgcgctcgcctcccttcgcgcatcctacaaccgcgtgctccttccttcgatggtgcggatcccccgtgactaccatctccctccgccctcccgcgctccatccgccaccatccgcgcttcctacagccgcgcgctccttcgacggcgcggatcccgcaccctcgaatcacgccagcagatcccacaatcaagcagcggcgacaggaataggggcgggctacgcgggcgctactacgacgagggtgagggcgagcgctccggcgccgcggcgccattcatcataatcggtcgagctcctggagggaacggctgcagagcggacgagatcgaggagcgggcgggcgggtgccgcccgtgacggcgcctaggctcaggctccgcgacggccgccacctcgccgcgcaaaggtctcaccggctcccgagaggacagcgcccgcgcctcccaggtttcaaaaaaccttctgagaaggcatgtataaaactttgggcaaaaggagatcttcctacctagcatatcttgcctcggaggagggttgttatattcaatactatgggtttgatggagcctacagttgttgtaattgaagcgggtcaagacatagcatttgcaaagatttagttcattctgatcactctgcaatatttcggtagtcgatggatggagaatggtggatcgaggagaccgatgacatactgctgcatcccgtgctgctcaatgggaagcagtaccggccagtctggtcaaacgacggcaccgtgatccacgcagatttctagttaagtttcttctgatggtgatggtactaaagaggactatgttcatatccgggcaaagcgaggccaagccactaacagccaaagccttgcagaaagactagggagaaagaagataagtgagaggatgaagcttcttcaagatcttgttcctgaatgcagtaagatcattggcaaggcaatcatgctcgatgagattatcaactatgtgcagtcattgcaacgacaagtcgagatcatatccaaacaagtaaagccacccactcgatcaccatatctccctctaggatcaagcggccttactggcccatttaaccaaggaatcatgcagccataattgatgtgcaccattgccaatcccgttgatgttttgcatggagctattcacgaggcgtcaacaatgaaccattattgatttgtccactgttatgttcgttgctggtgcaatcatgggatacattatgttcactgaatctacactcccagttcacactgaacttacccctaaatcttgtggcttccaagattgcagtctagactacggtgatgaatccaataaccaaatatccttggacttttattgtagctttttgtgtgcatttgttccgatacttaacaattaacattatatgacaccatagtttctctaatcacatgtaactccatctagccatctaggtttgtcctaagtcaaacatatcttttaattttgattagaaatatctataaaaaataattgtcttaaataagcagagttatttggttttagtaatgaatttagcaatgccaatgctatttttatcgttctatataaattttagatattcatggtcaaacttaaaaatgtttgacttggacaaatatagatagacctacacatgcattgtgattttaggaagtcctacaattctcctccccaaagtctgctatcaacttctaacagttagtccagttttcatgaacaaatttagttttaatcattctatgttgtgccaaccgccagcaactaataatcagagctgggtcatatcatcatatcatagtagattgtatagctttcttccctgtgcatgcttactggttactagatgaaaaaggtcgtgttacgttatggcgcactcctctcctttgaataggacatgctttcacactctcaattcggcatatccttctagagactagctgtgagttgggtcctaaatgtttcttccatgttcaattcgaatggcattgttgtgttaattagccgtcctgttttgtatttttttcctacaagttatagtggttacattaatgactaaatcaagatcttgacccactttattgatgacacccttttttcttcttattgcttctcctatcgtctctgagtttgtcattccattcaaacacgaaatttgtgtcagtatagatgccatggaaattttggtttagcttgagtattttgtagatacttcattcttgagtattcttgagtttgccttgttataaattgcagcacactccaatggtcttctaaatgaatagcacactatagtcaagagtatgacttaccaaattcattattggttccaagcatcttgaaagagaagtccatcgtctctcttactgtcatctcagcatggctaacagaagcacgcagtaggagtttctccaccttcctttcatcatgctacttcttgctgagggtggcgtgaaaaagtcagcaacaagttcctctatggtggcgacagagaagacaagggaggctctggcgacattgtggcgacgacgagaagcgagcaaggatataaatcgatctgtttctttggaaattagctgtagtagaatatttacgtgatacaaatctctattctctatatctctatatctattacgtttctcatgtctctatttttattataatggtttggaaaaatgtcgctcatcttctgctctaatctttcgaaattaggtgtagtggaatattattgccagatattgctacactacaatagtgaaattattgtccaaaattgaagattgccgtatgccttaggtcactataaaatcgagttattttataataatagttttttgttttacataagccccactcttttatctaaaagcccataaattattgtccaaaatggaagattaagagtttgtttattacttctaaattatcctttctatatctaccatatgtaccatcagcgacaagattaccccacatgttgtatcatggtttactagctagagaggctactcaagatgaggaatttgaagttatgtatggtgaggacgatgatgaagacaaagatgacgaggatgatgatgattatgatacaaagaccaagggggctactggagggggaagggcagcagcgaacgacctgttgagtgcaagcaggagtgagtgctgcacattgaatattggcatgcattggttgtggagcaattagtctggttctacttgatgcaaggtcattgagttattgaagtgatattttgtcgaatattttatatgccattgcaaagcacgggcatctaactagtctttcttatatatgtacactacaatacataatcatttatgccattgtttactacaaatatatatattaggcaactcttgaactggttgcaaggaatatttccactaaatctgcagttgct

SEQ ID NO: 58494 - DNA, 2911 bp, Zea Mays
gaatattagctataacctatgtttgattgtgtatatttgtatacttttattgtgtttcaggaaggacaaaatcatgttgtacaggatcctcccacatatggtgcaccaaagtttgatagaacccccagttagtcatgtcgtgacatgttcttatctctactactaattatgtgcctatcgtaggcgttcacaattccttggttctgtcgtcgcgctcgcctgccatctccctccgcgctccatccgccaccatccgcgctcgcctcccttcgcgcatcctacaaccgcgtgctccttccttcgatggtgcggatcccccgtgactaccatctccctccgccctcccgcgctccatccgccaccatccgcgcttcctacagccgcgcgctccttcgacggcgcggatcccgcaccctcgaatcacgccagcagatcccacaatcaagcagcggcgacaggaataggggcgggctacgcgggcgctactacgacgagggtgagggcgagcgctccggcgccgcggcgccattcatcataatcggtcgagctcctggagggaacggctgcagagcggacgagatcgaggagcgggcgggcgggtgccgcccgtgacggcgcctaggctcaggctccgcgacggccgccacctcgccgcgcaaaggtctcaccggctcccgagaggacagcgcccgcgcctcccaggtttcaaaaaaccttctgagaaggcatgtataaaactttgggcaaaaggagatcttcctacctagcatatcttgcctcggaggagggttgttatattcaatactatgggtttgatggagttgttgtaattgaagcgggtcaagacatagcatttgcaaagatttagttcattctgatcactctgcaatatttcggtagtcgatggatggagaatggtggatcgaggagaccgatgacatactgctgcatcccgtgctgctcaatgggaagcagtaccggccagtctggtcaaacgacggcaccgtgatccacgcagatttctagttaagtttcttctgatggtgatggtactaaagaggactatgttcatatccgggcaaagcgaggccaagccactaacagccaaagccttgcagaaagactagggagaaagaagataagtgagaggatgaagcttcttcaagatcttgttcctgaatgcagtaagatcattggcaaggcaatcatgctcgatgagattatcaactatgtgcagtcattgcaacgacaagtcgaggtagtgttagtgcatctgtagctgaattgttttgtaatatatgtggcatcttgttagtgcatctgcagttcttgtcaatgaaactcgcaactgttaaccccgagcttggctttgacattgagcagatcatatccaaacaaatgctgctttcacaagactgacatcttgctttctatggagtcaaaccaggatcaagcggccttactggcccatttaaccaaggaatcatgcagccataattgatgtgcaccattgccaatcccgttgatgttttgcatggagctattcacgaggcgtcaacaatgaaccattattgatttgtccactgttatgttcgttgctggtgcaatcatgggatacattatgttcactgaatctacactcccagttcacactgaacttacccctaaatcttgtggcttccaagattgcagtctagactacggtgatgaatccaataaccaaatatccttggacttttattgtagctttttgtgtgcatttgttccgatacttaacaattaacattatatgacaccatagtttctctaatcacatgtaactccatctagccatctaggtttgtcctaagtcaaacatatcttttaattttgattagaaatatctataaaaaataattgtcttaaataagcagagttatttggttttagtaatgaatttagcaatgccaatgctatttttatcgttctatataaattttagatattcatggtcaaacttaaaaatgtttgacttggacaaatatagatagacctacacatgcattgtgattttaggaagtcctacaattctcctccccaaagtctgctatcaacttctaacagttagtccagttttcatgaacaaatttagttttaatcattctatgttgtgccaaccgccagcaactaataatcagagctgggtcatatcatcatatcatagtagattgtatagctttcttccctgtgcatgcttactggttactagatgaaaaaggtcgtgttacgttatggcgcactcctctcctttgaataggacatgctttcacactctcaattcggcatatccttctagagactagctcacactccaatggtcttctaaatgaatagcacactatagtcaagagtatgacttaccaaattcattattggttccaagcatcttgaaagagaagtccatcgtctctcttactgtcatctcagcatggctaacagaagcacgcagctagagaggctactcaagatgaggaatttgaagttatgtatggtgaggacgatgatgaagacaaagatgacgaggatgatgatgattatgatacaaagaccaagggggctactggagggggaagggcagcagcgaacgacctgttgagtgcaagcaggagtgagtgctgcacattgaatattggcatgcattggttgtggagcaattagtctggttctacttgatgcaaggtcattgagttattgaagtgatattttgtcgaatattttatatgccattgcaaagcacgggcatctaactagtctttcttatatatgtacactacaatacataatcatttatgccattgtttactacaaatatatatattaggcaactcttgaactggttgcaaggaatatttccactaaatctgcagttgct

SEQ ID NO: 58495 - DNA, 2689 bp, Zea Mays
gaatattagctataacctatgtttgattgtgtatatttgtatacttttattgtgtttcaggaaggacaaaatcatgttgtacaggatcctcccacatatggtgcaccaaagtttgatagaacccccagttagtcatgtcgtgacatgttcttatctctactactaattatgtgcctatcgtaggcgttcacaattccttggttctgtcgtcgcgctcgcctgccatctccctccgcgctccatccgccaccatccgcgctcgcctcccttcgcgcatcctacaaccgcgtgctccttccttcgatggtgcggatcccccgtgactaccatctccctccgccctcccgcgctccatccgccaccatccgcgcttcctacagccgcgcgctccttcgacggcgcggatcccgcaccctcgaatcacgccagcagatcccacaatcaagcagcggcgacaggaataggggcgggctacgcgggcgctactacgacgagggtgagggcgagcgctccggcgccgcggcgccattcatcataatcggtcgagctcctggagggaacggctgcagagcggacgagatcgaggagcgggcgggcgggtgccgcccgtgacggcgcctaggctcaggctccgcgacggccgccacctcgccgcgcaaaggtctcaccggctcccgagaggacagcgcccgcgcctcccaggtttcaaaaaaccttctgagaaggcatgtataaaactttgggcaaaaggagatcttcctacctagcatatcttgcctcggaggagggttgttatattcaatactatgggtttgatggagttgttgtaattgaagcgggtcaagacatagcatttgcaaagatttagttcattctgatcactctgcaatatttcggtcgatggatggagaatggtggatcgaggagaccgatgacatactgctgcatcccgtgctgctcaatgggaagcagtaccggccagtctggtcaaacgacggcaccgtgatccacgcagatttctagttaagtttcttctgatggtgatggtactaaagaggactatgttcatatccgggcaaagcgaggccaagccactaacagccaaagccttgcagaaagactagggagaaagaagataagtgagaggatgaagcttcttcaagatcttgttcctgaatgcagtaaggatcaagcggccttactggcccatttaaccaaggaatcatgcagccataattgatgtgcaccattgccaatcccgttgatgttttgcatggagctattcacgaggcgtcaacaatgaaccattattgatttgtccactgttatgttcgttgctggtgcaatcatgggatacattatgttcactgaatctacactcccagttcacactgaacttacccctaaatcttgtggcttccaagattgcagtctagactacggtgatgaatccaataaccaaatatccttggacttttattgtagctttttgtgtgcatttgttccgatacttaacaattaacattatatgacaccatagtttctctaatcacatgtaactccatctagccatctaggtttgtcctaagtcaaacatatcttttaattttgattagaaatatctataaaaaataattgtcttaaataagcagagttatttggttttagtaatgaatttagcaatgccaatgctatttttatcgttctatataaattttagatattcatggtcaaacttaaaaatgtttgacttggacaaatatagatagacctacacatgcattgtgattttaggaagtcctacaattctcctccccaaagtctgctatcaacttctaacagttagtccagttttcatgaacaaatttagttttaatcattctatgttgtgccaaccgccagcaactaataatcagagctgggtcatatcatcatatcatagtagattgtatagctttcttccctgtgcatgcttactggttactagatgaaaaaggtcgtgttacgttatggcgcactcctctcctttgaataggacatgctttcacactctcaattcggcatatccttctagagactagctcacactccaatggtcttctaaatgaatagcacactatagtcaagagtatgacttaccaaattcattattggttccaagcatcttgaaagagaagtccatcgtctctcttactgtcatctcagcatggctaacagaagcacgcagcgacaagattaccccacatgttgtatcatggtttactagctagagaggctactcaagatgaggaatttgaagttatgtatggtgaggacgatgatgaagacaaagatgacgaggatgatgatgattatgatacaaagaccaagggggctactggagggggaagggcagcagcgaacgacctgttgagtgcaagcaggagtgagtgctgcacattgaatattggcatgcattggttgtggagcaattagtctggttctacttgatgcaaggtcattgagttattgaagtgatattttgtcgaatattttatatgccattgcaaagcacgggcatctaactagtctttcttatatatgtacactacaatacataatcatttatgccattgtttactacaaatatatatattaggcaactcttgaactggttgcaaggaatatttccactaaatctgcagttgct

SEQ ID NO: 58496 - DNA, 3564 bp, Zea Mays
gaatattagctataacctatgtttgattgtgtatatttgtatacttttattgtgtttcaggaaggacaaaatcatgttgtacaggatcctcccacatatggtgcaccaaagtttgatagaacccccagttagtcatgtcgtgacatgttcttatctctactactaattatgtgcctatcgtaggcgttcacaattccttggttctgtcgtcgcgctcgcctgccatctccctccgcgctccatccgccaccatccgcgctcgcctcccttcgcgcatcctacaaccgcgtgctccttccttcgatggtgcggatcccccgtgactaccatctccctccgccctcccgcgctccatccgccaccatccgcgcttcctacagccgcgcgctccttcgacggcgcggatcccgcaccctcgaatcacgccagcagatcccacaatcaagcagcggcgacaggaataggggcgggctacgcgggcgctactacgacgagggtgagggcgagcgctccggcgccgcggcgccattcatcataatcggtcgagctcctggagggaacggctgcagagcggacgagatcgaggagcgggcgggcgggtgccgcccgtgacggcgcctaggctcaggctccgcgacggccgccacctcgccgcgcaaaggtctcaccggctcccgagaggacagcgcccgcgcctcccaggtttcaaaaaaccttctgagaaggcatgtataaaactttgggcaaaaggagatcttcctacctagcatatcttgcctcggaggagggttgttatattcaatactatgggtttgatggaggtaatttttaacaggcctgttgatattctaaggaaattgtttgatgggaacaccttgagatcacaaatcaaagaattctttaatcgctttggtgctggagaggctgctgcaatgtgcttaatgatagctgcgaagctactttatgttgaagatagtctgataagcaattctgtttctgagaaagccactgaggcatttgaggaccctgggcttgttgggatgcctcaaattgttggtaccactgctttatctaatacacgaacttaggctggaggctttactatgggccaagttgttcaagaagcataacctttgttttctggtgcatatgaagggctttgtttgtgctcgtcaagactactttatctcatatgggagtttcctattatagtgattcgaagaccggctggtactaataaatgcaaggatggtgtaattgtttgtaggctttcagctggggccatgaaaattcttgagagcaagattcattcactggaaacatttttaagatctagaagaaataagagaaggggccacgcagtaccattgacacttaccctcaaggtagtcgatggatggagaatggtggatcgaggagaccgatgacatactgctgcatcccgtgctgctcaatgggaagcagtaccggccagtctggtcaaacgacggcaccgtgatccacgcagatttctagttaagtttcttctgatggtgatggtactaaagaggactatgttcatatccgggcaaagcgaggccaagccactaacagccaaagccttgcagaaagactagggagaaagaagataagtgagaggatgaagcttcttcaagatcttgttcctgaatgcagtaagatcattggcaaggcaatcatgctcgatgagattatcaactatgtgcagtcattgcaacgacaagtcgaggatcaagcggccttactggcccatttaaccaaggaatcatgcagccataattgatgtgcaccattgccaatcccgttgatgttttgcatggagctattcacgaggcgtcaacaatgaaccattattgatttgtccactgttatgttcgttgctggtgcaatcatgggatacattatgttcactgaatctacactcccagttcacactgaacttacccctaaatcttgtggcttccaagattgcagtctagactacggtgatgaatccaataaccaaatatccttggacttttattgtagctttttgtgtgcatttgttccgatacttaacaattaacattatatgacaccatagtttctctaatcacatgtaactccatctagccatctaggtttgtcctaagtcaaacatatcttttaattttgattagaaatatctataaaaaataattgtcttaaataagcagagttatttggttttagtaatgaatttagcaatgccaatgctatttttatcgttctatataaattttagatattcatggtcaaacttaaaaatgtttgacttggacaaatatagatagacctacacatgcattgtgattttaggaagtcctacaattctcctccccaaagtctgctatcaacttctaacagttagtccagttttcatgaacaaatttagttttaatcattctatgttgtgccaaccgccagcaactaataatcagagctgggtcatatcatcatatcatagtagattgtatagctttcttccctgtgcatgcttactggttactagatgaaaaaggtcgtgttacgttatggcgcactcctctcctttgaataggacatgctttcacactctcaattcggcatatccttctagagactagctgtgagttgggtcctaaatgtttcttccatgttcaattcgaatggcattgttgtgttaattagccgtcctgttttgtatttttttcctacaagttatagtggttacattaatgactaaatcaagatcttgacccactttattgatgacacccttttttcttcttattgcttctcctatcgtctctgagtttgtcattccattcaaacacgaaatttgtgtcagtatagatgccatggaaattttggtttagcttgagtattttgtagatacttcattcttgagtattcttgagtttgccttgttataaattgcagcacactccaatggtcttctaaatgaatagcacactatagtcaagagtatgacttaccaaattcattattggttccaagcatcttgaaagagaagtccatcgtctctcttactgtcatctcagcatggctaacagaagcacgcagcgacaagattaccccacatgttgtatcatggtttactagctagagaggctactcaagatgaggaatttgaagttatgtatggtgaggacgatgatgaagacaaagatgacgaggatgatgatgattatgatacaaagaccaagggggctactggagggggaagggcagcagcgaacgacctgttgagtgcaagcaggagtgagtgctgcacattgaatattggcatgcattggttgtggagcaattagtctggttctacttgatgcaaggtcattgagttattgaagtgatattttgtcgaatattttatatgccattgcaaagcacgggcatctaactagtctttcttatatatgtacactacaatacataatcatttatgccattgtttactacaaatatatatattaggcaactcttgaactggttgcaaggaatatttccactaaatctgcagttgct

SEQ ID NO: 58497 - DNA, 4154 bp, Zea Mays
gaatattagctataacctatgtttgattgtgtatatttgtatacttttattgtgtttcaggaaggacaaaatcatgttgtacaggatcctcccacatatggtgcaccaaagtttgatagaacccccagttagtcatgtcgtgacatgttcttatctctactactaattatgtgcctatcgtaggcgttcacaattccttggttctgtcgtcgcgctcgcctgccatctccctccgcgctccatccgccaccatccgcgctcgcctcccttcgcgcatcctacaaccgcgtgctccttccttcgatggtgcggatcccccgtgactaccatctccctccgccctcccgcgctccatccgccaccatccgcgcttcctacagccgcgcgctccttcgacggcgcggatcccgcaccctcgaatcacgccagcagatcccacaatcaagcagcggcgacaggaataggggcgggctacgcgggcgctactacgacgagggtgagggcgagcgctccggcgccgcggcgccattcatcataatcggtcgagctcctggagggaacggctgcagagcggacgagatcgaggagcgggcgggcgggtgccgcccgtgacggcgcctaggctcaggctccgcgacggccgccacctcgccgcgcaaaggtctcaccggctcccgagaggacagcgcccgcgcctcccaggtttcaaaaaaccttctgagaaggcctgttgatattctaaggaaattgtttgatgggaacaccttgagatcacaaatcaaagaattctttaatcgctttggtgctggagaggctgctgcaatgtgcttaatgatagctgcgaagctactttatgttgaagatagtctgataagcaattctgtttctgagaaagccactgaggcatttgaggaccctgggcttgttgggatgcctcaaattgttggtaccactgctttatctaatacacgaacttaggctggaggctttactatgggccaagttgttcaagaagcataacctttgttttctggtgcatatgaagggctttgtttgtgctcgtcaagactactttatctcatatgggagtttcctattatagtgattcgaagaccggctggtactaataaatgcaaggatggtgtaattgtttgtaggctttcagctggggccatgaaaattcttgagagcaagattcattcactggaaacatttttaagatctagaagaaataagagaaggggccacgcagtaccattgacacttaccctcaaggttgttgtaattgaagcgggtcaagacatagcatttgcaaagatttagttcattctgatcactctgcaatatttcggtagtcgatggatggagaatggtggatcgaggagaccgatgacatactgctgcatcccgtgctgctcaatgggaagcagtaccggccagtctggtcaaacgacggcaccgtgatccacgcagatttctagttaagtttcttctgatggtgatggtactaaagaggactatgttcatatccgggcaaagcgaggccaagccactaacagccaaagccttgcagaaagattaatgaaactgcagctagggagaaagaagataagtgagaggatgaagcttcttcaagatcttgttcctgaatgcagtaagatcattggcaaggcaatcatgctcgatgagattatcaactatgtgcagtcattgcaacgacaagtcgagatcatatccaaacaagtaaagccacccactcgatcaccatatctccctctaggatcaagcggccttactggcccatttaaccaaggaatcatgcagccataattgatgtgcaccattgccaatcccgttgatgttttgcatggagctattcacgaggcgtcaacaatgaaccattattgatttgtccactgttatgttcgttgctggtgcaatcatgggatacattatgttcactgaatctacactcccagttcacactgaacttacccctaaatcttgtggcttccaagattgcagtctagactacggtgatgaatccaataaccaaatatccttggacttttattgtagctttttgtgtgcatttgttccgatacttaacaattaacattatatgacaccatagtttctctaatcacatgtaactccatctagccatctaggtttgtcctaagtcaaacatatcttttaattttgattagaaatatctataaaaaataattgtcttaaataagcagagttatttggttttagtaatgaatttagcaatgccaatgctatttttatcgttctatataaattttagatattcatggtcaaacttaaaaatgtttgacttggacaaatatagatagacctacacatgcattgtgattttaggaagtcctacaattctcctccccaaagtctgctatcaacttctaacagttagtccagttttcatgaacaaatttagttttaatcattctatgttgtgccaaccgccagcaactaataatcagagctgggtcatatcatcatatcatagtagattgtatagctttcttccctgtgcatgcttactggttactagatgaaaaaggtcgtgttacgttatggcgcactcctctcctttgaataggacatgctttcacactctcaattcggcatatccttctagagactagctgtgagttgggtcctaaatgtttcttccatgttcaattcgaatggcattgttgtgttaattagccgtcctgttttgtatttttttcctacaagttatagtggttacattaatgactaaatcaagatcttgacccactttattgatgacacccttttttcttcttattgcttctcctatcgtctctgagtttgtcattccattcaaacacgaaatttgtgtcagtatagatgccatggaaattttggtttagcttgagtattttgtagatacttcattcttgagtattcttgagtttgccttgttataaattgcagcacactccaatggtcttctaaatgaatagcacactatagtcaagagtatgacttaccaaattcattattggttccaagcatcttgaaagagaagtccatcgtctctcttactgtcatctcagcatggctaacagaagcacgcagtaggagtttctccaccttcctttcatcatgctacttcttgctgagggtggcgtgaaaaagtcagcaacaagttcctctatggtggcgacagagaagacaagggaggctctggcgacattgtggcgacgacgagaagcgagcaaggatataaatcgatctgtttctttggaaattagctgtagtagaatatttacgtgatacaaatctctattctctatatctctatatctattacgtttctcatgtctctatttttattataatggtttggaaaaatgtcgctcatcttctgctctaatctttcgaaattaggtgtagtggaatattattgccagatattgctacactacaatagtgaaattattgtccaaaattgaagattgccgtatgccttaggtcactataaaatcgagttattttataataatagttttttgttttacataagccccactcttttatctaaaagcccataaattattgtccaaaatggaagattaagagtttgtttattacttctaaattatcctttctatatctaccatatgtaccatcagcgacaagattaccccacatgttgtatcatggtttactagctagagaggctactcaagatgaggaatttgaagttatgtatggtgaggacgatgatgaagacaaagatgacgaggatgatgatgattatgatacaaagaccaagggggctactggagggggaagggcagcagcgaacgacctgttgagtgcaagcaggagtgagtgctgcacattgaatattggcatgcattggttgtggagcaattagtctggttctacttgatgcaaggtcattgagttattgaagtgatattttgtcgaatattttatatgccattgcaaagcacgggcatctaactagtctttcttatatatgtacactacaatacataatcatttatgccattgtttactacaaatatatatattaggcaactcttgaactggttgcaaggaatatttccactaaatctgcagttgct

SEQ ID NO: 58498 - DNA, 3550 bp, Zea Mays
gaatattagctataacctatgtttgattgtgtatatttgtatacttttattgtgtttcaggaaggacaaaatcatgttgtacaggatcctcccacatatggtgcaccaaagtttgatagaacccccagttagtcatgtcgtgacatgttcttatctctactactaattatgtgcctatcgtaggcgttcacaattccttggttctgtcgtcgcgctcgcctgccatctccctccgcgctccatccgccaccatccgcgctcgcctcccttcgcgcatcctacaaccgcgtgctccttccttcgatggtgcggatcccccgtgactaccatctccctccgccctcccgcgctccatccgccaccatccgcgcttcctacagccgcgcgctccttcgacggcgcggatcccgcaccctcgaatcacgccagcagatcccacaatcaagcagcggcgacaggaataggggcgggctacgcgggcgctactacgacgagggtgagggcgagcgctccggcgccgcggcgccattcatcataatcggtcgagctcctggagggaacggctgcagagcggacgagatcgaggagcgggcgggcgggtgccgcccgtgacggcgcctaggctcaggctccgcgacggccgccacctcgccgcgcaaaggtctcaccggctcccgagaggacagcgcccgcgcctcccaggtttcaaaaaaccttctgagaaggcctgttgatattctaaggaaattgtttgatgggaacaccttgagatcacaaatcaaagaattctttaatcgctttggtgctggagaggctgctgcaatgtgcttaatgatagctgcgaagctactttatgttgaagatagtctgataagcaattctgtttctgagaaagccactgaggcatttgaggaccctgggcttgttgggatgcctcaaattgttggtaccactgctttatctaatacacgaacttaggctggaggctttactatgggccaagttgttcaagaagcataacctttgttttctggtgcatatgaagggctttgtttgtgctcgtcaagactactttatctcatatgggagtttcctattatagtgattcgaagaccggctggtactaataaatgcaaggatggtgtaattgtttgtaggctttcagctggggccatgaaaattcttgagagcaagattcattcactggaaacatttttaagatctagaagaaataagagaaggggccacgcagtaccattgacacttaccctcaaggcctacagttgttgtaattgaagcgggtcaagacatagcatttgcaaagatttagttcattctgatcactctgcaatatttcggtagtcgatggatggagaatggtggatcgaggagaccgatgacatactgctgcatcccgtgctgctcaatgggaagcagtaccggccagtctggtcaaacgacggcaccgtgatccacgcagatttctagttaagtttcttctgatggtgatggtactaaagaggactatgttcatatccgggcaaagcgaggccaagccactaacagccaaagccttgcagaaagactagggagaaagaagataagtgagaggatgaagcttcttcaagatcttgttcctgaatgcagtaagatcattggcaaggcaatcatgctcgatgagattatcaactatgtgcagtcattgcaacgacaagtcgagatcatatccaaacaagtaaagccacccactcgatcaccatatctccctctaggatcaagcggccttactggcccatttaaccaaggaatcatgcagccataattgatgtgcaccattgccaatcccgttgatgttttgcatggagctattcacgaggcgtcaacaatgaaccattattgatttgtccactgttatgttcgttgctggtgcaatcatgggatacattatgttcactgaatctacactcccagttcacactgaacttacccctaaatcttgtggcttccaagattgcagtctagactacggtgatgaatccaataaccaaatatccttggacttttattgtagctttttgtgtgcatttgttccgatacttaacaattaacattatatgacaccatagtttctctaatcacatgtaactccatctagccatctaggtttgtcctaagtcaaacatatcttttaattttgattagaaatatctataaaaaataattgtcttaaataagcagagttatttggttttagtaatgaatttagcaatgccaatgctatttttatcgttctatataaattttagatattcatggtcaaacttaaaaatgtttgacttggacaaatatagatagacctacacatgcattgtgattttaggaagtcctacaattctcctccccaaagtctgctatcaacttctaacagttagtccagttttcatgaacaaatttagttttaatcattctatgttgtgccaaccgccagcaactaataatcagagctgggtcatatcatcatatcatagtagattgtatagctttcttccctgtgcatgcttactggttactagatgaaaaaggtcgtgttacgttatggcgcactcctctcctttgaataggacatgctttcacactctcaattcggcatatccttctagagactagctgtgagttgggtcctaaatgtttcttccatgttcaattcgaatggcattgttgtgttaattagccgtcctgttttgtatttttttcctacaagttatagtggttacattaatgactaaatcaagatcttgacccactttattgatgacacccttttttcttcttattgcttctcctatcgtctctgagtttgtcattccattcaaacacgaaatttgtgtcagtatagatgccatggaaattttggtttagcttgagtattttgtagatacttcattcttgagtattcttgagtttgccttgttataaattgcagcacactccaatggtcttctaaatgaatagcacactatagtcaagagtatgacttaccaaattcattattggttccaagcatcttgaaagagaagtccatcgtctctcttactgtcatctcagcatggctaacagaagcacgcagctagagaggctactcaagatgaggaatttgaagttatgtatggtgaggacgatgatgaagacaaagatgacgaggatgatgatgattatgatacaaagaccaagggggctactggagggggaagggcagcagcgaacgacctgttgagtgcaagcaggagtgagtgctgcacattgaatattggcatgcattggttgtggagcaattagtctggttctacttgatgcaaggtcattgagttattgaagtgatattttgtcgaatattttatatgccattgcaaagcacgggcatctaactagtctttcttatatatgtacactacaatacataatcatttatgccattgtttactacaaatatatatattaggcaactcttgaactggttgcaaggaatatttccactaaatctgcagttgct

SEQ ID NO: 58499 - DNA, 3236 bp, Zea Mays
gaatattagctataacctatgtttgattgtgtatatttgtatacttttattgtgtttcaggaaggacaaaatcatgttgtacaggatcctcccacatatggtgcaccaaagtttgatagaacccccagttagtcatgtcgtgacatgttcttatctctactactaattatgtgcctatcgtaggcgttcacaattccttggttctgtcgtcgcgctcgcctgccatctccctccgcgctccatccgccaccatccgcgctcgcctcccttcgcgcatcctacaaccgcgtgctccttccttcgatggtgcggatcccccgtgactaccatctccctccgccctcccgcgctccatccgccaccatccgcgcttcctacagccgcgcgctccttcgacggcgcggatcccgcaccctcgaatcacgccagcagatcccacaatcaagcagcggcgacaggaataggggcgggctacgcgggcgctactacgacgagggtgagggcgagcgctccggcgccgcggcgccattcatcataatcggtcgagctcctggagggaacggctgcagagcggacgagatcgaggagcgggcgggcgggtgccgcccgtgacggcgcctaggctcaggctccgcgacggccgccacctcgccgcgcaaaggtctcaccggctcccgagaggacagcgcccgcgcctcccaggtttcaaaaaaccttctgagaaggcctgttgatattctaaggaaattgtttgatgggaacaccttgagatcacaaatcaaagaattctttaatcgctttggtgctggagaggctgctgcaatgtgcttaatgatagctgcgaagctactttatgttgaagatagtctgataagcaattctgtttctgagaaagccactgaggcatttgaggaccctgggcttgttgggatgcctcaaattgttggtaccactgctttatctaatacacgaacttaggctggaggctttactatgggccaagttgttcaagaagcataacctttgttttctggtgcatatgaagggctttgtttgtgctcgtcaagactactttatctcatatgggagtttcctattatagtgattcgaagaccggctggtactaataaatgcaaggatggtgtaattgtttgtaggctttcagctggggccatgaaaattcttgagagcaagattcattcactggaaacatttttaagatctagaagaaataagagaaggggccacgcagtaccattgacacttaccctcaaggcctacagttgttgtaattgaagcgggtcaagacatagcatttgcaaagatttagttcattctgatcactctgcaatatttcggtagtcgatggatggagaatggtggatcgaggagaccgatgacatactgctgcatcccgtgctgctcaatgggaagcagtaccggccagtctggtcaaacgacggcaccgtgatccacgcagatttctagttaagtttcttctgatggtgatggtactaaagaggactatgttcatatccgggcaaagcgaggccaagccactaacagccaaagccttgcagaaagactagggagaaagaagataagtgagaggatgaagcttcttcaagatcttgttcctgaatgcagtaagatcattggcaaggcaatcatgctcgatgagattatcaactatgtgcagtcattgcaacgacaagtcgagatcatatccaaacaagtaaagccacccactcgatcaccatatctccctctaggatcaagcggccttactggcccatttaaccaaggaatcatgcagccataattgatgtgcaccattgccaatcccgttgatgttttgcatggagctattcacgaggcgtcaacaatgaaccattattgatttgtccactgttatgttcgttgctggtgcaatcatgggatacattatgttcactgaatctacactcccagttcacactgaacttacccctaaatcttgtggcttccaagattgcagtctagactacggtgatgaatccaataaccaaatatccttggacttttattgtagctttttgtgtgcatttgttccgatacttaacaattaacattatatgacaccatagtttctctaatcacatgtaactccatctagccatctaggtttgtcctaagtcaaacatatcttttaattttgattagaaatatctataaaaaataattgtcttaaataagcagagttatttggttttagtaatgaatttagcaatgccaatgctatttttatcgttctatataaattttagatattcatggtcaaacttaaaaatgtttgacttggacaaatatagatagacctacacatgcattgtgattttaggaagtcctacaattctcctccccaaagtctgctatcaacttctaacagttagtccagttttcatgaacaaatttagttttaatcattctatgttgtgccaaccgccagcaactaataatcagagctgggtcatatcatcatatcatagtagattgtatagctttcttccctgtgcatgcttactggttactagatgaaaaaggtcgtgttacgttatggcgcactcctctcctttgaataggacatgctttcacactctcaattcggcatatccttctagagactagctcacactccaatggtcttctaaatgaatagcacactatagtcaagagtatgacttaccaaattcattattggttccaagcatcttgaaagagaagtccatcgtctctcttactgtcatctcagcatggctaacagaagcacgcagctagagaggctactcaagatgaggaatttgaagttatgtatggtgaggacgatgatgaagacaaagatgacgaggatgatgatgattatgatacaaagaccaagggggctactggagggggaagggcagcagcgaacgacctgttgagtgcaagcaggagtgagtgctgcacattgaatattggcatgcattggttgtggagcaattagtctggttctacttgatgcaaggtcattgagttattgaagtgatattttgtcgaatattttatatgccattgcaaagcacgggcatctaactagtctttcttatatatgtacactacaatacataatcatttatgccattgtttactacaaatatatatattaggcaactcttgaactggttgcaaggaatatttccactaaatctgcagttgct

SEQ ID NO: 58500 - DNA, 3687 bp, Zea Mays
gaatattagctataacctatgtttgattgtgtatatttgtatacttttattgtgtttcaggaaggacaaaatcatgttgtacaggatcctcccacatatggtgcaccaaagtttgatagaacccccagttagtcatgtcgtgacatgttcttatctctactactaattatgtgcctatcgtaggcgttcacaattccttggttctgtcgtcgcgctcgcctgccatctccctccgcgctccatccgccaccatccgcgctcgcctcccttcgcgcatcctacaaccgcgtgctccttccttcgatggtgcggatcccccgtgactaccatctccctccgccctcccgcgctccatccgccaccatccgcgcttcctacagccgcgcgctccttcgacggcgcggatcccgcaccctcgaatcacgccagcagatcccacaatcaagcagcggcgacaggaataggggcgggctacgcgggcgctactacgacgagggtgagggcgagcgctccggcgccgcggcgccattcatcataatcggtcgagctcctggagggaacggctgcagagcggacgagatcgaggagcgggcgggcgggtgccgcccgtgacggcgcctaggctcaggctccgcgacggccgccacctcgccgcgcaaaggtctcaccggctcccgagaggacagcgcccgcgcctcccaggtttcaaaaaaccttctgagaaggcctgttgatattctaaggaaattgtttgatgggaacaccttgagatcacaaatcaaagaattctttaatcgctttggtgctggagaggctgctgcaatgtgcttaatgatagctgcgaagctactttatgttgaagatagtctgataagcaattctgtttctgagaaagccactgaggcatttgaggaccctgggcttgttgggatgcctcaaattgttggtaccactgctttatctaatacacgaacttaggctggaggctttactatgggccaagttgttcaagaagcataacctttgttttctggtgcatatgaagggctttgtttgtgctcgtcaagactactttatctcatatgggagtttcctattatagtgattcgaagaccggctggtactaataaatgcaaggatggtgtaattgtttgtaggctttcagctggggccatgaaaattcttgagagcaagattcattcactggaaacatttttaagatctagaagaaataagagaaggggccacgcagtaccattgacacttaccctcaaggcctacagttgttgtaattgaagcgggtcaagacatagcatttgcaaagatttagttcattctgatcactctgcaatatttcggtagtcgatggatggagaatggtggatcgaggagaccgatgacatactgctgcatcccgtgctgctcaatgggaagcagtaccggccagtctggtcaaacgacggcaccgtgatccacgcagatttctagttaagtttcttctgatggtgatggtactaaagaggactatgttcatatccgggcaaagcgaggccaagccactaacagccaaagccttgcagaaagactagggagaaagaagataagtgagaggatgaagcttcttcaagatcttgttcctgaatgcagtaagatcattggcaaggcaatcatgctcgatgagattatcaactatgtgcagtcattgcaacgacaagtcgaggtagtgttagtgcatctgtagctgaattgttttgtaatatatgtggcatcttgttagtgcatctgcagttcttgtcaatgaaactcgcaactgttaaccccgagcttggctttgacattgagcagatcatatccaaacaaatgctgctttcacaagactgacatcttgctttctatggagtcaaaccaggatcaagcggccttactggcccatttaaccaaggaatcatgcagccataattgatgtgcaccattgccaatcccgttgatgttttgcatggagctattcacgaggcgtcaacaatgaaccattattgatttgtccactgttatgttcgttgctggtgcaatcatgggatacattatgttcactgaatctacactcccagttcacactgaacttacccctaaatcttgtggcttccaagattgcagtctagactacggtgatgaatccaataaccaaatatccttggacttttattgtagctttttgtgtgcatttgttccgatacttaacaattaacattatatgacaccatagtttctctaatcacatgtaactccatctagccatctaggtttgtcctaagtcaaacatatcttttaattttgattagaaatatctataaaaaataattgtcttaaataagcagagttatttggttttagtaatgaatttagcaatgccaatgctatttttatcgttctatataaattttagatattcatggtcaaacttaaaaatgtttgacttggacaaatatagatagacctacacatgcattgtgattttaggaagtcctacaattctcctccccaaagtctgctatcaacttctaacagttagtccagttttcatgaacaaatttagttttaatcattctatgttgtgccaaccgccagcaactaataatcagagctgggtcatatcatcatatcatagtagattgtatagctttcttccctgtgcatgcttactggttactagatgaaaaaggtcgtgttacgttatggcgcactcctctcctttgaataggacatgctttcacactctcaattcggcatatccttctagagactagctgtgagttgggtcctaaatgtttcttccatgttcaattcgaatggcattgttgtgttaattagccgtcctgttttgtatttttttcctacaagttatagtggttacattaatgactaaatcaagatcttgacccactttattgatgacacccttttttcttcttattgcttctcctatcgtctctgagtttgtcattccattcaaacacgaaatttgtgtcagtatagatgccatggaaattttggtttagcttgagtattttgtagatacttcattcttgagtattcttgagtttgccttgttataaattgcagcacactccaatggtcttctaaatgaatagcacactatagtcaagagtatgacttaccaaattcattattggttccaagcatcttgaaagagaagtccatcgtctctcttactgtcatctcagcatggctaacagaagcacgcagctagagaggctactcaagatgaggaatttgaagttatgtatggtgaggacgatgatgaagacaaagatgacgaggatgatgatgattatgatacaaagaccaagggggctactggagggggaagggcagcagcgaacgacctgttgagtgcaagcaggagtgagtgctgcacattgaatattggcatgcattggttgtggagcaattagtctggttctacttgatgcaaggtcattgagttattgaagtgatattttgtcgaatattttatatgccattgcaaagcacgggcatctaactagtctttcttatatatgtacactacaatacataatcatttatgccattgtttactacaaatatatatattaggcaactcttgaactggttgcaaggaatatttccactaaatctgcagttgct

SEQ ID NO: 58501 - DNA, 3882 bp, Zea Mays
gaatattagctataacctatgtttgattgtgtatatttgtatacttttattgtgtttcaggaaggacaaaatcatgttgtacaggatcctcccacatatggtgcaccaaagtttgatagaacccccagttagtcatgtcgtgacatgttcttatctctactactaattatgtgcctatcgtaggcgttcacaattccttggttctgtcgtcgcgctcgcctgccatctccctccgcgctccatccgccaccatccgcgctcgcctcccttcgcgcatcctacaaccgcgtgctccttccttcgatggtgcggatcccccgtgactaccatctccctccgccctcccgcgctccatccgccaccatccgcgcttcctacagccgcgcgctccttcgacggcgcggatcccgcaccctcgaatcacgccagcagatcccacaatcaagcagcggcgacaggaataggggcgggctacgcgggcgctactacgacgagggtgagggcgagcgctccggcgccgcggcgccattcatcataatcggtcgagctcctggagggaacggctgcagagcggacgagatcgaggagcgggcgggcgggtgccgcccgtgacggcgcctaggctcaggctccgcgacggccgccacctcgccgcgcaaaggtctcaccggctcccgagaggacagcgcccgcgcctcccaggtttcaaaaaaccttctgagaaggcatgtataaaactttgggcaaaaggagatcttcctacctagcatatcttgcctcggaggagggttgttatattcaatactatgggtttgatggagcctacagttgttgtaattgaagcgggtcaagacatagcatttgcaaagatttagttcattctgatcactctgcaatatttcggtagtcgatggatggagaatggtggatcgaggagaccgatgacatactgctgcatcccgtgctgctcaatgggaagcagtaccggccagtctggtcaaacgacggcaccgtgatccacgcagatttctagttaagtttcttctgatggtgatggtactaaagaggactatgttcatatccgggcaaagcgaggccaagccactaacagccaaagccttgcagaaagactagggagaaagaagataagtgagaggatgaagcttcttcaagatcttgttcctgaatgcagtaagatcattggcaaggcaatcatgctcgatgagattatcaactatgtgcagtcattgcaacgacaagtcgagatcatatccaaacaagtaaagccacccactcgatcaccatatctccctctagtcaaaccaggatcaagcggccttactggcccatttaaccaaggaatcatgcagccataattgatgtgcaccattgccaatcccgttgatgttttgcatggagctattcacgaggcgtcaacaatgaaccattattgatttgtccactgttatgttcgttgctggtgcaatcatgggatacattatgttcactgaatctacactcccagttcacactgaacttacccctaaatcttgtggcttccaagattgcagtctagactacggtgatgaatccaataaccaaatatccttggacttttattgtagctttttgtgtgcatttgttccgatacttaacaattaacattatatgacaccatagtttctctaatcacatgtaactccatctagccatctaggtttgtcctaagtcaaacatatcttttaattttgattagaaatatctataaaaaataattgtcttaaataagcagagttatttggttttagtaatgaatttagcaatgccaatgctatttttatcgttctatataaattttagatattcatggtcaaacttaaaaatgtttgacttggacaaatatagatagacctacacatgcattgtgattttaggaagtcctacaattctcctccccaaagtctgctatcaacttctaacagttagtccagttttcatgaacaaatttagttttaatcattctatgttgtgccaaccgccagcaactaataatcagagctgggtcatatcatcatatcatagtagattgtatagctttcttccctgtgcatgcttactggttactagatgaaaaaggtcgtgttacgttatggcgcactcctctcctttgaataggacatgctttcacactctcaattcggcatatccttctagagactagctgtgagttgggtcctaaatgtttcttccatgttcaattcgaatggcattgttgtgttaattagccgtcctgttttgtatttttttcctacaagttatagtggttacattaatgactaaatcaagatcttgacccactttattgatgacacccttttttcttcttattgcttctcctatcgtctctgagtttgtcattccattcaaacacgaaatttgtgtcagtatagatgccatggaaattttggtttagcttgagtattttgtagatacttcattcttgagtattcttgagtttgccttgttataaattgcagcacactccaatggtcttctaaatgaatagcacactatagtcaagagtatgacttaccaaattcattattggttccaagcatcttgaaagagaagtccatcgtctctcttactgtcatctcagcatggctaacagaagcacgcaggtactgtggtgttgaataattcatttattatccattgtacatgacttttcctttgaattgttgtcaattgttgtccattagaaaatatatactatagtcgatgataacatatgcgcaaaggttttatcgaataatttttgtgttctcgcaacttacgtgcattgtattatactaatataaagtaggagtttctccaccttcctttcatcatgctacttcttgctgagggtggcgtgaaaaagtcagcaacaagttcctctatggtggcgacagagaagacaagggaggctctggcgacattgtggcgacgacgagaagcgagcaaggatataaatcgatctgtttctttggaaattagctgtagtagaatatttacgtgatacaaatctctattctctatatctctatatctattacgtttctcatgtctctatttttattataatggtttggaaaaatgtcgctcatcttctgctctaatctttcgaaattaggtgtagtggaatattattgccagatattgctacactacaatagtgaaattattgtccaaaattgaagattgccgtatgccttaggtcactataaaatcgagttattttataataatagttttttgttttacataagccccactcttttatctaaaagcccataaattattgtccaaaatggaagattaagagtttgtttattacttctaaattatcctttctatatctaccatatgtaccatcagcgacaagattaccccacatgttgtatcatggtttactagctagagaggctactcaagatgaggaatttgaagttatgtatggtgaggacgatgatgaagacaaagatgacgaggatgatgatgattatgatacaaagaccaagggggctactggagggggaagggcagcagcgaacgacctgttgagtgcaagcaggagtgagtgctgcacattgaatattggcatgcattggttgtggagcaattagtctggttctacttgatgcaaggtcattgagttattgaagtgatattttgtcgaatattttatatgccattgcaaagcacgggcatctaactagtctttcttatatatgtacactacaatacataatcatttatgccattgtttactacaaatatatatattaggcaactcttgaactggttgcaaggaatatttccactaaatctgcagttgct

SEQ ID NO: 58502 - DNA, 3601 bp, Zea Mays
gaatattagctataacctatgtttgattgtgtatatttgtatacttttattgtgtttcaggaaggacaaaatcatgttgtacaggatcctcccacatatggtgcaccaaagtttgatagaacccccagttagtcatgtcgtgacatgttcttatctctactactaattatgtgcctatcgtaggcgttcacaattccttggttctgtcgtcgcgctcgcctgccatctccctccgcgctccatccgccaccatccgcgctcgcctcccttcgcgcatcctacaaccgcgtgctccttccttcgatggtgcggatcccccgtgactaccatctccctccgccctcccgcgctccatccgccaccatccgcgcttcctacagccgcgcgctccttcgacggcgcggatcccgcaccctcgaatcacgccagcagatcccacaatcaagcagcggcgacaggaataggggcgggctacgcgggcgctactacgacgagggtgagggcgagcgctccggcgccgcggcgccattcatcataatcggtcgagctcctggagggaacggctgcagagcggacgagatcgaggagcgggcgggcgggtgccgcccgtgacggcgcctaggctcaggctccgcgacggccgccacctcgccgcgcaaaggtctcaccggctcccgagaggacagcgcccgcgcctcccaggtttcaaaaaaccttctgagaaggcctgttgatattctaaggaaattgtttgatgggaacaccttgagatcacaaatcaaagaattctttaatcgctttggtgctggagaggctgctgcaatgtgcttaatgatagctgcgaagctactttatgttgaagatagtctgataagcaattctgtttctgagaaagccactgaggcatttgaggaccctgggcttgttgggatgcctcaaattgttggtaccactgctttatctaatacacgaacttaggctggaggctttactatgggccaagttgttcaagaagcataacctttgttttctggtgcatatgaagggctttgtttgtgctcgtcaagactactttatctcatatgggagtttcctattatagtgattcgaagaccggctggtactaataaatgcaaggatggtgtaattgtttgtaggctttcagctggggccatgaaaattcttgagagcaagattcattcactggaaacatttttaagatctagaagaaataagagaaggggccacgcagtaccattgacacttaccctcaaggcctacagttgttgtaattgaagcgggtcaagacatagcatttgcaaagatttagttcattctgatcactctgcaatatttcggtagtcgatggatggagaatggtggatcgaggagaccgatgacatactgctgcatcccgtgctgctcaatgggaagcagtaccggccagtctggtcaaacgacggcaccgtgatccacgcagatttctagttaagtttcttctgatggtgatggtactaaagaggactatgttcatatccgggcaaagcgaggccaagccactaacagccaaagccttgcagaaagactagggagaaagaagataagtgagaggatgaagcttcttcaagatcttgttcctgaatgcagtaagatcattggcaaggcaatcatgctcgatgagattatcaactatgtgcagtcattgcaacgacaagtcgagatcatatccaaacaaatgctgctttcacaagactgacatcttgctttctatggagtcaaaccaggatcaagcggccttactggcccatttaaccaaggaatcatgcagccataattgatgtgcaccattgccaatcccgttgatgttttgcatggagctattcacgaggcgtcaacaatgaaccattattgatttgtccactgttatgttcgttgctggtgcaatcatgggatacattatgttcactgaatctacactcccagttcacactgaacttacccctaaatcttgtggcttccaagattgcagtctagactacggtgatgaatccaataaccaaatatccttggacttttattgtagctttttgtgtgcatttgttccgatacttaacaattaacattatatgacaccatagtttctctaatcacatgtaactccatctagccatctaggtttgtcctaagtcaaacatatcttttaattttgattagaaatatctataaaaaataattgtcttaaataagcagagttatttggttttagtaatgaatttagcaatgccaatgctatttttatcgttctatataaattttagatattcatggtcaaacttaaaaatgtttgacttggacaaatatagatagacctacacatgcattgtgattttaggaagtcctacaattctcctccccaaagtctgctatcaacttctaacagttagtccagttttcatgaacaaatttagttttaatcattctatgttgtgccaaccgccagcaactaataatcagagctgggtcatatcatcatatcatagtagattgtatagctttcttccctgtgcatgcttactggttactagatgaaaaaggtcgtgttacgttatggcgcactcctctcctttgaataggacatgctttcacactctcaattcggcatatccttctagagactagctgtgagttgggtcctaaatgtttcttccatgttcaattcgaatggcattgttgtgttaattagccgtcctgttttgtatttttttcctacaagttatagtggttacattaatgactaaatcaagatcttgacccactttattgatgacacccttttttcttcttattgcttctcctatcgtctctgagtttgtcattccattcaaacacgaaatttgtgtcagtatagatgccatggaaattttggtttagcttgagtattttgtagatacttcattcttgagtattcttgagtttgccttgttataaattgcagcacactccaatggtcttctaaatgaatagcacactatagtcaagagtatgacttaccaaattcattattggttccaagcatcttgaaagagaagtccatcgtctctcttactgtcatctcagcatggctaacagaagcacgcagcgacaagattaccccacatgttgtatcatggtttactagctagagaggctactcaagatgaggaatttgaagttatgtatggtgaggacgatgatgaagacaaagatgacgaggatgatgatgattatgatacaaagaccaagggggctactggagggggaagggcagcagcgaacgacctgttgagtgcaagcaggagtgagtgctgcacattgaatattggcatgcattggttgtggagcaattagtctggttctacttgatgcaaggtcattgagttattgaagtgatattttgtcgaatattttatatgccattgcaaagcacgggcatctaactagtctttcttatatatgtacactacaatacataatcatttatgccattgtttactacaaatatatatattaggcaactcttgaactggttgcaaggaatatttccactaaatctgcagttgct

SEQ ID NO: 58503 - DNA, 3268 bp, Zea Mays
gaatattagctataacctatgtttgattgtgtatatttgtatacttttattgtgtttcaggaaggacaaaatcatgttgtacaggatcctcccacatatggtgcaccaaagtttgatagaacccccagttagtcatgtcgtgacatgttcttatctctactactaattatgtgcctatcgtaggcgttcacaattccttggttctgtcgtcgcgctcgcctgccatctccctccgcgctccatccgccaccatccgcgctcgcctcccttcgcgcatcctacaaccgcgtgctccttccttcgatggtgcggatcccccgtgactaccatctccctccgccctcccgcgctccatccgccaccatccgcgcttcctacagccgcgcgctccttcgacggcgcggatcccgcaccctcgaatcacgccagcagatcccacaatcaagcagcggcgacaggaataggggcgggctacgcgggcgctactacgacgagggtgagggcgagcgctccggcgccgcggcgccattcatcataatcggtcgagctcctggagggaacggctgcagagcggacgagatcgaggagcgggcgggcgggtgccgcccgtgacggcgcctaggctcaggctccgcgacggccgccacctcgccgcgcaaaggtctcaccggctcccgagaggacagcgcccgcgcctcccaggtttcaaaaaaccttctgagaaggcctgttgatattctaaggaaattgtttgatgggaacaccttgagatcacaaatcaaagaattctttaatcgctttggtgctggagaggctgctgcaatgtgcttaatgatagctgcgaagctactttatgttgaagatagtctgataagcaattctgtttctgagaaagccactgaggcatttgaggaccctgggcttgttgggatgcctcaaattgttggtaccactgctttatctaatacacgaacttaggctggaggctttactatgggccaagttgttcaagaagcataacctttgttttctggtgcatatgaagggctttgtttgtgctcgtcaagactactttatctcatatgggagtttcctattatagtgattcgaagaccggctggtactaataaatgcaaggatggtgtaattgtttgtaggctttcagctggggccatgaaaattcttgagagcaagattcattcactggaaacatttttaagatctagaagaaataagagaaggggccacgcagtaccattgacacttaccctcaaggttgttgtaattgaagcgggtcaagacatagcatttgcaaagatttagttcattctgatcactctgcaatatttcggtagtcgatggatggagaatggtggatcgaggagaccgatgacatactgctgcatcccgtgctgctcaatgggaagcagtaccggccagtctggtcaaacgacggcaccgtgatccacgcagatttctagttaagtttcttctgatggtgatggtactaaagaggactatgttcatatccgggcaaagcgaggccaagccactaacagccaaagccttgcagaaagactagggagaaagaagataagtgagaggatgaagcttcttcaagatcttgttcctgaatgcagtaagatcattggcaaggcaatcatgctcgatgagattatcaactatgtgcagtcattgcaacgacaagtcgagatcatatccaaacaagtaaagccacccactcgatcaccatatctccctctaggatcaagcggccttactggcccatttaaccaaggaatcatgcagccataattgatgtgcaccattgccaatcccgttgatgttttgcatggagctattcacgaggcgtcaacaatgaaccattattgatttgtccactgttatgttcgttgctggtgcaatcatgggatacattatgttcactgaatctacactcccagttcacactgaacttacccctaaatcttgtggcttccaagattgcagtctagactacggtgatgaatccaataaccaaatatccttggacttttattgtagctttttgtgtgcatttgttccgatacttaacaattaacattatatgacaccatagtttctctaatcacatgtaactccatctagccatctaggtttgtcctaagtcaaacatatcttttaattttgattagaaatatctataaaaaataattgtcttaaataagcagagttatttggttttagtaatgaatttagcaatgccaatgctatttttatcgttctatataaattttagatattcatggtcaaacttaaaaatgtttgacttggacaaatatagatagacctacacatgcattgtgattttaggaagtcctacaattctcctccccaaagtctgctatcaacttctaacagttagtccagttttcatgaacaaatttagttttaatcattctatgttgtgccaaccgccagcaactaataatcagagctgggtcatatcatcatatcatagtagattgtatagctttcttccctgtgcatgcttactggttactagatgaaaaaggtcgtgttacgttatggcgcactcctctcctttgaataggacatgctttcacactctcaattcggcatatccttctagagactagctcacactccaatggtcttctaaatgaatagcacactatagtcaagagtatgacttaccaaattcattattggttccaagcatcttgaaagagaagtccatcgtctctcttactgtcatctcagcatggctaacagaagcacgcagcgacaagattaccccacatgttgtatcatggtttactagctagagaggctactcaagatgaggaatttgaagttatgtatggtgaggacgatgatgaagacaaagatgacgaggatgatgatgattatgatacaaagaccaagggggctactggagggggaagggcagcagcgaacgacctgttgagtgcaagcaggagtgagtgctgcacattgaatattggcatgcattggttgtggagcaattagtctggttctacttgatgcaaggtcattgagttattgaagtgatattttgtcgaatattttatatgccattgcaaagcacgggcatctaactagtctttcttatatatgtacactacaatacataatcatttatgccattgtttactacaaatatatatattaggcaactcttgaactggttgcaaggaatatttccactaaatctgcagttgct

SEQ ID NO: 58504 - DNA, 2146 bp, Zea Mays
ccgtgctgctcaatgggaagcagtaccggccagtctggtcaaacgacggcaccgtgatccacgcagatttctactagggagaaagaagataagtgagaggatgaagcttcttcaagatcttgttcctgaatgcagtaagatcattggcaaggcaatcatgctcgatgagattatcaactatgtgcagtcattgcaacgacaagtcgagttcttgtcaatgaaactcgcaactgttaaccccgagcttggctttgacattgagcagatcatatccaaacaaatgctgctttcacaagactgacatcttgctttctatggagtcaaaccaggatcaagcggccttactggcccatttaaccaaggaatcatgcagccataattgatgtgcaccattgccaatcccgttgatgttttgcatggagctattcacgaggcgtcaacaatgaaccattattgatttgtccactgttatgttcgttgctggtgcaatcatgggatacattatgttcactgaatctacactcccagttcacactgaacttacccctaaatcttgtggcttccaagattgcagtctagactacggtgatgaatccaataaccaaatatccttggacttttattgtagctttttgtgtgcatttgttccgatacttaacaattaacattatatgacaccatagtttctctaatcacatgtaactccatctagccatctaggtttgtcctaagtcaaacatatcttttaattttgattagaaatatctataaaaaataattgtcttaaataagcagagttatttggttttagtaatgaatttagcaatgccaatgctatttttatcgttctatataaattttagatattcatggtcaaacttaaaaatgtttgacttggacaaatatagatagacctacacatgcattgtgattttaggaagtcctacaattctcctccccaaagtctgctatcaacttctaacagttagtccagttttcatgaacaaatttagttttaatcattctatgttgtgccaaccgccagcaactaataatcagagctgggtcatatcatcatatcatagtagattgtatagctttcttccctgtgcatgcttactggttactagatgaaaaaggtcgtgttacgttatggcgcactcctctcctttgaataggacatgctttcacactctcaattcggcatatccttctagagactagctgtgagttgggtcctaaatgtttcttccatgttcaattcgaatggcattgttgtgttaattagccgtcctgttttgtatttttttcctacaagttatagtggttacattaatgactaaatcaagatcttgacccactttattgatgacacccttttttcttcttattgcttctcctatcgtctctgagtttgtcattccattcaaacacgaaatttgtgtcagtatagatgccatggaaattttggtttagcttgagtattttgtagatacttcattcttgagtattcttgagtttgccttgttataaattgcagcacactccaatggtcttctaaatgaatagcacactatagtcaagagtatgacttaccaaattcattattggttccaagcatcttgaaagagaagtccatcgtctctcttactgtcatctcagcatggctaacagaagcacgcagcgacaagattaccccacatgttgtatcatggtttactagctagagaggctactcaagatgaggaatttgaagttatgtatggtgaggacgatgatgaagacaaagatgacgaggatgatgatgattatgatacaaagaccaagggggctactggagggggaagggcagcagcgaacgacctgttgagtgcaagcaggagtgagtgctgcacattgaatattggcatgcattggttgtggagcaattagtctggttctacttgatgcaaggtcattgagttattgaagtgatattttgtcgaatattttatatgccattgcaaagcacgggcatctaactagtctttcttatatatgtacactacaatacataatcatttatgccattgtttactacaaatatatatattaggcaactcttgaactggttgcaaggaatatttccactaaatctgcagttgct

SEQ ID NO: 58505 - DNA, 2430 bp, Zea Mays
ggcaaagcgaggccaagccactaacagccaaagccttgcagaaagactagggagaaagaagataagtgagaggatgaagcttcttcaagatcttgttcctgaatgcagtaagatcattggcaaggcaatcatgctcgatgagattatcaactatgtgcagtcattgcaacgacaagtcgaggtagtgttagtgcatctgtagctgaattgttttgtaatatatgtggcatcttgttagtgcatctgcagttcttgtcaatgaaactcgcaactgttaaccccgagcttggctttgacattgagcagatcatatccaaacaaatgctgctttcacaagactgacatcttgctttctatggagtcaaaccaggatcaagcggccttactggcccatttaaccaaggaatcatgcagccataattgatgtgcaccattgccaatcccgttgatgttttgcatggagctattcacgaggcgtcaacaatgaaccattattgatttgtccactgttatgttcgttgctggtgcaatcatgggatacattatgttcactgaatctacactcccagttcacactgaacttacccctaaatcttgtggcttccaagattgcagtctagactacggtgatgaatccaataaccaaatatccttggacttttattgtagctttttgtgtgcatttgttccgatacttaacaattaacattatatgacaccatagtttctctaatcacatgtaactccatctagccatctaggtttgtcctaagtcaaacatatcttttaattttgattagaaatatctataaaaaataattgtcttaaataagcagagttatttggttttagtaatgaatttagcaatgccaatgctatttttatcgttctatataaattttagatattcatggtcaaacttaaaaatgtttgacttggacaaatatagatagacctacacatgcattgtgattttaggaagtcctacaattctcctccccaaagtctgctatcaacttctaacagttagtccagttttcatgaacaaatttagttttaatcattctatgttgtgccaaccgccagcaactaataatcagagctgggtcatatcatcatatcatagtagattgtatagctttcttccctgtgcatgcttactggttactagatgaaaaaggtcgtgttacgttatggcgcactcctctcctttgaataggacatgctttcacactctcaattcggcatatccttctagagactagctcacactccaatggtcttctaaatgaatagcacactatagtcaagagtatgacttaccaaattcattattggttccaagcatcttgaaagagaagtccatcgtctctcttactgtcatctcagcatggctaacagaagcacgcagtaggagtttctccaccttcctttcatcatgctacttcttgctgagggtggcgtgaaaaagtcagcaacaagttcctctatggtggcgacagagaagacaagggaggctctggcgacattgtggcgacgacgagaagcgagcaaggatataaatcgatctgtttctttggaaattagctgtagtagaatatttacgtgatacaaatctctattctctatatctctatatctattacgtttctcatgtctctatttttattataatggtttggaaaaatgtcgctcatcttctgctctaatctttcgaaattaggtgtagtggaatattattgccagatattgctacactacaatagtgaaattattgtccaaaattgaagattgccgtatgccttaggtcactataaaatcgagttattttataataatagttttttgttttacataagccccactcttttatctaaaagcccataaattattgtccaaaatggaagattaagagtttgtttattacttctaaattatcctttctatatctaccatatgtaccatcagcgacaagattaccccacatgttgtatcatggtttactagctagagaggctactcaagatgaggaatttgaagttatgtatggtgaggacgatgatgaagacaaagatgacgaggatgatgatgattatgatacaaagaccaagggggctactggagggggaagggcagcagcgaacgacctgttgagtgcaagcaggagtgagtgctgcacattgaatattggcatgcattggttgtggagcaattagtctggttctacttgatgcaaggtcattgagttattgaagtgatattttgtcgaatattttatatgccattgcaaagcacgggcatctaactagtctttcttatatatgtacactacaatacataatcatttatgccattgtttactacaaatatatatattaggcaactcttgaactggttgcaaggaatatttccactaaatctgcagttgct

SEQ ID NO: 58506 - DNA, 2603 bp, Zea Mays
agccttgcagaaagattaatgaaactgcagctagggagaaagaagataagtgagaggatgaagcttcttcaagatcttgttcctgaatgcagtaagatcattggcaaggcaatcatgctcgatgagattatcaactatgtgcagtcattgcaacgacaagtcgagatcatatccaaacaaatgctgctttcacaagactgacatcttgctttctatggagtcaaaccaggatcaagcggccttactggcccatttaaccaaggaatcatgcagccataattgatgtgcaccattgccaatcccgttgatgttttgcatggagctattcacgaggcgtcaacaatgaaccattattgatttgtccactgttatgttcgttgctggtgcaatcatgggatacattatgttcactgaatctacactcccagttcacactgaacttacccctaaatcttgtggcttccaagattgcagtctagactacggtgatgaatccaataaccaaatatccttggacttttattgtagctttttgtgtgcatttgttccgatacttaacaattaacattatatgacaccatagtttctctaatcacatgtaactccatctagccatctaggtttgtcctaagtcaaacatatcttttaattttgattagaaatatctataaaaaataattgtcttaaataagcagagttatttggttttagtaatgaatttagcaatgccaatgctatttttatcgttctatataaattttagatattcatggtcaaacttaaaaatgtttgacttggacaaatatagatagacctacacatgcattgtgattttaggaagtcctacaattctcctccccaaagtctgctatcaacttctaacagttagtccagttttcatgaacaaatttagttttaatcattctatgttgtgccaaccgccagcaactaataatcagagctgggtcatatcatcatatcatagtagattgtatagctttcttccctgtgcatgcttactggttactagatgaaaaaggtcgtgttacgttatggcgcactcctctcctttgaataggacatgctttcacactctcaattcggcatatccttctagagactagctgtgagttgggtcctaaatgtttcttccatgttcaattcgaatggcattgttgtgttaattagccgtcctgttttgtatttttttcctacaagttatagtggttacattaatgactaaatcaagatcttgacccactttattgatgacacccttttttcttcttattgcttctcctatcgtctctgagtttgtcattccattcaaacacgaaatttgtgtcagtatagatgccatggaaattttggtttagcttgagtattttgtagatacttcattcttgagtattcttgagtttgccttgttataaattgcagcacactccaatggtcttctaaatgaatagcacactatagtcaagagtatgacttaccaaattcattattggttccaagcatcttgaaagagaagtccatcgtctctcttactgtcatctcagcatggctaacagaagcacgcagtaggagtttctccaccttcctttcatcatgctacttcttgctgagggtggcgtgaaaaagtcagcaacaagttcctctatggtggcgacagagaagacaagggaggctctggcgacattgtggcgacgacgagaagcgagcaaggatataaatcgatctgtttctttggaaattagctgtagtagaatatttacgtgatacaaatctctattctctatatctctatatctattacgtttctcatgtctctatttttattataatggtttggaaaaatgtcgctcatcttctgctctaatctttcgaaattaggtgtagtggaatattattgccagatattgctacactacaatagtgaaattattgtccaaaattgaagattgccgtatgccttaggtcactataaaatcgagttattttataataatagttttttgttttacataagccccactcttttatctaaaagcccataaattattgtccaaaatggaagattaagagtttgtttattacttctaaattatcctttctatatctaccatatgtaccatcagcgacaagattaccccacatgttgtatcatggtttactagctagagaggctactcaagatgaggaatttgaagttatgtatggtgaggacgatgatgaagacaaagatgacgaggatgatgatgattatgatacaaagaccaagggggctactggagggggaagggcagcagcgaacgacctgttgagtgcaagcaggagtgagtgctgcacattgaatattggcatgcattggttgtggagcaattagtctggttctacttgatgcaaggtcattgagttattgaagtgatattttgtcgaatattttatatgccattgcaaagcacgggcatctaactagtctttcttatatatgtacactacaatacataatcatttatgccattgtttactacaaatatatatattaggcaactcttgaactggttgcaaggaatatttccactaaatctgcagttgct

SEQ ID NO: 58507 - DNA, 1869 bp, Zea Mays
gctttattatctttcacacacttgaagttaatgaaactgcagctagggagaaagaagataagtgagaggatgaagcttcttcaagatcttgttcctgaatgcagtaagatcattggcaaggcaatcatgctcgatgagattatcaactatgtgcagtcattgcaacgacaagtcgaggtagtgttagtgcatctgtagctgaattgttttgtaatatatgtggcatcttgttagtgcatctgcagttcttgtcaatgaaactcgcaactgttaaccccgagcttggctttgacattgagcagatcatatccaaacaaatgctgctttcacaagactgacatcttgctttctatggagtcaaaccaggatcaagcggccttactggcccatttaaccaaggaatcatgcagccataattgatgtgcaccattgccaatcccgttgatgttttgcatggagctattcacgaggcgtcaacaatgaaccattattgatttgtccactgttatgttcgttgctggtgcaatcatgggatacattatgttcactgaatctacactcccagttcacactgaacttacccctaaatcttgtggcttccaagattgcagtctagactacggtgatgaatccaataaccaaatatccttggacttttattgtagctttttgtgtgcatttgttccgatacttaacaattaacattatatgacaccatagtttctctaatcacatgtaactccatctagccatctaggtttgtcctaagtcaaacatatcttttaattttgattagaaatatctataaaaaataattgtcttaaataagcagagttatttggttttagtaatgaatttagcaatgccaatgctatttttatcgttctatataaattttagatattcatggtcaaacttaaaaatgtttgacttggacaaatatagatagacctacacatgcattgtgattttaggaagtcctacaattctcctccccaaagtctgctatcaacttctaacagttagtccagttttcatgaacaaatttagttttaatcattctatgttgtgccaaccgccagcaactaataatcagagctgggtcatatcatcatatcatagtagattgtatagctttcttccctgtgcatgcttactggttactagatgaaaaaggtcgtgttacgttatggcgcactcctctcctttgaataggacatgctttcacactctcaattcggcatatccttctagagactagctcacactccaatggtcttctaaatgaatagcacactatagtcaagagtatgacttaccaaattcattattggttccaagcatcttgaaagagaagtccatcgtctctcttactgtcatctcagcatggctaacagaagcacgcagcgacaagattaccccacatgttgtatcatggtttactagctagagaggctactcaagatgaggaatttgaagttatgtatggtgaggacgatgatgaagacaaagatgacgaggatgatgatgattatgatacaaagaccaagggggctactggagggggaagggcagcagcgaacgacctgttgagtgcaagcaggagtgagtgctgcacattgaatattggcatgcattggttgtggagcaattagtctggttctacttgatgcaaggtcattgagttattgaagtgatattttgtcgaatattttatatgccattgcaaagcacgggcatctaactagtctttcttatatatgtacactacaatacataatcatttatgccattgtttactacaaatatatatattaggcaactcttgaactggttgcaaggaatatttccactaaatctgcagttgct

SEQ ID NO: 58508 - DNA, 2180 bp, Zea Mays
gctttattatctttcacacacttgaagttaatgaaactgcagctagggagaaagaagataagtgagaggatgaagcttcttcaagatcttgttcctgaatgcagtaagatcattggcaaggcaatcatgctcgatgagattatcaactatgtgcagtcattgcaacgacaagtcgaggtagtgttagtgcatctgtagctgaattgttttgtaatatatgtggcatcttgttagtgcatctgcagttcttgtcaatgaaactcgcaactgttaaccccgagcttggctttgacattgagcagatcatatccaaacaagtaaagccacccactcgatcaccatatctccctctagtcaaaccaggatcaagcggccttactggcccatttaaccaaggaatcatgcagccataattgatgtgcaccattgccaatcccgttgatgttttgcatggagctattcacgaggcgtcaacaatgaaccattattgatttgtccactgttatgttcgttgctggtgcaatcatgggatacattatgttcactgaatctacactcccagttcacactgaacttacccctaaatcttgtggcttccaagattgcagtctagactacggtgatgaatccaataaccaaatatccttggacttttattgtagctttttgtgtgcatttgttccgatacttaacaattaacattatatgacaccatagtttctctaatcacatgtaactccatctagccatctaggtttgtcctaagtcaaacatatcttttaattttgattagaaatatctataaaaaataattgtcttaaataagcagagttatttggttttagtaatgaatttagcaatgccaatgctatttttatcgttctatataaattttagatattcatggtcaaacttaaaaatgtttgacttggacaaatatagatagacctacacatgcattgtgattttaggaagtcctacaattctcctccccaaagtctgctatcaacttctaacagttagtccagttttcatgaacaaatttagttttaatcattctatgttgtgccaaccgccagcaactaataatcagagctgggtcatatcatcatatcatagtagattgtatagctttcttccctgtgcatgcttactggttactagatgaaaaaggtcgtgttacgttatggcgcactcctctcctttgaataggacatgctttcacactctcaattcggcatatccttctagagactagctgtgagttgggtcctaaatgtttcttccatgttcaattcgaatggcattgttgtgttaattagccgtcctgttttgtatttttttcctacaagttatagtggttacattaatgactaaatcaagatcttgacccactttattgatgacacccttttttcttcttattgcttctcctatcgtctctgagtttgtcattccattcaaacacgaaatttgtgtcagtatagatgccatggaaattttggtttagcttgagtattttgtagatacttcattcttgagtattcttgagtttgccttgttataaattgcagcacactccaatggtcttctaaatgaatagcacactatagtcaagagtatgacttaccaaattcattattggttccaagcatcttgaaagagaagtccatcgtctctcttactgtcatctcagcatggctaacagaagcacgcagcgacaagattaccccacatgttgtatcatggtttactagctagagaggctactcaagatgaggaatttgaagttatgtatggtgaggacgatgatgaagacaaagatgacgaggatgatgatgattatgatacaaagaccaagggggctactggagggggaagggcagcagcgaacgacctgttgagtgcaagcaggagtgagtgctgcacattgaatattggcatgcattggttgtggagcaattagtctggttctacttgatgcaaggtcattgagttattgaagtgatattttgtcgaatattttatatgccattgcaaagcacgggcatctaactagtctttcttatatatgtacactacaatacataatcatttatgccattgtttactacaaatatatatattaggcaactcttgaactggttgcaaggaatatttccactaaatctgcagttgct

SEQ ID NO: 58509 - DNA, 2009 bp, Zea Mays
gctttattatctttcacacacttgaagttaatgaaactgcagctagggagaaagaagataagtgagaggatgaagcttcttcaagatcttgttcctgaatgcagtaagatcattggcaaggcaatcatgctcgatgagattatcaactatgtgcagtcattgcaacgacaagtcgagatcatatccaaacaagatcaagcggccttactggcccatttaaccaaggaatcatgcagccataattgatgtgcaccattgccaatcccgttgatgttttgcatggagctattcacgaggcgtcaacaatgaaccattattgatttgtccactgttatgttcgttgctggtgcaatcatgggatacattatgttcactgaatctacactcccagttcacactgaacttacccctaaatcttgtggcttccaagattgcagtctagactacggtgatgaatccaataaccaaatatccttggacttttattgtagctttttgtgtgcatttgttccgatacttaacaattaacattatatgacaccatagtttctctaatcacatgtaactccatctagccatctaggtttgtcctaagtcaaacatatcttttaattttgattagaaatatctataaaaaataattgtcttaaataagcagagttatttggttttagtaatgaatttagcaatgccaatgctatttttatcgttctatataaattttagatattcatggtcaaacttaaaaatgtttgacttggacaaatatagatagacctacacatgcattgtgattttaggaagtcctacaattctcctccccaaagtctgctatcaacttctaacagttagtccagttttcatgaacaaatttagttttaatcattctatgttgtgccaaccgccagcaactaataatcagagctgggtcatatcatcatatcatagtagattgtatagctttcttccctgtgcatgcttactggttactagatgaaaaaggtcgtgttacgttatggcgcactcctctcctttgaataggacatgctttcacactctcaattcggcatatccttctagagactagctgtgagttgggtcctaaatgtttcttccatgttcaattcgaatggcattgttgtgttaattagccgtcctgttttgtatttttttcctacaagttatagtggttacattaatgactaaatcaagatcttgacccactttattgatgacacccttttttcttcttattgcttctcctatcgtctctgagtttgtcattccattcaaacacgaaatttgtgtcagtatagatgccatggaaattttggtttagcttgagtattttgtagatacttcattcttgagtattcttgagtttgccttgttataaattgcagcacactccaatggtcttctaaatgaatagcacactatagtcaagagtatgacttaccaaattcattattggttccaagcatcttgaaagagaagtccatcgtctctcttactgtcatctcagcatggctaacagaagcacgcagcgacaagattaccccacatgttgtatcatggtttactagctagagaggctactcaagatgaggaatttgaagttatgtatggtgaggacgatgatgaagacaaagatgacgaggatgatgatgattatgatacaaagaccaagggggctactggagggggaagggcagcagcgaacgacctgttgagtgcaagcaggagtgagtgctgcacattgaatattggcatgcattggttgtggagcaattagtctggttctacttgatgcaaggtcattgagttattgaagtgatattttgtcgaatattttatatgccattgcaaagcacgggcatctaactagtctttcttatatatgtacactacaatacataatcatttatgccattgtttactacaaatatatatattaggcaactcttgaactggttgcaaggaatatttccactaaatctgcagttgct

SEQ ID NO: 58510 - DNA, 1140 bp, Zea Mays
atccaccaccacccctatccccatcaacaacgcaaaaacctaaaccgctcgctctggtccatccagatccacagtcgccatcgcccccacctctcgtcgtcgtctccgtgcaccactcggcccccactgtcggccgcgcctcccagccacctcgtgccgctctgccaccccgcccgtcctccactgcccctatggctgccatgggcgagcgctgcccgagtagccgaccgccctttccccgccgtcttcagctgccgcgcgctgccccgcctccccgccaggcctccactgcccacttctccggcggctacagcggaaggcaaggagaaggacagcgggcagcggtagctggatctagcaagcacagggcgtcttctccatccgccacctctcggcgcatcatcagctgagagtttcaggcatttgctcaggtgttttcatttcataatatagctactactattttaatgatgggtaagagattaggtggttgtactgtacaaaatattcatgtgttttactggccatcaagtttcccttaaattaatgcctaattgcatttgttggggttacgtactaatgccttgaaaggactgtgtaatattccagaatattgtgttcattttcataagtaaaatttgtttgggtgaagttgatttttcacatatatttgagatctgtttagacaagccttgatgaacttggttgtttagcatagttcggctttcacaaatcacaatgtttagaatctttttatacgcatggggcttatatgatgaagcttcactgctccactactatttgacatacaatatgtttagaatgttttttataattgagctttcacaatgtttagaatcttttattcttataatgtatgtttttatgccacgtactcatagtttttacaatcagttgcttatgatccttcagttcattaacgaacttttaggtggttgtgcttgatcggtggtgttctcatgccttctgttttgtggctgtaggatatcaagaggagggaagaggcgctgaagaatggtgcagatacacatttgtttttgcataattgctgccatagctccaccaattgtatttcatgggaaatcattaacccagtgatgttgtctgctggaaaaggag

SEQ ID NO: 58511 - DNA, 1272 bp, Zea Mays
atccaccaccacccctatccccatcaacaacgcaaaaacctaaaccgctcgctctggtccatccagatccacagtcgccatcgcccccacctctcgtcgtcgtctccgtgcaccactcggcccccactgtcggccgcgcctcccagccacctcgtgccgctctgccaccccgcccgtcctccactgcccctatggctgccatgggcgagcgctgcccgagtagccgaccgccctttccccgccgtcttcagctgccgcgcgctgccccgcctccccgccaggcctccactgcccacttctccggcggctacagcggaaggcaaggagaaggacagcgggcagcggtagctggatctagcaagcacagggcgtcttctccatccgccacctctcggcgcatcatcagctgagagtttcaggcatttgctcaggtgttttcatttcataatatagctactactattttaatgatgggtaagagattaggtggttgtactgtacaaaatattcatgtgttttactggccatcaagtttcccttaaattaatgcctaattgcatttgttggggttacgtactaatgccttgaaaggactgtgtaatattccagaatattgtgttcattttcataagtaaaatttgtttgggtgaagttgatttttcacatatatttgagatctgtttagacaagccttgatgaacttggttgtttagcatagttcggctttcacaaatcacaatgtttagaatctttttatacgcatggggcttatatgatgaagcttcactgctccactactatttgacatacaatatgtttagaatgttttttataattgagctttcacaatgtttagaatcttttattcttataatgtatgtttttatgccacgtactcatagtttttacaatcagttgcttatgatccttcagttcattaacgaacttttaggtggttgtgcttgatcggtggtgttctcatgccttctgttttgtggctgtaggatatcaagaggagggaagaggcgctgaagaatggtgcagatacacatttgtttttgcataattgctgccatagctccaccaattgtatttcatgggaaatcattaacatatttcgttccctccgttgagaagatccagcaactccttgtgctatgtagccccctttgaagataaaaaaacttctgataggtttggagctactgctctcagctgcagaaatggaattgagggtatccatggagatgcatgtagctgaactcagtcaag

SEQ ID NO: 58512 - DNA, 2427 bp, Zea Mays
cacaagagtgctagggcgagaaaaacaaatgctaccacgctacgctatagttcgccgcctcctcgttaacgttcacacctcctacggcacacccacactgcctttgcctactcccgtcccgtcgcagccgtctcgctcctccgtctccattccccgcctcgtcccgccgcagccgcggccgcgaggagccttccccgcctctcttcccgctcgctgggccctgcggctcgcagccagcattccgggctcctggtcgccgtgagccttgggaggttttgcgcggatctgaggctgcccgggctggggaattcgggctgatacctcgcggcgggagtcgggctgagttgatttggcgagtttaggtgtgcggagggaggaattccgggaggaacagttggttggtctgcgagagtttggtgggcggtagggtggtcgggcgggcgggcgggcgacgtacttgcgccccggaggccgccgtcgctgcttcgggcaagcgatgatcgagcagttcgtcaacttcgtcatccggccgcctcgtgcagagtacaatccagatcagtatttatgggagccagagttcactcttgccggaaggaagtataaaaggctagatttggaggcaacttacgaatgaaagaagtcagaccttaaagtgcagccactatgttcctgctgtcatcccagaaaacacttcccttccatgtgtagtctactgccatgggaatagtggatgcagagcagatgcaaatgaagccgctgtcatacttcttccttcaaatatcaccctttttacacttgactttgcgggatcagggctatcaagtggagattatgtcagccttggttggcatgagaagcaggatctcaaatgtgctgtgtcctttctgcgtaagaataagcaagtttcttgtataggtctttggggacgctcaatgggtgctgttacaagtctgctatatggagcagaagacccctcaattgctggcatggttctggatagtgctttcgctaacttatatgacttaatgatggagcttgtagaagtttacaaaatacgagttcctaagttcacggttaagatggctgttcagtacatgcgatgcgtcattcagagaagagctaaatttgacataatggatcttaatgttgtccagtttgcacccaagacgtttattcctgcactatttggacatgcttcaaatgatatgtttattcagcctcatcacacagaccatattcatcaggcttatgcgggggataaaaatctaatcaaatttgagggtgatcacaattcgccaagaccccagttttattacgactctgtttcaatattcttctacaacgttcttcacccacctcagtttccttcaacctgcacacataaacttgataagtattataaccttggtgcttttaagggtgctgctggtactaatgagagcttattgtatgagatcatcaatggtctacgggcagctggcactgatgcaggaagttcatcagctgctacagctagtttcacgaatgctacaaaatcagtagttgaattgctgacagagagggtaaatcagctatctgttaaaaatgataatgacttggattttcttttggatgaaaaccataaccttactgagatggacggtaacacaggagagtgtcatttagaggataaatcaaacagacaaacagatgaatgctgttcgtataccagctcaaaccgagagagctggggaagatgttcttccttgggtggagctagtgatggattgtcatcaggcgaacagcctgagatacctaatcataagcttaagagcttgacactaagggctctagcaaccccactgagacgggtacaaaggaaacctctcgcgatcccgaaggagaagaatcgatcactgtggaagaggttgaaaaaggagaggcaacagatgggggaaaacatatcccagcgtctgcggttgtgtctccaaggccaggctcgacacaagagaaccaaatcgtcttgacaactgtggatacatatttagctcttggacaaatctgctaggaactcactgatgattcagcaaccgagccgcgccgcaatttggagcttctggcactcagcgccaatcgtgccgtgtacattggttgaacattacctagaaatcttagatcatggattgtcccggacccaatgtgttaactgtcagtctttaatgttcgtttcttatgtttttttccccaatgtaatcctgtaaatttgaaggctagaactgcccatgtacttgtggttgagggagggacaccggttcgttgcttttttcaggatttgtgtagggtttggaggtcgagctgtatcgacagaatctcattttctatgttgctcggtaacgtctctgatttgctatgctggcgtgacatggttgattggttggtgaattgcac

SEQ ID NO: 58513 - DNA, 2349 bp, Zea Mays
aaacaaatgctaccacgctacgctatagttcgccgcctcctcgttaacgttcacacctcctacggcacacccacactgcctttgcctactcccgtcccgtcgcagccgtctcgctcctccgtctccattccccgcctcgtcccgccgcagccgcggccgcgaggagccttccccgcctctcttcccgctcgctgggccctgcggctcgcagccagcattccgggctcctggtcgccgtgagccttgggaggttttgcgcggatctgaggctgcccgggctggggaattcgggctgatacctcgcggcgggagtcgggctgagttgatttggcgagtttaggtgtgcggagggaggaattccgggaggaacagttggttggtctgcgagagtttggtgggcggtagggtggtcgggcgggcgggcgggcgacgtacttgcgccccggaggccgccgtcgctgcttcgggcaagcgatgatcgagcagttcgtcaacttcgtcatccggccgcctcgtgcagagtacaatccagatcagtatttatgggagccagagttcactcttgccggaaggaagtataaaaggctagatttggagcttacgaatgaaagaagtcagaccttaaagtgcagccactatgttcctgctgtcatcccagaaaacacttcccttccatgtgtagtctactgccatgggaatagtggatgcagagcagatgcaaatgaagccgctgtcatacttcttccttcaaatatcaccctttttacacttgactttgcgggatcagggctatcaagtggagattatgtcagccttggttggcatgagaagcaggatctcaaatgtgctgtgtcctttctgcgtaagaataagcaagtttcttgtataggtctttggggacgctcaatgggtgctgttacaagtctgctatatggagcagaagacccctcaattgctggcatggttctggatagtgctttcgctaacttatatgacttaatgatggagcttgtagaagtttacaaaatacgagttcctaagttcacggttaagatggctgttcagtacatgcgatgcgtcattcagagaagagctaaatttgacataatggatcttaatgttgtccagtttgcacccaagacgtttattcctgcactatttggacatgcttcaaatgatatgtttattcagcctcatcacacagaccatattcatcaggcttatgcgggggataaaaatctaatcaaatttgagggtgatcacaattcgccaagaccccagttttattacgactctgtttcaatattcttctacaacgttcttcacccacctcagtttccttcaacctgcacacataaacttgataagtattataaccttggtgcttttaagggtgctgctggtactaatgagagcttattgtatgagatcatcaatggtctacgggcagctggcactgatgcaggaagttcatcagctgctacagctagtttcacgaatgctacaaaatcagtagttgaattgctgacagagagggtaaatcagctatctgttaaaaatgataatgacttggagagtgtcatttagaggataaatcaaacagacaaacagatgaatgctgttcgtataccagctcaaaccgagagagctggggaagatgttcttccttgggtggagctagtgatggattgtcatcaggcgaacagcctgagatacctaatcataagcttaagagcttgacactaagggctctagcaaccccactgagacgggtacaaaggaaacctctcgcgatcccgaaggagaagaatcgatcactgtggaagaggttgaaaaaggagaggcaacagatgggggaaaacatatcccagcgtctgcggttgtgtctccaaggccaggctcgacacaagagaaccaaatcgtcttgacaactgtggatacatatttagctcttggacaaatctgctaggaactcactgatgattcagcaaccgagccgcgccgcaatttggagcttctggcactcagcgccaatcgtgccgtgtacattggttgaacattacctagaaatcttagatcatggattgtcccggacccaatgtgttaactgtcagtctttaatgttcgtttcttatgtttttttccccaatgtaatcctgtaaatttgaaggctagaactgcccatgtacttgtggttgagggagggacaccggttcgttgcttttttcaggatttgtgtagggtttggaggtcgagctgtatcgacagaatctcattttctatgttgctcggtaacgtctctgatttgctatgctggcgtgacatggttgattggttggtgaattgcac

SEQ ID NO: 58514 - DNA, 2401 bp, Zea Mays
aaacaaatgctaccacgctacgctatagttcgccgcctcctcgttaacgttcacacctcctacggcacacccacactgcctttgcctactcccgtcccgtcgcagccgtctcgctcctccgtctccattccccgcctcgtcccgccgcagccgcggccgcgaggagccttccccgcctctcttcccgctcgctgggccctgcggctcgcagccagcattccgggctcctggtcgccgtgagccttgggaggttttgcgcggatctgaggctgcccgggctggggaattcgggctgatacctcgcggcgggagtcgggctgagttgatttggcgagtttaggtgtgcggagggaggaattccgggaggaacagttggttggtctgcgagagtttggtgggcggtagggtggtcgggcgggcgggcgggcgacgtacttgcgccccggaggccgccgtcgctgcttcgggcaagcgatgatcgagcagttcgtcaacttcgtcatccggccgcctcgtgcagagtacaatccagatcagtatttatgggagccagagttcactcttgccggaaggaagtataaaaggctagatttggagcttacgaatgaaagaagtcagaccttaaagtgcagccactatgttcctgctgtcatcccagaaaacacttcccttccatgtgtagtctactgccatgggaatagtggatgcagagcagatgcaaatgaagccgctgtcatacttcttccttcaaatatcaccctttttacacttgactttgcgggatcagggctatcaagtggagattatgtcagccttggttggcatgagaagcaggatctcaaatgtgctgtgtcctttctgcgtaagaataagcaagtttcttgtataggtctttggggacgctcaatgggtgctgttacaagtctgctatatggagcagaagacccctcaattgctggcatggttctggatagtgctttcgctaacttatatgacttaatgatggagcttgtagaagtttacaaaatacgagttcctaagttcacggttaagatggctgttcagtacatgcgatgcgtcattcagagaagagctaaatttgacataatggatcttaatgttgtccagtttgcacccaagacgtttattcctgcactatttggacatgcttcaaatgatatgtttattcagcctcatcacacagaccatattcatcaggcttatgcgggggataaaaatctaatcaaatttgagggtgatcacaattcgccaagaccccagttttattacgactctgtttcaatattcttctacaacgttcttcacccacctcagtttccttcaacctgcacacataaacttgataagtattataaccttggtgcttttaagggtgctgctggtactaatgagagcttattgtatgagatcatcaatggtctacgggcagctggcactgatgcaggaagttcatcagctgctacagctagtttcacgaatgctacaaaatcagtagttgaattgctgacagagagggtaaatcagctatctgttaaaaatgataatgacttggattttcttttggatgaaaaccataaccttactgagatggacggtaacacaggagagtgtcatttagaggataaatcaaacagacaaacagatgaatgctgttcgtataccagctcaaaccgagagagctggggaagatgttcttccttgggtggagctagtgatggattgtcatcaggcgaacagcctgagatacctaatcataagcttaagagcttgacactaagggctctagcaaccccactgagacgggtacaaaggaaacctctcgcgatcccgaaggagaagaatcgatcactgtggaagaggttgaaaaaggagaggcaacagatgggggaaaacatatcccagcgtctgcggttgtgtctccaaggccaggctcgacacaagagaaccaaatcgtcttgacaactgtggatacatatttagctcttggacaaatctgctaggaactcactgatgattcagcaaccgagccgcgccgcaatttggagcttctggcactcagcgccaatcgtgccgtgtacattggttgaacattacctagaaatcttagatcatggattgtcccggacccaatgtgttaactgtcagtctttaatgttcgtttcttatgtttttttccccaatgtaatcctgtaaatttgaaggctagaactgcccatgtacttgtggttgagggagggacaccggttcgttgcttttttcaggatttgtgtagggtttggaggtcgagctgtatcgacagaatctcattttctatgttgctcggtaacgtctctgatttgctatgctggcgtgacatggttgattggttggtgaattgcac

SEQ ID NO: 58515 - DNA, 2324 bp, Zea Mays
caaatgctaccacgctacgctatagttcgccgcctcctcgttaacgttcacacctcctacggcacacccacactgcctttgcctactcccgtcccgtcgcagccgtctcgctcctccgtctccattccccgcctcgtcccgccgcagccgcggccgcgaggagccttccccgcctctcttcccgctcgctgggccctgcggctcgcagccagcattccgggctcctggtcgccgtgagccttgggaggttttgcgcggatctgaggctgcccgggctggggaattcgggctgatacctcgcggcgggagtcgggctgagttgatttggcgagtttaggtgtgcggagggaggaattccgggaggaacagttggttggtctgcgagagtttggtgggcggtagggtggtcgggcgggcgggcgggcgacgtacttgcgccccggaggccgccgtcgctgcttcgggcaagcgatgatcgagcagttcgtcaacttcgtcatccggccgcctcgagtacaatccagatcagtatttatgggagccagagttcactcttgccggaaggaagtataaaaggctagatttggagcttacgaatgaaagaagtcagaccttaaagtgcagccactatgttcctgctgtcatcccagaaaacacttcccttccatgtgtagtctactgccatgggaatagtggatgcagagcagatgcaaatgaagccgctgtcatacttcttccttcaaatatcaccctttttacacttgactttgcgggatcagggctatcaagtggagattatgtcagccttggttggcatgagaagcaggatctcaaatgtgctgtgtcctttctgcgtaagaataagcaagtttcttgtataggtctttggggacgctcaatgggtgctgttacaagtctgctatatggagcagaagacccctcaattgctggcatggttctggatagtgctttcgctaacttatatgacttaatgatggagcttgtagaagtttacaaaatacgagttcctaagttcacggttaagatggctgttcagtacatgcgatgcgtcattcagagaagagctaaatttgacataatggatcttaatgttgtccagtttgcacccaagacgtttattcctgcactatttggacatgcttcaaatgatatgtttattcagcctcatcacacagaccatattcatcaggcttatgcgggggataaaaatctaatcaaatttgagggtgatcacaattcgccaagaccccagttttattacgactctgtttcaatattcttctacaacgttcttcacccacctcagtttccttcaacctgcacacataaacttgataagtattataaccttggtgcttttaagggtgctgctggtactaatgagagcttattgtatgagatcatcaatggtctacgggcagctggcactgatgcaggaagttcatcagctgctacagctagtttcacgaatgctacaaaatcagtagttgaattgctgacagagagggtaaatcagctatctgttaaaaatgataatgacttggataaatcaaacagacaaacagatgaatgctgttcgtataccagctcaaaccgagagagctggggaagatgttcttccttgggtggagctagtgatggattgtcatcaggcgaacagcctgagatacctaatcataagcttaagagcttgacactaagggctctagcaaccccactgagacgggtacaaaggaaacctctcgcgatcccgaaggagaagaatcgatcactgtggaagaggttgaaaaaggagaggcaacagatgggggaaaacatatcccagcgtctgcggttgtgtctccaaggccaggctcgacacaagagaaccaaatcgtcttgacaactgtggatacatatttagctcttggacaaatctgctaggaactcactgatgattcagcaaccgagccgcgccgcaatttggagcttctggcactcagcgccaatcgtgccgtgtacattggttgaacattacctagaaatcttagatcatggattgtcccggacccaatgtgttaactgtcagtctttaatgttcgtttcttatgtttttttccccaatgtaatcctgtaaatttgaaggctagaactgcccatgtacttgtggttgagggagggacaccggttcgttgcttttttcaggatttgtgtagggtttggaggtcgagctgtatcgacagaatctcattttctatgttgctcggtaacgtctctgatttgctatgctggcgtgacatggttgattggttggtgaattgcac

SEQ ID NO: 58516 - DNA, 2392 bp, Zea Mays
cgctacgctatagttcgccgcctcctcgttaacgttcacacctcctacggcacacccacactgcctttgcctactcccgtcccgtcgcagccgtctcgctcctccgtctccattccccgcctcgtcccgccgcagccgcggccgcgaggagccttccccgcctctcttcccgctcgctgggccctgcggctcgcagccagcattccgggctcctggtcgccgtgagccttgggaggttttgcgcggatctgaggctgcccgggctggggaattcgggctgatacctcgcggcgggagtcgggctgagttgatttggcgagtttaggtgtgcggagggaggaattccgggaggaacagttggttggtctgcgagagtttggtgggcggtagggtggtcgggcgggcgggcgggcgacgtacttgcgccccggaggccgccgtcgctgcttcgggcaagcgatgatcgagcagttcgtcaacttcgtcatccggccgcctcgtgcagagtacaatccagatcagtatttatgggagccagagttcactcttgccggaaggaagtataaaaggctagatttggaggcaacttacgaatgaaagaagtcagaccttaaagtgcagccactatgttcctgctgtcatcccagaaaacacttcccttccatgtgtagtctactgccatgggaatagtggatgcagagcagatgcaaatgaagccgctgtcatacttcttccttcaaatatcaccctttttacacttgactttgcgggatcagggctatcaagtggagattatgtcagccttggttggcatgaggtctttggggacgctcaatgggtgctgttacaagtctgctatatggagcagaagacccctcaattgctggcatggttctggatagtgctttcgctaacttatatgacttaatgatggagcttgtagaagtttacaaaatacgagttcctaagttcacggttaagatggctgttcagtacatgcgatgcgtcattcagagaagagctaaatttgacataatggatcttaatgttgtccagtttgcacccaagacgtttattcctgcactatttggacatgcttcaaatgatatgtttattcagcctcatcacacagaccatattcatcaggcttatgcgggggataaaaatctaatcaaatttgagggtgatcacaattcgccaagaccccagttttattacgactctgtttcaatattcttctacaacgttcttcacccacctcagtttccttcaacctgcacacataaacttgataagtattataaccttggtgcttttaagggtgctgctggtactaatgagagcttattgtatgagatcatcaatggtctacgggcagctggcactgatgcaggaagttcatcagctgctacagctagtttcacgaatgctacaaaatcagtagttgaattgctgacagagagggtaaatcagctatctgttaaaaatgataatgacttggtaagtcaatcattgcctgctcttcctcttctacttgagatttttaactccactcgagtgcaggattttcttttggatgaaaaccataaccttactgagatggacggtaacacaggagagtgtcatttagaggataaatcaaacagacaaacagatgaatgctgttcgtataccagctcaaaccgagagagctggggaagatgttcttccttgggtggagctagtgatggattgtcatcaggcgaacagcctgagatacctaatcataagcttaagagcttgacactaagggctctagcaaccccactgagacgggtacaaaggaaacctctcgcgatcccgaaggagaagaatcgatcactgtggaagaggttgaaaaaggagaggcaacagatgggggaaaacatatcccagcgtctgcggttgtgtctccaaggccaggctcgacacaagagaaccaaatcgtcttgacaactgtggatacatatttagctcttggacaaatctgctaggaactcactgatgattcagcaaccgagccgcgccgcaatttggagcttctggcactcagcgccaatcgtgccgtgtacattggttgaacattacctagaaatcttagatcatggattgtcccggacccaatgtgttaactgtcagtctttaatgttcgtttcttatgtttttttccccaatgtaatcctgtaaatttgaaggctagaactgcccatgtacttgtggttgagggagggacaccggttcgttgcttttttcaggatttgtgtagggtttggaggtcgagctgtatcgacagaatctcattttctatgttgctcggtaacgtctctgatttgctatgctggcgtgacatggttgattggttggtgaattgcac

SEQ ID NO: 58517 - DNA, 2448 bp, Zea Mays
cgctacgctatagttcgccgcctcctcgttaacgttcacacctcctacggcacacccacactgcctttgcctactcccgtcccgtcgcagccgtctcgctcctccgtctccattccccgcctcgtcccgccgcagccgcggccgcgaggagccttccccgcctctcttcccgctcgctgggccctgcggctcgcagccagcattccgggctcctggtcgccgtgagccttgggaggttttgcgcggatctgaggctgcccgggctggggaattcgggctgatacctcgcggcgggagtcgggctgagttgatttggcgagtttaggtgtgcggagggaggaattccgggaggaacagttggttggtctgcgagagtttggtgggcggtagggtggtcgggcgggcgggcgggcgacgtacttgcgccccggaggccgccgtcgctgcttcgggcaagcgatgatcgagcagttcgtcaacttcgtcatccggccgcctcgagtacaatccagatcagtatttatgggagccagagttcactcttgccggaaggaagtataaaaggctagatttggaggcaacttacgaatgaaagaagtcagaccttaaagtgcagccactatgttcctgctgtcatcccagaaaacacttcccttccatgtgtagtctactgccatgggaatagtggatgcagagcagatgcaaatgaagccgctgtcatacttcttccttcaaatatcaccctttttacacttgactttgcgggatcagggctatcaagtggagattatgtcagccttggttggcatgagaagcaggatctcaaatgtgctgtgtcctttctgcgtaagaataagcaagtttcttgtataggtctttggggacgctcaatgggtgctgttacaagtctgctatatggagcagaagacccctcaattgctggcatggttctggatagtgctttcgctaacttatatgacttaatgatggagcttgtagaagtttacaaaatacgagttcctaagttcacggttaagatggctgttcagtacatgcgatgcgtcattcagagaagagctaaatttgacataatggatcttaatgttgtccagtttgcacccaagacgtttattcctgcactatttggacatgcttcaaatgatatgtttattcagcctcatcacacagaccatattcatcaggcttatgcgggggataaaaatctaatcaaatttgagggtgatcacaattcgccaagaccccagttttattacgactctgtttcaatattcttctacaacgttcttcacccacctcagtttccttcaacctgcacacataaacttgataagtattataaccttggtgcttttaagggtgctgctggtactaatgagagcttattgtatgagatcatcaatggtctacgggcagctggcactgatgcaggaagttcatcagctgctacagctagtttcacgaatgctacaaaatcagtagttgaattgctgacagagagggtaaatcagctatctgttaaaaatgataatgacttggtaagtcaatcattgcctgctcttcctcttctacttgagatttttaactccactcgagtgcaggattttcttttggatgaaaaccataaccttactgagatggacggtaacacaggagagtgtcatttagaggataaatcaaacagacaaacagatgaatgctgttcgtataccagctcaaaccgagagagctggggaagatgttcttccttgggtggagctagtgatggattgtcatcaggcgaacagcctgagatacctaatcataagcttaagagcttgacactaagggctctagcaaccccactgagacgggtacaaaggaaacctctcgcgatcccgaaggagaagaatcgatcactgtggaagaggttgaaaaaggagaggcaacagatgggggaaaacatatcccagcgtctgcggttgtgtctccaaggccaggctcgacacaagagaaccaaatcgtcttgacaactgtggatacatatttagctcttggacaaatctgctaggaactcactgatgattcagcaaccgagccgcgccgcaatttggagcttctggcactcagcgccaatcgtgccgtgtacattggttgaacattacctagaaatcttagatcatggattgtcccggacccaatgtgttaactgtcagtctttaatgttcgtttcttatgtttttttccccaatgtaatcctgtaaatttgaaggctagaactgcccatgtacttgtggttgagggagggacaccggttcgttgcttttttcaggatttgtgtagggtttggaggtcgagctgtatcgacagaatctcattttctatgttgctcggtaacgtctctgatttgctatgctggcgtgacatggttgattggttggtgaattgcac

SEQ ID NO: 58518 - DNA, 2447 bp, Zea Mays
cgctacgctatagttcgccgcctcctcgttaacgttcacacctcctacggcacacccacactgcctttgcctactcccgtcccgtcgcagccgtctcgctcctccgtctccattccccgcctcgtcccgccgcagccgcggccgcgaggagccttccccgcctctcttcccgctcgctgggccctgcggctcgcagccagcattccgggctcctggtcgccgtgagccttgggaggttttgcgcggatctgaggctgcccgggctggggaattcgggctgatacctcgcggcgggagtcgggctgagttgatttggcgagtttaggtgtgcggagggaggaattccgggaggaacagttggttggtctgcgagagtttggtgggcggtagggtggtcgggcgggcgggcgggcgacgtacttgcgccccggaggccgccgtcgctgcttcgggcaagcgatgatcgagcagttcgtcaacttcgtcatccggccgcctcgtgcagagtacaatccagatcagtatttatgggagccagagttcactcttgccggaaggaagtataaaaggctagatttggaggcaacttacgaatgaaagaagtcagaccttaaagtgcagccactatgttcctgctgtcatcccagaaaacacttcccttccatgtgtagtctactgccatgggaatagtggatgcagagcagatgcaaatgaagccgctgtcatacttcttccttcaaatatcaccctttttacacttgactttgcgggatcagggctatcaagtggagattatgtcagccttggttggcatgaggatctcaaatgtgctgtgtcctttctgcgtaagaataagcaagtttcttgtataggtctttggggacgctcaatgggtgctgttacaagtctgctatatggagcagaagacccctcaattgctggcatggttctggatagtgctttcgctaacttatatgacttaatgatggagcttgtagaagtttacaaaatacgagttcctaagttcacggttaagatggctgttcagtacatgcgatgcgtcattcagagaagagctaaatttgacataatggatcttaatgttgtccagtttgcacccaagacgtttattcctgcactatttggacatgcttcaaatgatatgtttattcagcctcatcacacagaccatattcatcaggcttatgcgggggataaaaatctaatcaaatttgagggtgatcacaattcgccaagaccccagttttattacgactctgtttcaatattcttctacaacgttcttcacccacctcagtttccttcaacctgcacacataaacttgataagtattataaccttggtgcttttaagggtgctgctggtactaatgagagcttattgtatgagatcatcaatggtctacgggcagctggcactgatgcaggaagttcatcagctgctacagctagtttcacgaatgctacaaaatcagtagttgaattgctgacagagagggtaaatcagctatctgttaaaaatgataatgacttggtaagtcaatcattgcctgctcttcctcttctacttgagatttttaactccactcgagtgcaggattttcttttggatgaaaaccataaccttactgagatggacggtaacacaggagagtgtcatttagaggataaatcaaacagacaaacagatgaatgctgttcgtataccagctcaaaccgagagagctggggaagatgttcttccttgggtggagctagtgatggattgtcatcaggcgaacagcctgagatacctaatcataagcttaagagcttgacactaagggctctagcaaccccactgagacgggtacaaaggaaacctctcgcgatcccgaaggagaagaatcgatcactgtggaagaggttgaaaaaggagaggcaacagatgggggaaaacatatcccagcgtctgcggttgtgtctccaaggccaggctcgacacaagagaaccaaatcgtcttgacaactgtggatacatatttagctcttggacaaatctgctaggaactcactgatgattcagcaaccgagccgcgccgcaatttggagcttctggcactcagcgccaatcgtgccgtgtacattggttgaacattacctagaaatcttagatcatggattgtcccggacccaatgtgttaactgtcagtctttaatgttcgtttcttatgtttttttccccaatgtaatcctgtaaatttgaaggctagaactgcccatgtacttgtggttgagggagggacaccggttcgttgcttttttcaggatttgtgtagggtttggaggtcgagctgtatcgacagaatctcattttctatgttgctcggtaacgtctctgatttgctatgctggcgtgacatggttgattggttggtgaattgcac

SEQ ID NO: 58519 - DNA, 3164 bp, Zea Mays
cgctacgctatagttcgccgcctcctcgttaacgttcacacctcctacggcacacccacactgcctttgcctactcccgtcccgtcgcagccgtctcgctcctccgtctccattccccgcctcgtcccgccgcagccgcggccgcgaggagccttccccgcctctcttcccgctcgctgggccctgcggctcgcagccagcattccgggctcctggtcgccgtgagccttgggaggttttgcgcggatctgaggctgcccgggctggggaattcgggctgatacctcgcggcgggagtcgggctgagttgatttggcgagtttaggtgtgcggagggaggaattccgggaggaacagttggttggtctgcgagagtttggtgggcggtagggtggtcgggcgggcgggcgggcgacgtacttgcgccccggaggccgccgtcgctgcttcgggcaagcgatgatcgagcagttcgtcaacttcgtcatccggccgcctcgcctgcaagttggtgggatttggcagccttcacgccattgccagtgatgatatgtcgccgcaattcctcacattttagtaggggggttattgtatgaatttcctacggatataagatagctagaccaacctaatgcaggtaaactgaggtaagcctttttccgcaccgtgtcctagcgactcagtgagatagatctcaccactgcaccaggtctgtccttctaccggccttggttctaaataaaaaagaagaagtataagcctctgttagaaggaaaaaaaaaacgtaccagcttctcactgtaatctcaacgattctcaaggcacaagaatgcaaaatttctgtacttgaatccttgctgtatccatttagaccatgtgttacattagtacatgagcaaaaagattgttgttcagcctttctattgagaatcatgtaccaggtttgcagtcaagcaagtagcttgtcataatcacatgtcctgtagttgcagaactaaacctgtttgtgttcgtaacccataacaaaactttacatttaattagcatgtgcatttataccaactgtacttttctaaattaactttgtgccttttctgtaagacgcgacaatgaatggataacgtaggttcatagccttcgggttttgatatctgcatcagattattttctctctattttctgctgagtggcgatgaactggcaatgcatttacagtgcagagtacaatccagatcagtatttatgggagccagagttcactcttgccggaaggaagtataaaaggctagatttggagcttacgaatgaaagaagtcagaccttaaagtgcagccactatgttcctgctgtcatcccagaaaacacttcccttccatgtgtagtctactgccatgggaatagtggatgcagagcagatgcaaatgaagccgctgtcatacttcttccttcaaatatcaccctttttacacttgactttgcgggatcagggctatcaagtggagattatgtcagccttggttggcatgagaagcaggatctcaaatgtgctgtgtcctttctgcgtaagaataagcaagtttcttgtataggtctttggggacgctcaatgggtgctgttacaagtctgctatatggagcagaagacccctcaattgctggcatggttctggatagtgctttcgctaacttatatgacttaatgatggagcttgtagaagtttacaaaatacgagttcctaagttcacggttaagatggctgttcagtacatgcgatgcgtcattcagagaagagctaaatttgacataatggatcttaatgttgtccagtttgcacccaagacgtttattcctgcactatttggacatgcttcaaatgatatgtttattcagcctcatcacacagaccatattcatcaggcttatgcgggggataaaaatctaatcaaatttgagggtgatcacaattcgccaagaccccagttttattacgactctgtttcaatattcttctacaacgttcttcacccacctcagtttccttcaacctgcacacataaacttgataagtattataaccttggtgcttttaagggtgctgctggtactaatgagagcttattgtatgagatcatcaatggtctacgggcagctggcactgatgcaggaagttcatcagctgctacagctagtttcacgaatgctacaaaatcagtagttgaattgctgacagagagggtaaatcagctatctgttaaaaatgataatgacttggtaagtcaatcattgcctgctcttcctcttctacttgagatttttaactccactcgagtgcaggattttcttttggatgaaaaccataaccttactgagatggacggtaacacaggagagtgtcatttagaggataaatcaaacagacaaacagatgaatgctgttcgtataccagctcaaaccgagagagctggggaagatgttcttccttgggtggagctagtgatggattgtcatcaggcgaacagcctgagatacctaatcataagcttaagagcttgacactaagggctctagcaaccccactgagacgggtacaaaggaaacctctcgcgatcccgaaggagaagaatcgatcactgtggaagaggttgaaaaaggagaggcaacagatgggggaaaacatatcccagcgtctgcggttgtgtctccaaggccaggctcgacacaagagaaccaaatcgtcttgacaactgtggatacatatttagctcttggacaaatctgctaggaactcactgatgattcagcaaccgagccgcgccgcaatttggagcttctggcactcagcgccaatcgtgccgtgtacattggttgaacattacctagaaatcttagatcatggattgtcccggacccaatgtgttaactgtcagtctttaatgttcgtttcttatgtttttttccccaatgtaatcctgtaaatttgaaggctagaactgcccatgtacttgtggttgagggagggacaccggttcgttgcttttttcaggatttgtgtagggtttggaggtcgagctgtatcgacagaatctcattttctatgttgctcggtaacgtctctgatttgctatgctggcgtgacatggttgattggttggtgaattgcac

SEQ ID NO: 58520 - DNA, 1533 bp, Zea Mays
aaagagtgtgtactttgtactgatcattaaattgccccttcccccttttatcccgtctgctatatggagcagaagacccctcaattgctggcatggttctggatagtgctttcgctaacttatatgacttaatgatggagcttgtagaagtttacaaaatacgagttcctaagttcacggttaagatggctgttcagtacatgcgatgcgtcattcagagaagagctaaatttgacataatggatcttaatgttgtccagtttgcacccaagacgtttattcctgcactatttggacatgcttcaaatgatatgtttattcagcctcatcacacagaccatattcatcaggcttatgcgggggataaaaatctaatcaaatttgagggtgatcacaattcgccaagaccccagttttattacgactctgtttcaatattcttctacaacgttcttcacccacctcagtttccttcaacctgcacacataaacttgataagtattataaccttggtgcttttaagggtgctgctggtactaatgagagcttattgtatgagatcatcaatggtctacgggcagctggcactgatgcaggaagttcatcagctgctacagctagtttcacgaatgctacaaaatcagtagttgaattgctgacagagagggtaaatcagctatctgttaaaaatgataatgacttggattttcttttggatgaaaaccataaccttactgagatggacggtaacacaggagagtgtcatttagaggataaatcaaacagacaaacagatgaatgctgttcgtataccagctcaaaccgagagagctggggaagatgttcttccttgggtggagctagtgatggattgtcatcaggcgaacagcctgagatacctaatcataagcttaagagcttgacactaagggctctagcaaccccactgagacgggtacaaaggaaacctctcgcgatcccgaaggagaagaatcgatcactgtggaagaggttgaaaaaggagaggcaacagatgggggaaaacatatcccagcgtctgcggttgtgtctccaaggccaggctcgacacaagagaaccaaatcgtcttgacaactgtggatacatatttagctcttggacaaatctgctaggaactcactgatgattcagcaaccgagccgcgccgcaatttggagcttctggcactcagcgccaatcgtgccgtgtacattggttgaacattacctagaaatcttagatcatggattgtcccggacccaatgtgttaactgtcagtctttaatgttcgtttcttatgtttttttccccaatgtaatcctgtaaatttgaaggctagaactgcccatgtacttgtggttgagggagggacaccggttcgttgcttttttcaggatttgtgtagggtttggaggtcgagctgtatcgacagaatctcattttctatgttgctcggtaacgtctctgatttgctatgctggcgtgacatggttgattggttggtgaattgcac

SEQ ID NO: 58521 - DNA, 1361 bp, Zea Mays
catggaatagtttgaaatgaatatgtttgcacccaagacgtttattcctgcactatttggacatgcttcaaatgatatgtttattcagcctcatcacacagaccatattcatcaggcttatgcgggggataaaaatctaatcaaatttgagggtgatcacaattcgccaagaccccagttttattacgactctgtttcaatattcttctacaacgttcttcacccacctcagtttccttcaacctgcacacataaacttgataagtattataaccttggtgcttttaagggtgctgctggtactaatgagagcttattgtatgagatcatcaatggtctacgggcagctggcactgatgcaggaagttcatcagctgctacagctagtttcacgaatgctacaaaatcagtagttgaattgctgacagagagggtaaatcagctatctgttaaaaatgataatgacttggtaagtcaatcattgcctgctcttcctcttctacttgagatttttaactccactcgagtgcaggattttcttttggatgaaaaccataaccttactgagatggacggtaacacaggagagtgtcatttagaggataaatcaaacagacaaacagatgaatgctgttcgtataccagctcaaaccgagagagctggggaagatgttcttccttgggtggagctagtgatggattgtcatcaggcgaacagcctgagatacctaatcataagcttaagagcttgacactaagggctctagcaaccccactgagacgggtacaaaggaaacctctcgcgatcccgaaggagaagaatcgatcactgtggaagaggttgaaaaaggagaggcaacagatgggggaaaacatatcccagcgtctgcggttgtgtctccaaggccaggctcgacacaagagaaccaaatcgtcttgacaactgtggatacatatttagctcttggacaaatctgctaggaactcactgatgattcagcaaccgagccgcgccgcaatttggagcttctggcactcagcgccaatcgtgccgtgtacattggttgaacattacctagaaatcttagatcatggattgtcccggacccaatgtgttaactgtcagtctttaatgttcgtttcttatgtttttttccccaatgtaatcctgtaaatttgaaggctagaactgcccatgtacttgtggttgagggagggacaccggttcgttgcttttttcaggatttgtgtagggtttggaggtcgagctgtatcgacagaatctcattttctatgttgctcggtaacgtctctgatttgctatgctggcgtgacatggttgattggttggtgaattgcac

SEQ ID NO: 58522 - DNA, 1287 bp, Zea Mays
  misc_feature (1286)..(1287): n is a, c, g, or t
gtggataacacaccaatcaccaccagcaaaacgtgttgagctcggcctggtgatcgcggccaaaaaaatcctagtcttctcctctcccgcgccgaagcttcctccgccgtgcgtcgttttcccagcagcggggtcagagaaccggtggacaagaaacctctccacccacccacctccgccgctgcagaatagaaattgcggcattgcctccggcttgagcagaagatcatctgggtgttggagtcatccagaggcacaagctgaggaatggggcaaaaggactccaagccttcacatggatatggctactcttcttatgattacgggagtgcttcatcgggatacacctcgagaaacactgggaattcgtcctccagttatagcgtcaggtacgcgccttcttcggagaacagtgtacagccggagacacatgccaggttgcagaggaagtattccaagatcggtgatgactaccgttctttgagccaggtgactgaagctttggcacaggcaggccttgaatcttcaaatcttattgtaggcattgattttacaaagagcaatgaatggacaggtaaaatttccttcaatcgccgctgcctgcatgatattggaaacactccaaacccatatgagcaagctatatctattattggaaggacactttcagcatttgatgaagataatttgattccctgcttcggatttggtgacgcgtcaactcatgatcaggaggtattcagcttttacccagagaaccgcccatgcaatggatttgaagaggcgctagacagatacagagaaatcgttccaactcttcgattagcaggacctacatcttttgcgccgatgattgagacagcaattggaattgttgacagcactggtggtcaatatcatgttcttctgataatcgccgatggacaggttacccgaagtgtcgatacacaatctggacagttgagtccacaggagcgggatactattgatgcaatagtaagagcaagccagttccccctgtcaattgttcttgtcggggttggtgatggaccatgggacatgatgcaccagtttgatgacaatatacctgctcggtcatttgacaatttccagtttgtgaatttcacggagattatgtcgaagagcatagcagctgacagaaaggaggcagaatttgcattgtcagcgctgatggaaatccctacacagtacaaagcaacaattgatctccaactcttaggccgtcgccaaagaataaccccaagaattgctctgccaccaccaann

SEQ ID NO: 58523 - DNA, 1375 bp, Zea Mays
  misc_feature (1374)..(1375): n is a, c, g, or t
gtggacaagaaacctctccacccacccacctccgccgctgcagaatagaaattgcggcattgcctccggcttgagcagtaattgacttgacctcacttcccctgtggggaggctttaattttcttccgatcgatcatagtatccgctgcggtgtgattgcctgcccccaccccattgcgcctgcgcctgcgcctcgcttcatccggtgcgctgcccgcctcactcccgtcgtcctcttcctcgtcctcgctctcgtcgcggagcggtgtggaggcgcgcgctccttgaaggcacggggcaagagcggaggaagatcatctgggtgttggagtcatccagaggcacaagctgaggaatggggcaaaaggactccaagccttcacatggatatggctactcttcttatgattacgggagtgcttcatcgggatacacctcgagaaacactgggaattcgtcctccagttatagcgtcaggtacgcgccttcttcggagaacagtgtacagccggagacacatgccaggttgcagaggaagtattccaagatcggtgatgactaccgttctttgagccaggtgactgaagctttggcacaggcaggccttgaatcttcaaatcttattgtaggcattgattttacaaagagcaatgaatggacaggtaaaatttccttcaatcgccgctgcctgcatgatattggaaacactccaaacccatatgagcaagctatatctattattggaaggacactttcagcatttgatgaagataatttgattccctgcttcggatttggtgacgcgtcaactcatgatcaggaggtattcagcttttacccagagaaccgcccatgcaatggatttgaagaggcgctagacagatacagagaaatcgttccaactcttcgattagcaggacctacatcttttgcgccgatgattgagacagcaattggaattgttgacagcactggtggtcaatatcatgttcttctgataatcgccgatggacaggttacccgaagtgtcgatacacaatctggacagttgagtccacaggagcgggatactattgatgcaatagtaagagcaagccagttccccctgtcaattgttcttgtcggggttggtgatggaccatgggacatgatgcaccagtttgatgacaatatacctgctcggtcatttgacaatttccagtttgtgaatttcacggagattatgtcgaagagcatagcagctgacagaaaggaggcagaatttgcattgtcagcgctgatggaaatccctacacagtacaaagcaacaattgatctccaactcttaggccgtcgccaaagaataaccccaagaattgctctgccaccaccaann

SEQ ID NO: 58524 - DNA, 1929 bp, Zea Mays
  misc_feature (1928)..(1929): n is a, c, g, or t
agtaattgacttgacctcacttcccctgtggggaggctttaattttcttccgatcgatcatagtatccgctgcggtgtgattgcctgcccccaccccattgcgcctgcgcctgcgcctcgcttcatccggtgcgctgcccgcctcactcccgtcgtcctcttcctcgtcctcgctctcgtcgcggagcggtgtggaggcgcgcgctccttgaaggcacggggcaagagcggaggtgagtgagtccgagccccgtggattgctggttcggtggtcggaactcgtggagtagcaagagcggcggcggttacgatatctcacgccagcagtttgtcctcatctaccacccacttcccctgatcccctccccagtacccacttctctcatatcccctcccgcatcatctctctttttttcctcctcttagcgaggacgccgaattcgcgattggcttaggcggtgtgtgcggatcaaatcgagtctggtgagttcgtccagtgttcgttcctagctagtatttgatttgtataattatactatctatgtatgttgtatgcatatatgccatgccgaaatcgaatttcgttcagccacccttggatatcgtcttgtatatgaactggcccacgcttcttcttctttttgaatcttacaatggtcgatactcgatcaggtaggaggtatgcccgttatcggcaacggattcccggcaaagttccgtcgaaaattcaagagaaagctgttttttcctagataggctactgaagatcatctgggtgttggagtcatccagaggcacaagctgaggaatggggcaaaaggactccaagccttcacatggatatggctactcttcttatgattacgggagtgcttcatcgggatacacctcgagaaacactgggaattcgtcctccagttatagcgtcaggtacgcgccttcttcggagaacagtgtacagccggagacacatgccaggttgcagaggaagtattccaagatcggtgatgactaccgttctttgagccaggtgactgaagctttggcacaggcaggccttgaatcttcaaatcttattgtaggcattgattttacaaagagcaatgaatggacaggtaaaatttccttcaatcgccgctgcctgcatgatattggaaacactccaaacccatatgagcaagctatatctattattggaaggacactttcagcatttgatgaagataatttgattccctgcttcggatttggtgacggtaatcatttagttgcctttgtctgatgatcacctgatgggtttataataacatgtttaaagcacagtgttgatccagtgcttctgttttcttctgagcagcgtcaactcatgatcaggaggtattcagcttttacccagagaaccgcccatgcaatggatttgaagaggcgctagacagatacagagaaatcgttccaactcttcgattagcaggacctacatcttttgcgccgatgattgagacagcaattggaattgttgacagcactggtggtcaatatcatgttcttctgataatcgccgatggacaggttacccgaagtgtcgatacacaatctggacagttgagtccacaggagcgggatactattgatgcaatagtaagagcaagccagttccccctgtcaattgttcttgtcggggttggtgatggaccatgggacatgatgcaccagtttgatgacaatatacctgctcggtcatttgacaatttccagtttgtgaatttcacggagattatgtcgaagagcatagcagctgacagaaaggaggcagaatttgcattgtcagcgctgatggaaatccctacacagtacaaagcaacaattgatctccaactcttaggccgtcgccaaagaataaccccaagaattgctctgccaccaccaann

SEQ ID NO: 58525 - DNA, 1195 bp, Zea Mays
  misc_feature (1194)..(1195): n is a, c, g, or t
agtaattgacttgacctcacttcccctgtggggaggctttaattttcttccgatcgatcatagtatccgctgcggtgtgattgcctgcccccaccccattgcgcctgcgcctgcgcctcgcttcatccggaagatcatctgggtgttggagtcatccagaggcacaagctgaggaatggggcaaaaggactccaagccttcacatggatatggctactcttcttatgattacgggagtgcttcatcgggatacacctcgagaaacactgggaattcgtcctccagttatagcgtcaggtacgcgccttcttcggagaacagtgtacagccggagacacatgccaggttgcagaggaagtattccaagatcggtgatgactaccgttctttgagccaggtgactgaagctttggcacaggcaggccttgaatcttcaaatcttattgtaggcattgattttacaaagagcaatgaatggacaggtaaaatttccttcaatcgccgctgcctgcatgatattggaaacactccaaacccatatgagcaagctatatctattattggaaggacactttcagcatttgatgaagataatttgattccctgcttcggatttggtgacgcgtcaactcatgatcaggaggtattcagcttttacccagagaaccgcccatgcaatggatttgaagaggcgctagacagatacagagaaatcgttccaactcttcgattagcaggacctacatcttttgcgccgatgattgagacagcaattggaattgttgacagcactggtggtcaatatcatgttcttctgataatcgccgatggacaggttacccgaagtgtcgatacacaatctggacagttgagtccacaggagcgggatactattgatgcaatagtaagagcaagccagttccccctgtcaattgttcttgtcggggttggtgatggaccatgggacatgatgcaccagtttgatgacaatatacctgctcggtcatttgacaatttccagtttgtgaatttcacggagattatgtcgaagagcatagcagctgacagaaaggaggcagaatttgcattgtcagcgctgatggaaatccctacacagtacaaagcaacaattgatctccaactcttaggccgtcgccaaagaataaccccaagaattgctctgccaccaccaann

SEQ ID NO: 58526 - DNA, 5994 bp, Zea Mays
agaaacaattagggtcagacacttcaactccctagtaaatttgaacaagagaaataacatagagtactcaaactttagttatagcaagaaaaataaatttcaattattgcaatgcattcaaatggtaatttttgtattaaattattatattaaccccagctcatatatagagggccaattttcagttatactatttccatgcggtagtattcaattttcaattgaatgaataacatcgtcgaacatatcattttattgcatgatgatcagttaaaataacttcaacaactacaaatgcacttcctagcaaaatttacctaagattagagttatgcatcccagcgccgtttaaaaaagcatatagatctattggctgaaccgtttgaattagtatctgatcctaatgttaaattagtgccagttctttacgtcgttaatcctatgttacttacagtacgcccgagatcccaaagcttcccagcaccggtcctcgctcggctgagatggcggctttaggtcacctttcacgtttgcttagttctaccgtccaccgctctggaggccttgtgcgcgcggcgcgccttctccatgttggtcgatgtctccgatttgtacctgccacgtgacgcccattgctactacatattgtatgtgtatcatttctgtattcatattcctttgagattgtctctgttcacatattttggtctgcttaaatcataaacatagtttatgagtagttcggtatataaatttgttttaccttgtgatccttcaaatttagtatattgtttgaatttggaatgcatctttcattgtgtttggacaaagctttagtcaatgattacttaattaatatgcagatatgcttttgtgatacaaaacataactttcttatcatatgaacctagtaacattcaatacatcttttttgtgctcttctaaatgtgatttcttttaaactaactcaattaaatcttccagtggaaagcatgggcctctgaagttatcctctaccagattgatcagcattccagaatatttcaagtaagtgtctttgcttgacagggcacctatgaaccgtctcattgaagatattgacaatgacctcccgttcttaacccatgatagggttcgcaagctaatgagatctggattactccctttgtatttcagcaagacatgtggtttatcgattcctgacaccgatttcattgaagaaaaccttggtgtgctgcctgagttggatttactggtattcagatcactgaacatgagtcgctctgagtctgaaatagataattgctacaagtcatttgtgaagctcttcaaggctcttgtgggtaagtatgctgcaagggatgcaatcttcaagctacccaagtcactttatctgcatttgaagtaccttgagttgtctattgtcaaggactatcgtgtgatatatggtacatccctcttccccaagcttttgatctctataatgtactgcgaagtgcatcgacttttgagggagcagtgtccggcacgtggactgggtgctgcagccaatgcaatcatggtgacgattgaagagaaaatctttaacttcatgaagtcatgcagcacaaatactctgctaattagctattctggtgctcatggtgagagggcaaagaagcacattgtgggcagtgaagatagaggagatgaggcgctgacatctgaagttagtgatgacactaaagatctcaaagcgtcgaatgtcccactgaaagttagaaattttatgggtaacaaggagcttagtgttaagggcaaaagaactaccgcagaaggaaacgttgagattgttacaggagatgagctgacaactactctcttggacgttgtgaatactattcagcgcactactactggatatgatcagattcgttcagcaaagaaaaaagttatgtcacacgtcaaacagatgaggatgtgccagattcggcttcttaagctgctacaagagaaagttatgcacaaagatctggaaattgatcttgaggacccagattccatgtcacagcttaagatcaatgacagaagcattcacaacttttaacttcacataggcattctttgggcactcaagataaatttccagatctttgtgcgtatctttctcttgtagcagcttaaaaagccgaatctggcacatcctcatctgtttgacgtgtgacattacttttttctttgttaaacgaatctgatcatatccagtagtagtgcgctgaatagtattcacagcgtccaaaagagtagttgtcatctcatctcctggaacaatctcaacgtttccttttgcggtagttcttttgccctcaacactgagcttcttgttgcccataaaatttctaactttcagggggacattcgacgctttgagatctttagcgtcatcactaacttcaaatgtcagtgcctcatctccatcttcactgacccaatgtgcttttttgccctctcaccatgagcaccagaatagctaattagcagagcatttgtactgcaagacttcatgaagtcaaagattttctcttcaatcgtcaccatgattgcattgcctgcagcaccctatccatgtgtcgggcacaactcactcaaaagtcgatgcatttcgcagtacattatagagatcaaaagcttagggaagagggctggaccatatatcacacgatagtccttgacaataagcaactcaaggtacttcaaatgcagatcaagacttgggtagcttgaagattgcatcccttacagcatacttacccacaagagccttaaagaacttcgcgaatggcttgtagcaattacctatttcagactcagagcgactcatgttcagtgatctgaataccagtaaatcaaactcaggcagcacatccaggttttttttaatgaaatcggtgtcaggaatcgataagccataggtcttgctgaaatacaaagggagtaattcagatctcagtagcttgcgaaccctatcatgtgttaagaacgggaggtcatcgttaatatcttcaatgagacggatcctaggtgtcctgtccagtaaagacacttccttgaaatactctgaaatgttggtcactctgctagaggataactttagaggcccatgcttttgacttaaagatttaattgagttagtttaaaaaatcacatttagaaaaacacaaaaaagctgcattgaatgttactaggttcatatgacaagaaacttatgttttgtatcacaaaagcatatctgcatattaattaagtaatcattggctaaagcttcgtccaaacacaatgaaagatgcattccaaattcaaacaatgtactaaatttgaaggaccacaagctaaaataaatttatatatcgaactacacataaactatgtttatgatttaaccagaccaaaatatatgaacagagacaatctcacaaggaatatgaatacaaaaatgatacacatacaagttgtagtagcaatgggcgtcacgtggcaggtacagatcggagacatcggcgacctcggccaacatggagaaggcgcgcacaaagcctccagagcggtggacggtagaactaagcaaaagtgaaagacgacctaaagtcgccatctcagccgagcaagcggcaaggaccggcgctgggaagctttgggatctcgggcgtactgtaagtaacataggatcaacagcgtaaagaactagcactaatttaacattaggatcagatactaatttaaacggtccagctaatagatttatatgcttttttaaacggcgctaggatgcataactctaatcttaggtaaattttgctaggaagtgcatttgtagctgttgaacttattttaactgattatcatgcaataaaattatatgttcgctgatgttattcattcaaaattcagatgcttgtattcaattgaaaattgaatactactgcatgaaaacagtataactgaaaattggccctctatatatgagctagggttactataataatttaatacaaaaattaccatttgaatgcattgcaataattgaaatttctttttcttgctataactaaagtttgagaactttatgttatttctcttgttcaaatttactagggagttgaagtgtctaaccctaattgtttcttcgcaggttccaaatacagttgaatttgctgactggattggtcgaacaaaacagaagaaaatcagtgtaatttcgtaagtgcagttagtatgaatttttagctacttgattacaccataggcccttgttatcagttagtttagccaccaggccggttagaattacccaattagcttctttctctattctagtcaattgatacatgaaatctaccttgctagaaataggatcatgaaaatgagaaaatttctaaaaagcacaacagagtacaactaattagtacttaccggagagatgaatctgctagggatgaaagagttgatcagctataatgtggacgcaaaatcaaacatgaaattgtgagctgcaaattctttaataaatcaaatagcagtacaaacaatatgtattgaactaataaatcaaatagcagtataaacaatatgtgaaagtggagctaacattttttcctagttgtatagcagtaggacttttttccccgttgaccaattttttttcctaaactgttgcacttatggaatgaatcggagaagaatcccaataacctcttcgtgattggattgtttttatatggtttagctgccgcgatccacatcagatgtgtgtgtgtctcatgcgagaggtcttccgagatcatgcgtccacatgtcgtggcgcaccgaccggtgccgatggctggcacgcaccgcgcacacatctggcctccaataccacctaattctaggccccgaccccaagctcatgaacgcccctgcactgtcaggatcgccaacgccaccagcaggaagccctgacctgccgccattggtgccggatggagcagaggaagtggaagcacgagcccttcccatcaccctcctgtaaccgcgacggagggcccggcggcctgtgatgaccccaactggatccgactccgtagcagtgagcacgaggacgggagcgaagtcgcagcgtcgcggtgcgagagcggagaggagcgagatcgagggcaagagtatggggcagcgagagcagaggataggagagggagtgaagagagcagatcctcaccggggagaagccagtggggagggtcgtcgtcggggctgtgcaccgccgtcatgccggtcgcgtcaagccgccgtcgcaccagtcgcgtcgagccgccgtcgcgtcgtgtctaggcttcgatccggagggtacgacacaagggttggttccgggccgtggggtgaagggaaattttaatcctggccagtttcgattccaattcgggccgaaacgaacaatttcaatgagttataccaaattccaaactaggtccattcgttctaaccggaacaaggtctggaatggactcatccgctgaaaacacagaacgaggcctaaaagaactcaaggggctgtttggttcagcttttttctgaccagcttttctgaaaatctggctgtgggaagaatctggctgtggggagaatctgagtatcattacgattacgtgtggagaaagataaagttgttcatagggctcatgatctagaaagtgacggattactactattacaacgactcaaccgattatgtgtttatgttgattttgaatggtttttgtcctaatgaattttatagaagctggctgaaaagctgagcgtttggcaatccgcagcagcttttggtggccagaagctgccagaagccgaaacaaacaggggccaagtaaggcatgtgatgtgagtagcatcacggtgagtcaccttcagggccgagttgatctcgctggtggccgccagccactcatcagtctgcctcctgtaccgcgcgatcgtaccgag

SEQ ID NO: 58527 - DNA, 2000 bp, Zea Mays
cagctttggaggaacgcagaaacgtcgaaaccagcacccggaaacccagacaaagcacgagccacgcacgccccgctgtctccctcccgccgtcccgccgccaccgctactgccggagtctctcgccaccgtcgttgctctcccgccttcaccgtgccaactcccctccttgcctcccccgcgcttcagtcgctccactccccatcgctttcgcctggtcagatccaggtgtcctttgacccagaccgcgcctgcctttccctccgctcggattcttcgccgtcttcgttcctactgggcgccgccggggtggagcggagatcggatccgccaggagctgattccttctctctctagtttgatgcggattcattcgctgaccggcatagcatgatcctgcggtgattgcggtcgcggatagcttgtgcaagctgttggcttgggagttatctttctaatctggcctaaagaaatcctgaggcggtagcgtcacatggatgcaagtacggaggttactgatgctattgctgcagtgggcattgacaatgggccaacggggaagttgccgccccgtgatagtgtaggggggcacgcagaagaacacgacgtgctggctgatggaacacattcgggtgagagcgaggtgatcaacccgtctgaagaagtggaaatggaagccacctcgcaatcccaggacataaagccccgagttcctgagggggttcaaggccattcaccgaaggttgttactaaatctccgcgacagagccctcggggcggggataagagtgaagccaggaaaatctctcccagtccttatcctaaggtgcccatcgcacgggtttctgatctagatatagttgatagctcttcgagcaatggtgatactggtgccagtaagaaaaagactgaaaagagcagtttccgcccaattgccaaggagagcctgtcacttgaggactcaaaagagaagaataaaactcagaaggcatcaaaccaacgctctgccaaaaacgatattgacgaagaatcaaatgaaagtgtgaaacctcaaagggtgggcagcactccttcatatggatttagttttaagtgtgatgagagagctgaaaaaagaagagagttctactcaaagctcgaggagaagattcatgcacaggaactggagaaaagcaacttgcaggcaaaatcaaaggaaactgaagaagctgaactcaaaatgctgagaaagagtttaaagttcaaggcaacaccaatgcccagcttttataaggaaccacctcctcccaaggttgagttgaagaagatcccaacaacaagagctcgatcaccaaagcttggtcgctccaagaacacaccctcaggagggacagaaggaaattcaaaccccccagctcgttcagctcgactgagtctcgatcaaagggtcccccaaaatggtgccaagaaagcacctgctgcaaatgcggcgaagaagccccaacggaaatctctccctaaattgccttcggagcaaacagccaaagttgttgacattgcagcgtctgttccatctggagaagagctggggaagaagccatcgttgacgggtcttgttcgagagccaatccgcgcgcaacttacgcctgatgaacctggactcagcgtgtaggaaaggaacctatcaagccgactcatgaaagaagagagttgtgcctcagcttcctttatcacactttgctatttctgcattaactgctggctggtattatgtactaaaattagtctcatcaccaggatggagttgggagtttggagaatggcaagtgacccccgtgtattgtttatgctagtttctgttgacatacgaagtgtttgtagttggcaaattttttcagattatcatgtctcctatctccagggctcggagccaattttcttgccgtcgtagagaagccttgtgattcggtgcattagttcttgcagtttgatttcggctattgttcattgcttgtactgat

SEQ ID NO: 58528 - DNA, 1999 bp, Zea Mays
cagctttggaggaacgcagaaacgtcgaaaccagcacccggaaacccagacaaagcacgagccacgcacgccccgctgtctccctcccgccgtcccgccgccaccgctactgccggagtctctcgccaccgtcgttgctctcccgccttcaccgtgccaactcccctccttgcctcccccgcgcttcagtcgctccactccccatcgctttcgcctggtcagatccaggtgtcctttgacccagaccgcgcctgcctttccctccgctcggattcttcgccgtcttcgttcctactgggcgccgccggggtggagcggagatcggatccgccaggagctgattccttctctcgtagtttgatgcggattcattcgctgaccggcatagcatgatcctgcggtgattgcggtcgcggatagcttgtgcaagctgttggcttgggagttatctttctaatctggcctaaagaaatcctgaggcggtagcgtcacatggatgcaagtacggaggttactgatgctattgctgcagtgggcattgacaatgggccaacggggaagttgccgccccgtgatagtgtaggggggcacgcagaagaacacgacgtgctggctgatggaacacattcgggtgagagcgaggtgatcaacccgtctgaagaagtggaaatggaagccacctcgcaatcccaggacataaagccccgagttcctgagggggttcaaggccattcaccgaaggttgttactaaatctccgcgacagagccctcggggcggggataagagtgaagccaggaaaatctctcccagtccttatcctaaggtgcccatcgcacgggtttctgatctagatatagttgatagctcttcgagcaatggtgatactggtgccagtaagaaaaagactgaaaagagcagtttccgcccaattgccaaggagagcctgtcacttgaggactcaaaagagaagaataaaactcagaaggcatcaaaccaacgctctgccaaaaacgatattgacgaagaatcaaatgaaagtgtgaaacctcaaagggtgggcagcactccttcatatggatttagttttaagtgtgatgagagagctgaaaaaagaagagagttctactcaaagctcgaggagaagattcatgcacaggaactggagaaaagcaacttgcaggcaaaatcaaaggaaactgaagaagctgaactcaaaatgctgagaaagagtttaaagttcaaggcaacaccaatgcccagcttttataaggaaccacctcctcccaaggttgagttgaagaagatcccaacaacaagagctcgatcaccaaagcttggtcgctccaagaacacaccctcaggagggacagaaggaaattcaaaccccccagctcgttcagctcgactgagtctcgatcaaagggtcccccaaaatggtgccaagaaagcacctgctgcaaatgcggcgaagaagccccaacggaaatctctccctaaattgccttcggagcaaacagccaaagttgttgacattgcagcgtctgttccatctggagaagagctggggaagaagccatcgttgacgggtcttgttcgagagccaatccgcgcgcaacttacgcctgatgaacctggactcagcgtgtaggaaaggaacctatcaagccgactcatgaaagaagagagttgtgcctcagcttcctttatcacactttgctatttctgcattaactgctggctggtattatgtactaaaattagtctcatcaccaggatggagttgggagtttggagaatggcaagtgacccccgtgtattgtttatgctagtttctgttgacatacgaagtgtttgtagttggcaaattttttcagattatcatgtctcctatctccagggctcggagccaattttcttgccgtcgtagagaagccttgtgattcggtgcattagttcttgcagtttgatttcggctattgttcattgcttgtactgat

SEQ ID NO: 58529 - DNA, 1831 bp, Zea Mays
cagctttggaggaacgcagaaacgtcgaaaccagcacccggaaacccagacaaagcacgagccacgcacgccccgctgtctccctcccgccgtcccgccgccaccgctactgccggagtctctcgccaccgtcgttgctctcccgccttcaccgtgccaactcccctccttgcctcccccgcgcttcagtcgctccactccccatcgctttcgcctggtcagaattccagatccaggtgtcctttgacccagaccgcgcctgcctttccctccgctcggattcttcgccgtcttcgttcctactgggcgccgccggggtggagcggagatcggatccgccaggagctgattccttctctcgtagtgggcattgacaatgggccaacggggaagttgccgccccgtgatagtgtaggggggcacgcagaagaacacgacgtgctggctgatggaacacattcgggtgagagcgaggtgatcaacccgtctgaagaagtggaaatggaagccacctcgcaatcccaggacataaagccccgagttcctgagggggttcaaggccattcaccgaaggttgttactaaatctccgcgacagagccctcggggcggggataagagtgaagccaggaaaatctctcccagtccttatcctaaggtgcccatcgcacgggtttctgatctagatatagttgatagctcttcgagcaatggtgatactggtgccagtaagaaaaagactgaaaagagcagtttccgcccaattgccaaggagagcctgtcacttgaggactcaaaagagaagaataaaactcagaaggcatcaaaccaacgctctgccaaaaacgatattgacgaagaatcaaatgaaagtgtgaaacctcaaagggtgggcagcactccttcatatggatttagttttaagtgtgatgagagagctgaaaaaagaagagagttctactcaaagctcgaggagaagattcatgcacaggaactggagaaaagcaacttgcaggcaaaatcaaaggaaactgaagaagctgaactcaaaatgctgagaaagagtttaaagttcaaggcaacaccaatgcccagcttttataaggaaccacctcctcccaaggttgagttgaagaagatcccaacaacaagagctcgatcaccaaagcttggtcgctccaagaacacaccctcaggagggacagaaggaaattcaaaccccccagctcgttcagctcgactgagtctcgatcaaagggtcccccaaaatggtgccaagaaagcacctgctgcaaatgcggcgaagaagccccaacggaaatctctccctaaattgccttcggagcaaacagccaaagttgttgacattgcagcgtctgttccatctggagaagagctggggaagaagccatcgttgacgggtcttgttcgagagccaatccgcgcgcaacttacgcctgatgaacctggactcagcgtgtaggaaaggaacctatcaagccgactcatgaaagaagagagttgtgcctcagcttcctttatcacactttgctatttctgcattaactgctggctggtattatgtactaaaattagtctcatcaccaggatggagttgggagtttggagaatggcaagtgacccccgtgtattgtttatgctagtttctgttgacatacgaagtgtttgtagttggcaaattttttcagattatcatgtctcctatctccagggctcggagccaattttcttgccgtcgtagagaagccttgtgattcggtgcattagttcttgcagtttgatttcggctattgttcattgcttgtactgat

SEQ ID NO: 58530 - DNA, 2007 bp, Zea Mays
cagctttggaggaacgcagaaacgtcgaaaccagcacccggaaacccagacaaagcacgagccacgcacgccccgctgtctccctcccgccgtcccgccgccaccgctactgccggagtctctcgccaccgtcgttgctctcccgccttcaccgtgccaactcccctccttgcctcccccgcgcttcagtcgctccactccccatcgctttcgcctggtcagaattccagatccaggtgtcctttgacccagaccgcgcctgcctttccctccgctcggattcttcgccgtcttcgttcctactgggcgccgccggggtggagcggagatcggatccgccaggagctgattccttctctcgtagtttgatgcggattcattcgctgaccggcatagcatgatcctgcggtgattgcggtcgcggatagcttgtgcaagctgttggcttgggagttatctttctaatctggcctaaagaaatcctgaggcggtagcgtcacatggatgcaagtacggaggttactgatgctattgctgcagtgggcattgacaatgggccaacggggaagttgccgccccgtgatagtgtaggggggcacgcagaagaacacgacgtgctggctgatggaacacattcgggtgagagcgaggtgatcaacccgtctgaagaagtggaaatggaagccacctcgcaatcccaggacataaagccccgagttcctgagggggttcaaggccattcaccgaaggttgttactaaatctccgcgacagagccctcggggcggggataagagtgaagccaggaaaatctctcccagtccttatcctaaggtgcccatcgcacgggtttctgatctagatatagttgatagctcttcgagcaatggtgatactggtgccagtaagaaaaagactgaaaagagcagtttccgcccaattgccaaggagagcctgtcacttgaggactcaaaagagaagaataaaactcagaaggcatcaaaccaacgctctgccaaaaacgatattgacgaagaatcaaatgaaagtgtgaaacctcaaagggtgggcagcactccttcatatggatttagttttaagtgtgatgagagagctgaaaaaagaagagagttctactcaaagctcgaggagaagattcatgcacaggaactggagaaaagcaacttgcaggcaaaatcaaaggaaactgaagaagctgaactcaaaatgctgagaaagagtttaaagttcaaggcaacaccaatgcccagcttttataaggaaccacctcctcccaaggttgagttgaagaagatcccaacaacaagagctcgatcaccaaagcttggtcgctccaagaacacaccctcaggagggacagaaggaaattcaaaccccccagctcgttcagctcgactgagtctcgatcaaagggtcccccaaaatggtgccaagaaagcacctgctgcaaatgcggcgaagaagccccaacggaaatctctccctaaattgccttcggagcaaacagccaaagttgttgacattgcagcgtctgttccatctggagaagagctggggaagaagccatcgttgacgggtcttgttcgagagccaatccgcgcgcaacttacgcctgatgaacctggactcagcgtgtaggaaaggaacctatcaagccgactcatgaaagaagagagttgtgcctcagcttcctttatcacactttgctatttctgcattaactgctggctggtattatgtactaaaattagtctcatcaccaggatggagttgggagtttggagaatggcaagtgacccccgtgtattgtttatgctagtttctgttgacatacgaagtgtttgtagttggcaaattttttcagattatcatgtctcctatctccagggctcggagccaattttcttgccgtcgtagagaagccttgtgattcggtgcattagttcttgcagtttgatttcggctattgttcattgcttgtactgat

SEQ ID NO: 58531 - DNA, 1091 bp, Zea Mays
aatcacgctcttatttgtttggatacctattgttgtttgtgccacaaagattttataagagaagaataaaactcagaaggcatcaaaccaacgctctgccaaaaacgatattgacgaagaatcaaatgaaagtgtgaaacctcaaagggtgggcagcactccttcatatggatttagttttaagtgtgatgagagagctgaaaaaagaagagagttctactcaaagctcgaggagaagattcatgcacaggaactggagaaaagcaacttgcaggcaaaatcaaaggaaactgaagaagctgaactcaaaatgctgagaaagagtttaaagttcaaggcaacaccaatgcccagcttttataaggaaccacctcctcccaaggttgagttgaagaagatcccaacaacaagagctcgatcaccaaagcttggtcgctccaagaacacaccctcaggagggacagaaggaaattcaaaccccccagctcgttcagctcgactgagtctcgatcaaagggtcccccaaaatggtgccaagaaagcacctgctgcaaatgcggcgaagaagccccaacggaaatctctccctaaattgccttcggagcaaacagccaaagttgttgacattgcagcgtctgttccatctggagaagagctggggaagaagccatcgttgacgggtcttgttcgagagccaatccgcgcgcaacttacgcctgatgaacctggactcagcgtgtaggaaaggaacctatcaagccgactcatgaaagaagagagttgtgcctcagcttcctttatcacactttgctatttctgcattaactgctggctggtattatgtactaaaattagtctcatcaccaggatggagttgggagtttggagaatggcaagtgacccccgtgtattgtttatgctagtttctgttgacatacgaagtgtttgtagttggcaaattttttcagattatcatgtctcctatctccagggctcggagccaattttcttgccgtcgtagagaagccttgtgattcggtgcattagttcttgcagtttgatttcggctattgttcattgcttgtactgat

SEQ ID NO: 58532 - DNA, 1059 bp, Zea Mays
aagagagtgctatagaagttgaaagagagaagaataaaactcagaaggcatcaaaccaacgctctgccaaaaacgatattgacgaagaatcaaatgaaagtgtgaaacctcaaagggtgggcagcactccttcatatggatttagttttaagtgtgatgagagagctgaaaaaagaagagagttctactcaaagctcgaggagaagattcatgcacaggaactggagaaaagcaacttgcaggcaaaatcaaaggaaactgaagaagctgaactcaaaatgctgagaaagagtttaaagttcaaggcaacaccaatgcccagcttttataaggaaccacctcctcccaaggttgagttgaagaagatcccaacaacaagagctcgatcaccaaagcttggtcgctccaagaacacaccctcaggagggacagaaggaaattcaaaccccccagctcgttcagctcgactgagtctcgatcaaagggtcccccaaaatggtgccaagaaagcacctgctgcaaatgcggcgaagaagccccaacggaaatctctccctaaattgccttcggagcaaacagccaaagttgttgacattgcagcgtctgttccatctggagaagagctggggaagaagccatcgttgacgggtcttgttcgagagccaatccgcgcgcaacttacgcctgatgaacctggactcagcgtgtaggaaaggaacctatcaagccgactcatgaaagaagagagttgtgcctcagcttcctttatcacactttgctatttctgcattaactgctggctggtattatgtactaaaattagtctcatcaccaggatggagttgggagtttggagaatggcaagtgacccccgtgtattgtttatgctagtttctgttgacatacgaagtgtttgtagttggcaaattttttcagattatcatgtctcctatctccagggctcggagccaattttcttgccgtcgtagagaagccttgtgattcggtgcattagttcttgcagtttgatttcggctattgttcattgcttgtactgat

SEQ ID NO: 58533 - DNA, 2244 bp, Zea Mays
cccaagtctagagctttccacagcactccgctccgcccaggtcaccaacacaaacaaatccgttcataataagattcttatcctttagtttacgctggcctggcctttgttgcgttataaacgttgctggcgttaggcttcaattaattatataattaattaattagtttccttaggcatccatgatccatcgatcactccatgggtgttcgcatgcatgcagctaggatagcgtagccattttgaacacgcatgtatatgcccacacagtgccgcttgcagagaactcaaaatactacttgcaagctgtctgccaagctgtgactgcgattgtgaaaacccgtgttgcgttcaattcgtgctcgtttgcttgcttgacaggggggaggggacagcctttgaaaagaaaacccaccccaccgccgcgggggaccaggcggacgagcaggaatggcgtacgcggcgaggcggaagaagcgggtgggccgctacgaggtgggccggaccatcggccagggcaccttcgccaaggtcaagttcgccgtcgacgccgacaccggcgcgcccgtcgccatgaaggtgctcgacaaggagaccatcttcgcccaccgcatgctccaccagatcaaaagggaaatatcaatcatgaagatcgtaagacatcccaacatagtcaggcttaatgaggtgttggcagggaagacgaagatatacataatcttggaacttgtcaatggaggcgaactgtttgataaaatagcccgatatgggaagctacgtgagaatgaagccaggaagtatttccagcagcttattgatgccattgattattgccacagcaaaggagtttatcatagggatttgaagcctgaaaatatgcttcttgactcacgtggaaacttaaaagtttctgattttggacttagtacactgtctcagaatgacttcttcacacaacatgtggaacaccaaattatgttgctcctgaggtgctaggtagcgatggatatgacggacctgcagcagacatttggtcatgtggtgtcattctctatgttttaatggctggttaccttccctttgaggagaatgaccttccaagtttgtatgaaaagataactgcagctaagtactcatgcccatactggttctctccaggagccaagtcattgatccagagattacttgatccaaatccaagaactcgtatcactattggagaaataagagcagacccatggtttgagaagaactatgtagctattagacgcggtgaagatgagaatgttagcctggatgatgttcaagctgtttttgacaatattgaggacaagtacgtatctgaggaagtaactcacaaggatggtggtcctcttatgatgaatgcctttgagatgattacgctatctcaaggtttggatctctcagcgttgtttgataggcaacaggagtatgtcaagcgccaaacgcgttttgtctcaagaaaaccagctaagactatagtagctacaattgaagttgttgccgagtcaatgagtctcaaggtccactcccagaattacaagctgcggcttgaaggtgcatcatcgaacagaacgagccaattcgctgttgttctagaggtttttcaagttgccccttctctgttcatggttgatgttcgaaaggtcgccggtgacaccctggaataccacaggttttacaagaacctatgcagcagacttgacagcataatctggaggccaatcgaagtttctgcgaaatctaagctgctgaggacgaccacttgctagcccagcactgagctactgtaaatggcaaccaacaacaagagacgtggttcgtagccgttagaagagggggaaacttctgttaaatccagcgtatagctcgtggagctgggattcacgaggatttctgcatctcgctttctcaggtgatgcatgtaccatagctgtcttcgttagatcagacgaggcagctcaaagcaccaggtgtttgtatatatatattttttgtaacgctattgtagatagcctgtgtagctccagccgtgcagctgtatgtagcagaaacctgaatgtccgaaaacgcccctgaatgtcaggtagaatcgttgcttccaaacacatcataaaagatcaaaatagaaataaacggaagatgtttacataacttttttattattattttaggagggagtcttttctatctcgagggtttatttgaaataaaaaaatgaaa

SEQ ID NO: 58534 - DNA, 2208 bp, Zea Mays
cccaagtctagagctttccacagcactccgctccgcccaggtcaccaacacaaacaaatccgttcataataagattcttatcctttagtttacgctggcctggcctttgttgcgttataaacgttgctggcgttaggcttcaattaattatataattaattaattagtttccttaggcatccatgatccatcgatcactccatgggtgttcgcatgcatgcagctaggatagcgtagccattttgaacacgcatgtatatgcccacacagtgccgcttgcagagaactcaaaatactacttgcaagctgtctgccaagctgtgactgcgattgtgaaaacccgtgttgcgttcaattcgtgctcgtttgcttgcttgacaggggggaggggacagcctttgaaaagaaaacccaccccaccgccgcgggggaccaggcggacgagcaggaatggcgtacgcggcgaggcggaagaagcgggtgggccgctacgaggtgggccggaccatcggccagggcaccttcgccaaggtcaagttcgccgtcgacgccgacaccggcgcgcccgtcgccatgaaggtgctcgacaaggagaccatcttcgcccaccgcatgctccaccagatcaaaagggaaatatcaatcatgaagatcgtaagacatcccaacatagtcaggcttaatgaggtgttggcagggaagacgaagatatacataatcttggaacttgtcaatggaggcgaactgtttgataaaatagcccgatatgggaagctacgtgagaatgaagccaggaagtatttccagcagcttattgatgccattgattattgccacagcaaaggagtttatcatagggatttgaagcctgaaaatatgcttcttgactcacgtggaaacttaaaagtttctgattttggacttagtacactgtctcagaatggagcaggacttcttcacacaacatgtggaacaccaaattatgttgctcctgaggtgctaggtagcgatggatatgacggacctgcagcagacatttggtcatgtggtgtcattctctatgttttaatggctggttaccttccctttgaggagaatgaccttccaagtttgtatgaaaaggagccaagtcattgatccagagattacttgatccaaatccaagaactcgtatcactattggagaaataagagcagacccatggtttgagaagaactatgtagctattagacgcggtgaagatgagaatgttagcctggatgatgttcaagctgtttttgacaatattgaggacaagtacgtatctgaggaagtaactcacaaggatggtggtcctcttatgatgaatgcctttgagatgattacgctatctcaaggtttggatctctcagcgttgtttgataggcaacaggagtatgtcaagcgccaaacgcgttttgtctcaagaaaaccagctaagactatagtagctacaattgaagttgttgccgagtcaatgagtctcaaggtccactcccagaattacaagctgcggcttgaaggtgcatcatcgaacagaacgagccaattcgctgttgttctagaggtttttcaagttgccccttctctgttcatggttgatgttcgaaaggtcgccggtgacaccctggaataccacaggttttacaagaacctatgcagcagacttgacagcataatctggaggccaatcgaagtttctgcgaaatctaagctgctgaggacgaccacttgctagcccagcactgagctactgtaaatggcaaccaacaacaagagacgtggttcgtagccgttagaagagggggaaacttctgttaaatccagcgtatagctcgtggagctgggattcacgaggatttctgcatctcgctttctcaggtgatgcatgtaccatagctgtcttcgttagatcagacgaggcagctcaaagcaccaggtgtttgtatatatatattttttgtaacgctattgtagatagcctgtgtagctccagccgtgcagctgtatgtagcagaaacctgaatgtccgaaaacgcccctgaatgtcaggtagaatcgttgcttccaaacacatcataaaagatcaaaatagaaataaacggaagatgtttacataacttttttattattattttaggagggagtcttttctatctcgagggtttatttgaaataaaaaaatgaaa

SEQ ID NO: 58535 - DNA, 1653 bp, Zea Mays
cctggtgtgagcaacgcgacgcctacgcacacaatcaaaagggaaatatcaatcatgaagatcgtaagacatcccaacatagtcaggcttaatgaggtgttggcagggaagacgaagatatacataatcttggaacttgtcaatggaggcgaactgtttgataaaatagcccgatatgggaagctacgtgagaatgaagccaggaagtatttccagcagcttattgatgccattgattattgccacagcaaaggagtttatcatagggatttgaagcctgaaaatatgcttcttgactcacgtggaaacttaaaagtttctgattttggacttagtacactgtctcagaatggagcaggacttcttcacacaacatgtggaacaccaaattatgttgctcctgaggtagcgatggatatgacggacctgcagcagacatttggtcatgtggtgtcattctctatgttttaatggctggttaccttccctttgaggagaatgaccttccaagtttgtatgaaaagataactgcagctaagtactcatgcccatactggttctctccaggagccaagtcattgatccagagattacttgatccaaatccaagaactcgtatcactattggagaaataagagcagacccatggtttgagaagaactatgtagctattagacgcggtgaagatgagaatgttagcctggatgatgttcaagctgtttttgacaatattgaggacaagtacgtatctgaggaagtaactcacaaggatggtggtcctcttatgatgaatgcctttgagatgattacgctatctcaaggtttggatctctcagcgttgtttgataggcaacaggagtatgtcaagcgccaaacgcgttttgtctcaagaaaaccagctaagactatagtagctacaattgaagttgttgccgagtcaatgagtctcaaggtccactcccagaattacaagctgcggcttgaaggtgcatcatcgaacagaacgagccaattcgctgttgttctagaggtttttcaagttgccccttctctgttcatggttgatgttcgaaaggtcgccggtgacaccctggaataccacaggttttacaagaacctatgcagcagacttgacagcataatctggaggccaatcgaagtttctgcgaaatctaagctgctgaggacgaccacttgctagcccagcactgagctactgtaaatggcaaccaacaacaagagacgtggttcgtagccgttagaagagggggaaacttctgttaaatccagcgtatagctcgtggagctgggattcacgaggatttctgcatctcgctttctcaggtgatgcatgtaccatagctgtcttcgttagatcagacgaggcagctcaaagcaccaggtgtttgtatatatatattttttgtaacgctattgtagatagcctgtgtagctccagccgtgcagctgtatgtagcagaaacctgaatgtccgaaaacgcccctgaatgtcaggtagaatcgttgcttccaaacacatcataaaagatcaaaatagaaataaacggaagatgtttacataacttttttattattattttaggagggagtcttttctatctcgagggtttatttgaaataaaaaaatgaaa

SEQ ID NO: 58536 - DNA, 2175 bp, Zea Mays
acgcacacagtaatcctatcccagtcccagcagcagcaacttgcgctttggtccggcaaatgggctgtgaattctgcgccgcctgaccgtcgcccgcccccgccccccacaaacaaggggtggaagtgtttggtttctgtgtcttcaagtgtatctaccctgctagtatcttgtgtggcagcgttgacctggttgattaagccatttttggcatttcgcaggctctgtttacacgagtctggtcctccgctattcccacataaatgattaggaagagaagagtccagcctgaccaccgtcgctttctttttcccaaagctttttagaccgtattccaatgacagcaccggagatctgcattctaggtttaacacatgttgtgctaccgacaattactactagccaaagaccaaagtagaatcactggcaatgaaaaacaccaagttttggatccatcaaaatactacaagctcacaaaaacaataacttccttctctctctctcaagaattgagtattttttgtccgtgctccagtgagcttactgcttttttgctgccagatcaaaagggaaatatcaatcatgaagatcgtaagacatcccaacatagtcaggcttaatgaggtgttggcagggaagacgaagatatacataatcttggaacttgtcaatggaggcgaactgtttgataaaatagcccgatatgggaagctacgtgagaatgaagccaggaagtatttccagcagcttattgatgccattgattattgccacagcaaaggagtttatcatagggatttgaagcctgaaaatatgcttcttgactcacgtggaaacttaaaagtttctgattttggacttagtacactgtctcagaatggagcaggacttcttcacacaacatgtggaacaccaaattatgttgctcctgaggtgctaggtagcgatggatatgacggacctgcagcagacatttggtcatgtggtgtcattctctatgttttaatggctggttaccttccctttgaggagaatgaccttccaagtttgtatgaaaagataactgcagctaagtactcatgcccatactggttctctccaggagccaagtcattgatccagagattacttgatccaaatccaagaactcgtatcactattggagaaataagagcagacccatggtttgagaagaactatgtagctattagacgcggtgaagatgagaatgttagcctggatgatgttcaagctgtttttgacaatattgaggacaagtacgtatctgaggaagtaactcacaaggatggtggtcctcttatgatgaatgcctttgagatgattacgctatctcaaggtttggatctctcagcgttgtttgataggcaacaggagtatgtcaagcgccaaacgcgttttgtctcaagaaaaccagctaagactatagtagctacaattgaagttgttgccgagtcaatgagtctcaaggtccactcccagaattacaaggtgcatcatcgaacagaacgagccaattcgctgttgttctagaggtttttcaagttgccccttctctgttcatggttgatgttcgaaaggtcgccggtgacaccctggaataccacaggttttacaagaacctatgcagcagacttgacagcataatctggaggccaatcgaagtttctgcgaaatctaagctgctgaggacgaccacttgctagcccagcactgagctactgtaaatggcaaccaacaacaagagacgtggttcgtagccgttagaagagggggaaacttctgttaaatccagcgtatagctcgtggagctgggattcacgaggatttctgcatctcgctttctcaggtgatgcatgtaccatagctgtcttcgttagatcagacgaggcagctcaaagcaccaggtgtttgtatatatatattttttgtaacgctattgtagatagcctgtgtagctccagccgtgcagctgtatgtagcagaaacctgaatgtccgaaaacgcccctgaatgtcaggtagaatcgttgcttccaaacacatcataaaagatcaaaatagaaataaacggaagatgtttacataacttttttattattattttaggagggagtcttttctatctcgagggtttatttgaaataaaaaaatgaaa

SEQ ID NO: 58537 - DNA, 1124 bp, Zea Mays
gacaggaagcgatggagagttttactaatgggaatgttcgattactgaagcatgagcgtagcattgtcgcagaggatgatcttgaccagcgatggcaggaagccactggagagtctgtttctgaggtcatattcctcagcaaacacactgcagtctccaaacgtccagcactcacagtgcatccaattggtgtgccacatctgaaggaggatgaaaccccaccccaaggaggaactcctggatgggcagcaattccaagtcctcgaattggaccttggctccggttgatgcaaaagatagctgtagaacaaggccttgttccagagtttgaggttacgcttgaggctactcaccatggaccagttaccagcacacccaccatgtttgttgagataggaagtacagaagaccactggggtcgacaagatgctgcacaggcaattgctctagttctatggaaaggtcttggtctggaggatggaaatgctgttggaacttggcagaggaattgtgaaaaggttctattaggtataggaggtggtcactatgttcctcgtcacatggatattgtcatcaaagatggtgtatgggtcggtcatttactctctggttactccttgccaatggacatgtcgtcgcaagtaaatgtaaagagttctgaagaggttgctggaatgtggaagcactccatcaaagtttcttatgaagcaacaaaggcagcatttcctggtggtgaagttatcgcgcatcttgatcacaagagcttcaagggctggcagaagaatgctgttacatgcttcttgcaggagcagaacatcaggataggaaagcctagcgatttcctgtgacgtgctacgacagtgctggacaggacaggtggagaggctgtgaatgcttgagctgatttccctatgcgcacgctgaataaatatgagacataggggctgtttggttcgtggctaaatgtgtcatactttgcctaaggttagtcgttcgaattgaataactaaccttagttagaaaagttagtcaaaatgtggtaaattaggctcaaaccaaacagccctatagtaagactcgatccttaatgcggttcaagagcttgaatttgccgttagcccgca

SEQ ID NO: 58538 - DNA, 1500 bp, Zea Mays
acaatccacagatacggtcataccgactgctgttgccccccgatttcccgtccgcccgcagtttctgaaggcacaccaaaacgatcagacctgtagacagtactccagtccacgaaatcctcgtacttgtgagttgtgttggctggccctcgactagcgtgttgtagcgcactagcgccacagtaatcgagagtgctttcccaggtcgaggtggtgtaggtgtttggcggagcagtcggggcgttggaatctgaggaggagaagatggtggtgctggtggtggccacgacgtcagacccggcgtccattgggcccgccgccgccttcctcgccatgcccggatggtcccccggcccgcccatcgccgaggcgatggagagttttactaatgggaatgttcgattactgaagcatgagcgtagcattgtcgcagaggatgatcttgaccagcgatggcaggaagccactggagagtctgtttctgaggtcatattcctcagcaaacacactgcagtctccaaacgtccagcactcacagtgcatccaattggtccgttcttctttcgtgtgccacatctgaaggaggatgaaaccccaccccaaggaggaactcctggatgggcagcaattccaagtcctcgaattggaccttggctccggttgatgcaaaagatagctgtagaacaaggccttgttccagagtttgaggttacgcttgaggctactcaccatggaccagttaccagcacacccaccatgtttgttgagataggaagtacagaagaccactggggtcgacaagatgctgcacaggcaattgctctagttctatggaaaggtcttggtctggaggatggaaatgctgttggaacttggcagaggaattgtgaaaaggttctattaggtataggaggtggtcactatgttcctcgtcacatggatattgtcatcaaagatggtgtatgggtcggtcatttactctctggttactccttgccaatggacatgtcgtcgcaagtaaatgtaaagagttctgaagaggttgctggaatgtggaagcactccatcaaagtttcttatgaagcaacaaaggcagcatttcctggtggtgaagttatcgcgcatcttgatcacaagagcttcaagggctggcagaagaatgctgttacatgcttcttgcaggagcagaacatcaggataggaaagcctagcgatttcctgtgacgtgctacgacagtgctggacaggacaggtggagaggctgtgaatgcttgagctgatttccctatgcgcacgctgaataaatatgagacataggggctgtttggttcgtggctaaatgtgtcatactttgcctaaggttagtcgttcgaattgaataactaaccttagttagaaaagttagtcaaaatgtggtaaattaggctcaaaccaaacagccctatagtaagactcgatccttaatgcggttcaagagcttgaatttgccgttagcccgca

SEQ ID NO: 58539 - DNA, 1249 bp, Zea Mays
atcaatctgatctgatttaatgcccataagcctcgagtcggtccatccggttttgtgttgcgctatctcctattttgtggaggcgatggagagttttactaatgggaatgttcgattactgaagcatgagcgtagcattgtcgcagaggatgatcttgaccagcgatggcaggaagccactggagagtctgtttctgaggtcatattcctcagcaaacacactgcagtctccaaacgtccagcactcacagtgcatccaattggtgtgccacatctgaaggaggatgaaaccccaccccaaggaggaactcctggatgggcagcaattccaagtcctcgaattggaccttggctccggttgatgcaaaagatagctgtagaacaaggccttgttccagagtttgaggttacgcttgaggctactcaccatggaccagttaccagcacacccaccatgtttgttgagatagagttgattactgcactatagaagatatcctcagcaaaatcataaatagaaggaagtacagaagaccactggggtcgacaagatgctgcacaggcaattgctctagttctatggaaaggtcttggtctggaggatggaaatgctgttggaacttggcagaggaattgtgaaaaggttctattaggtataggaggtggtcactatgttcctcgtcacatggatattgtcatcaaagatggtgtatgggtcggtcatttactctctggttactccttgccaatggacatgtcgtcgcaagtaaatgtaaagagttctgaagaggttgctggaatgtggaagcactccatcaaagtttcttatgaagcaacaaaggcagcatttcctggtggtgaagttatcgcgcatcttgatcacaagagcttcaagggctggcagaagaatgctgttacatgcttcttgcaggagcagaacatcaggataggaaagcctagcgatttcctgtgacgtgctacgacagtgctggacaggacaggtggagaggctgtgaatgcttgagctgatttccctatgcgcacgctgaataaatatgagacataggggctgtttggttcgtggctaaatgtgtcatactttgcctaaggttagtcgttcgaattgaataactaaccttagttagaaaagttagtcaaaatgtggtaaattaggctcaaaccaaacagccctatagtaagactcgatccttaatgcggttcaagagcttgaatttgccgttagcccgca

SEQ ID NO: 58540 - DNA, 1186 bp, Zea Mays
atcaatctgatctgatttaatgcccataagcctcgagtcggtccatccggttttgtgttgcgctatctcctattttgtggaggcgatggagagttttactaatgggaatgttcgattactgaagcatgagcgtagcattgtcgcagaggatgatcttgaccagcgatggcaggaagccactggagagtctgtttctgaggtcatattcctcagcaaacacactgcagtctccaaacgtccagcactcacagtgcatccaattggtgtgccacatctgaaggaggatgaaaccccaccccaaggaggaactcctggatgggcagcaattccaagtcctcgaattggaccttggctccggttgatgcaaaagatagctgtagaacaaggccttgttccagagtttgaggttacgcttgaggctactcaccatggaccagttaccagcacacccaccatgtttgttgagataggaagtacagaagaccactggggtcgacaagatgctgcacaggttctatggaaaggtcttggtctggaggatggaaatgctgttggaacttggcagaggaattgtgaaaaggttctattaggtataggaggtggtcactatgttcctcgtcacatggatattgtcatcaaagatggtgtatgggtcggtcatttactctctggttactccttgccaatggacatgtcgtcgcaagtaaatgtaaagagttctgaagaggttgctggaatgtggaagcactccatcaaagtttcttatgaagcaacaaaggcagcatttcctggtggtgaagttatcgcgcatcttgatcacaagagcttcaagggctggcagaagaatgctgttacatgcttcttgcaggagcagaacatcaggataggaaagcctagcgatttcctgtgacgtgctacgacagtgctggacaggacaggtggagaggctgtgaatgcttgagctgatttccctatgcgcacgctgaataaatatgagacataggggctgtttggttcgtggctaaatgtgtcatactttgcctaaggttagtcgttcgaattgaataactaaccttagttagaaaagttagtcaaaatgtggtaaattaggctcaaaccaaacagccctatagtaagactcgatccttaatgcggttcaagagcttgaatttgccgttagcccgca

SEQ ID NO: 58541 - DNA, 1074 bp, Zea Mays
atcaatctgatctgatttaatgcccataagcctcgagtcggtccatccggttttgtgttgcgctatctcctattttgtggaggcgatggagagttttactaatgggaatgttcgattactgaagcatgagcgtagcattgtcgcagaggatgatcttgaccagcgatggcaggaagccactggagagtctgtttctgaggtcatattcctcagcaaacacactgcagtctccaaacgtccagcactcacagtgcatccaattggtgtgccacatctgaaggaggatgaaaccccaccccaaggaggaactcctggatgggcagcaattccaagtcctcgaattggaccttggctccggttgatgcaaaagatagctgtagaacaaggccttgttccagagtttgaggttacgcttgaggctactcaccatggaccagttaccagcacacccaccatgtttgttgagataggaagtacagaagaccactggggtcgacaagatgctgcacaggcaattgctctagttctatggaaaggtcttggtctggaggatggaaatgctgttggaacttggcagaggaattgtgaaaaggttctattaggtataggaggtggtcactatgttcctcgtcacatggatattgtcatcaaagatggtgtatgggtcggtcatttactctctggttactccttgccaatggacatgtcgtcgcaagtaaatgtaaagagttctgaagaggttgctggaatgtggaagcactccatcaaagtttcttatgaagcaacaaaggcagcatttcctggtggtgaagttatcgcgcatcttgatcacaagagcttcaagggctggcagaagaatgctgttacatgcttcttgcaggagcagaacatcaggataggaaagcctagcgatttcctgtgacgtgctacgacagtgctggacaggacaggtggagaggctgtgaatgcttgagctgatttccctatgcgcacgctgaataaatatgagacagccctatagtaagactcgatccttaatgcggttcaagagcttgaatttgccgttagcccgca

SEQ ID NO: 58542 - DNA, 1162 bp, Zea Mays
caccaatattatctgtggagttgctaggactctaggagttgcggaggcgatggagagttttactaatgggaatgttcgattactgaagcatgagcgtagcattgtcgcagaggatgatcttgaccagcgatggcaggaagccactggagagtctgtttctgaggtcatattcctcagcaaacacactgcagtctccaaacgtccagcactcacagtgcatccaattggtgtgccacatctgaaggaggatgaaaccccaccccaaggaggaactcctggatgggcagcaattccaagtcctcgaattggaccttggctccggttgatgcaaaagatagctgtagaacaaggccttgttccagagtttgaggttacgcttgaggctactcaccatggaccagttaccagcacacccaccatgtttgttgagataggaagtacagaagaccactggggtcgacaagatgctgcacaggcaattgctctagttctatggaaaggtcttggtctggaggatggaaatgctgttggaacttggcagaggaattgtgaaaaggttctattaggtataggaggtggtcactatgttcctcgtcacatggatattgtcatcaaagatggtgtatgggtcggtcatttactctctggttactccttgccaatggacatgtcgtcgcaagtaaatgtaaagagttctgaagaggttgctggaatgtggaagcactccatcaaagtttcttatgaagcaacaaaggcagcatttcctggtggtgaagttatcgcgcatcttgatcacaagagcttcaagggctggcagaagaatgctgttacatgcttcttgcaggagcagaacatcaggataggaaagcctagcgatttcctgtgacgtgctacgacagtgctggacaggacaggtggagaggctgtgaatgcttgagctgatttccctatgcgcacgctgaataaatatgagacataggggctgtttggttcgtggctaaatgtgtcatactttgcctaaggttagtcgttcgaattgaataactaaccttagttagaaaagttagtcaaaatgtggtaaattaggctcaaaccaaacagccctatagtaagactcgatccttaatgcggttcaagagcttgaatttgccgttagcccgca

SEQ ID NO: 58543 - DNA, 1197 bp, Zea Mays
aggcaactgtgcaattcgggatgtatgagtgactatcgcgccaacaggattttcatgtagccacgaatatctagttaggaggcgatggagagttttactaatgggaatgttcgattactgaagcatgagcgtagcattgtcgcagaggatgatcttgaccagcgatggcaggaagccactggagagtctgtttctgaggtcatattcctcagcaaacacactgcagtctccaaacgtccagcactcacagtgcatccaattggtgtgccacatctgaaggaggatgaaaccccaccccaaggaggaactcctggatgggcagcaattccaagtcctcgaattggaccttggctccggttgatgcaaaagatagctgtagaacaaggccttgttccagagtttgaggttacgcttgaggctactcaccatggaccagttaccagcacacccaccatgtttgttgagataggaagtacagaagaccactggggtcgacaagatgctgcacaggcaattgctctagttctatggaaaggtcttggtctggaggatggaaatgctgttggaacttggcagaggaattgtgaaaaggttctattaggtataggaggtggtcactatgttcctcgtcacatggatattgtcatcaaagatggtgtatgggtcggtcatttactctctggttactccttgccaatggacatgtcgtcgcaagtaaatgtaaagagttctgaagaggttgctggaatgtggaagcactccatcaaagtttcttatgaagcaacaaaggcagcatttcctggtggtgaagttatcgcgcatcttgatcacaagagcttcaagggctggcagaagaatgctgttacatgcttcttgcaggagcagaacatcaggataggaaagcctagcgatttcctgtgacgtgctacgacagtgctggacaggacaggtggagaggctgtgaatgcttgagctgatttccctatgcgcacgctgaataaatatgagacataggggctgtttggttcgtggctaaatgtgtcatactttgcctaaggttagtcgttcgaattgaataactaaccttagttagaaaagttagtcaaaatgtggtaaattaggctcaaaccaaacagccctatagtaagactcgatccttaatgcggttcaagagcttgaatttgccgttagcccgca

SEQ ID NO: 58544 - DNA, 1183 bp, Zea Mays
tctgaactcatttaagtttcaatcaatttctttaatattgtaaaaatgaaggcatccaactgatgaggcgatggagagttttactaatgggaatgttcgattactgaagcatgagcgtagcattgtcgcagaggatgatcttgaccagcgatggcaggaagccactggagagtctgtttctgaggtcatattcctcagcaaacacactgcagtctccaaacgtccagcactcacagtgcatccaattggtgtgccacatctgaaggaggatgaaaccccaccccaaggaggaactcctggatgggcagcaattccaagtcctcgaattggaccttggctccggttgatgcaaaagatagctgtagaacaaggccttgttccagagtttgaggttacgcttgaggctactcaccatggaccagttaccagcacacccaccatgtttgttgagataggaagtacagaagaccactggggtcgacaagatgctgcacaggcaattgctctagttctatggaaaggtcttggtctggaggatggaaatgctgttggaacttggcagaggaattgtgaaaaggttctattaggtataggaggtggtcactatgttcctcgtcacatggatattgtcatcaaagatggtgtatgggtcggtcatttactctctggttactccttgccaatggacatgtcgtcgcaagtaaatgtaaagagttctgaagaggttgctggaatgtggaagcactccatcaaagtttcttatgaagcaacaaaggcagcatttcctggtggtgaagttatcgcgcatcttgatcacaagagcttcaagggctggcagaagaatgctgttacatgcttcttgcaggagcagaacatcaggataggaaagcctagcgatttcctgtgacgtgctacgacagtgctggacaggacaggtggagaggctgtgaatgcttgagctgatttccctatgcgcacgctgaataaatatgagacataggggctgtttggttcgtggctaaatgtgtcatactttgcctaaggttagtcgttcgaattgaataactaaccttagttagaaaagttagtcaaaatgtggtaaattaggctcaaaccaaacagccctatagtaagactcgatccttaatgcggttcaagagcttgaatttgccgttagcccgca

SEQ ID NO: 58545 - DNA, 1096 bp, Zea Mays
cccataagcaaaacctcctccttcttcctcccttttgcatttgtgctacctgccctgccccgcgccgccgccgccgccgccaacccgccattacctgcgccatgccaccgcgaaaacgcccgccgtcgccgccggaggagccctcccttgcctcgaagcctcgacctgacgcgcagccgtccaaacccgaccccgattccgagcagtcgaccatcaacccgaggatcctcgcccaactccccaaccagggagcgcctggtgtacaagctcatcttcgaggcgggcaacaagggcatgtggatgctggacatccgcaagaagctgctgatggcccccaacgtcgccaccaaggtcgtgcgcaccctcgtggcaagcgggctcctcaaagaggtcagcgacgtgcgccaccgcagcaggaagatcttcatggccaccgacttccagccctccgccgagatcaccgggggcacctggtaccacgacggccgcctggacaccgacgccgtaaccaccgcgcgccgctgctgccaggcgcaggtccagaggctcggcgccgcgaccgcgcagatgatccaccaaggcattctcaaggaagaccccagggccgggtacactatcgacaaggtcagggatatcatcaagaccatggtgctcgacaaggtgctcgaggaggtcaagagcaccggcgcgggggattttagcgccgtcagggccggcacaatgtgctaccggctggtcactggggctccgcagggagggatgatggagggaatcccttgtggggtttgccccaggattcatgagtgctcgccggaggggatcatctcacccagcacctgcgtttactacaagaagtggctgcagatggacttctaggcggtgacggtttgcatctctacgctcatgggacactttggtcatacgtactggcacttaatacgtctggatcgaaggggttgaagaggcttctattgtaatatattttagtaatatattttatttataatgtattgtatgattttatgttaatttttttacttgcaatatagaaactagaaataagaactaattattgcacttttaatcgatcttcgag

SEQ ID NO: 58546 - DNA, 1187 bp, Zea Mays
gcaaaacctcctccttcttcctcccttttgcatttgtgctacctgccctgccccgcgccgccgccgccgccgccaacccgccattacctgcgccatgccaccgcgaaaacgcccgccgtcgccgccggaggagccctcccttgcctcgaagcctcgacctgacgcgcagccgtccaaacccgaccccgattccgagcagtcgaccatcaacccgaggatcctcgcccaactccccaaccagggagcgcctggtgtacaagctcatcttcgaggcgggcaacaagggcatgtggatgctggacatccgcaagaagctgctgatggcccccaacgtcgccaccaaggtcgtgcgcaccctcgtggcaagcgggctcctcaaagaggtcagcgacgtgcgccaccgcagcaggaagatcttcatggccaccgacttccagccctccgccgagatcaccgggggcacctggtaccacgacggccgcctggacaccgacgccgtaaccaccgcgcgccgctgctgccaggcgcaggtccagaggctcggcgccgcgaccgcgcagatgatccaccaaggcattctcaaggaagaccccagggccgggtacactatcgacaaggtcagggatatcatcaagaccatggtgctcgacaaggtgctcgaggaggtcaagagcaccggcgcgggggattttagcgccgtcagggccggcacaatgtgctaccggctggtcactggggctccgcagggagggatgatggagggaatcccttgtggggtttgccccaggattcatgagtgctcgccggaggggatcatctcacccagcacctgcgtttactacaagaagtggctgcagatggacttctaggcggtgacggtgagccctcttctgtccgtcacgatggggtgttggagtccattggagaatttagtttcatattgaccagtcgggacctctgaattctgaaaggataggtttgcatctctacgctcatgggacactttggtcatacgtactggcacttaatacgtctggatcgaaggggttgaagaggcttctattgtaatatattttagtaatatattttatttataatgtattgtatgattttatgttaatttttttacttgcaatatagaaactagaaataagaactaattattgcacttttaatcgatcttcgag

SEQ ID NO: 58547 - DNA, 892 bp, Zea Mays
ctcctccttcttcctcccttttgcatttgtgctacctgccctgccccgcgccgccgccgccgccgccaacccgccattacctgcgccatgccaccgcgaaaacgcccgccgtcgccgccggaggagccctcccttgcctcgaagcctcgacctgacgcgcagccgtccaaacccgaccccgattccgagcagtcgaccatcaacccgaggatcctcgcccaactccccaaccagggagcgcctggtgtacaagctcatcttcgaggcgggcaacaagggcatgtggatgctggacatccgcaagaagctgctgatggcccccaacgtcgccaccaaggtcgtgcgcaccctcgtggcaagcgggctcctcaaagaggtcagcgacgtgcgccaccgcagcaggaagatcttcatggccaccgacttccagccctccgccgagatcaccgggggcacctggtaccacgacggccgcctggacaccgacgccgtaaccaccgcgcgccgctgctgccaggcgcaggtccagaggctcggcgccgcgaccgcgcagatgatccaccaaggcattctcaaggaagaccccagggccgggtacactatcgacaaggtcagggatatcatcaagaccatggtgctcgacaaggtgctcgaggaggtcaagagcaccggcgcgggggattttagcgccgtcagggccggcacaatgtgctaccggctggtcactggggctccgcagggagggatgatggagggaatcccttgtggggtttgccccaggattcatgagtgctcgccggaggggatcatctcacccagcacctgcgtttactacaagaagtggctgcagatggacttctaggcggtgacggggaaaaagcatccttatgat

SEQ ID NO: 58548 - DNA, 470 bp, Zea Mays
acagttatggcctatcaactttcaggctccacggtgcatctgacgattgagagtaccagcggggatcttaagtgaacctggcgggtagagtctggttctgttacacttgtaccactgaagagttccgagttccaaaagagaaagagaaaggtaaagcaggctagacatgatcatcagctggcaatacataggtgcggattagcatggaaagtagctcatttactagcaggcaattttttggaagtcttaaggccatactgagttggactggtttggctcagcgttacatactgtatacaacgaatgcccaatgtaacctttcccaacacaatgctgttctgatattctttctgtacatgtccttgttttttttttggacattctatttctatacaagcatacatgtggatgtcatagtctcatgaagtggcagagtgttagcactgagataggggaaacgagtagagaaa

SEQ ID NO: 58549 - DNA, 4819 bp, Zea Mays
atgagactcgcctcgaacccagaacgcgacgcgacgcgacgcaggcccacccctgtgaccctgtcctgcagaaatattcattatcttatattcaaataaataaaataaaaaccgactgaatttgcttatttccggctcttgttgaaaccgccacccgattcctccgctcgccaaatcctcgccgtgccctcgtagcaattccttgcgtcggcgcatcatcgcggcctcctctccctctctctctctatctctctcaatctctccgttggcaaatcgttgaatcgacgtgcttggccccggccgctctgagcccgccgccagcctcctcgtctgaagaagaacgacagccgtcgggctccggtggtcccgccgaagaacggcaggtagccagccgcgctcatcacgccggcgactcgattggcattgtattggcctttccgtttgttgtcagatcgaaaagaagaggaaagaatcgggaagcccgcccccctggtggatatgcgaggccatgtttttcatgtcacacccccgaccgattcgcctcgatttcgttcttctgttcttctgcgccgcaatggctccttcgctcgttcatatctgttattctgttgtgaatactcgagttctcgaagcaaaacgacctgatgagattcctcaaggggagcaaggtggaggtattgcaggaggcagatgtgccgtttggttcttggaggcctggtgagatcgtctccggcaatggacacgcctactttgtgagatatgatgaaagtcccgttgactccagcgtggctgttgaaagggtgccaagaaggttgatgaggcctcgccctcctgcggatgatcctgtacgctggagtttgggtagtatcattgaggcctttgacagctactcgtggaaggttgccgaggtggtgagagtgcttggaaagaatcaatatctagtcaggctccttgggtcctcgctggagttgagtgcacatgcatcggttcttcgaatgaggaagctttggctagatgacatatggattgtgactcagaagtattctgcaagatgcttggatggtggtgcattccgaggtcaatcaaaagataaaaatttagaccataacttcagaatggacagtcgtcaacttgagaaccagaatgcctttgagggtgatacatctagaggcatcaagagaaaatcgtctgctatatcaacacatcctcaatgcagtgaaatcactaagagattgcggacaccaaatagagatggaaggtactcaaagctggttgatagaagtttttcccctttggctgaaaaggtagatgatgttgattccccatgcattattctacgcgggaaatgcatccatgctggtcataaatggcatactggaacaactgaagaatttagtgatacagagagtatatcatcttctgttggcagttctagtcctaacagtacccctcatagatcacaacattataatttggtctaccaaagtggagatagctgtagtagaactgatgatgatgaagcttctacatctgaaagagaaacatcagaacatgataacaatgggtcgagggaagaaacccatgtgctggaattacatgcttatcgcgcaacaatgttagccttgcatgcttgtgggtcaattagctgggagcaagaggctttgttgactaacctaagggccaaggttggaggcttgtaaagcatccttccataggttcttgtaaatggaggagtctgccacatgttttgcagtgcgataaatgtggcaacatttccaatgaacttccattggtcaagctgggtcaagactggttccagattaatactggttgctggataaaatggtcaaattagattggtttatcatccaaagacaaaaaggtgatctgcttgttgtgtgatttttcacagaacaagcatatttcttctatgatggcatgcacccgtttgactgtccagaagagcacttgagggaacatctgtatcagcaccggagtgtttcctctttccagcaccggagtgtttccaccatcgtcattagaggtaggaccctcccacaacctagaagcaagaccctcgcacgcccgatctgaggatgacttcgagggatatgacgattgacttctcgagtcagacgatgaacttacatttgatgcgcaacctgaaggcccggctaactggaactgggtggctgagctacaataggaggttcaaactgagctgcctgctgaactaagtatgattcaagacgaaaaccactctaagtatgacctctcggatgaggacgtctccgtggaagggacggacgcgtccgatgatgatattttggcagataatcaggacccggctgatgaggatattgaagatatcgagccgaaagaagatgagaaagattcagaggagctcattgttatcgatgatgagccatgggcgccagatccatttattcctgttgttcctaatccgaagactcgagcaccggagattcctgtaccagaagcccctgcgccagtagctcttgcttcagagggtcccccacaaggaaatacaatgcctgagctcgtcccgcaaccggattgggtaaggacaaaatctcacaatcatcaactcaggtgtggctgaagacaatattcgtatggagactactcaaatataccgctgccctgaacactgactgagcatgacgctgccttgattgaactcgaggaattaaagaagcagaatgcccaactgtgactcatctggagaatgaaggacaacctcaggctgccgtgaaacttagattttcctgacttgcagccgacttctatgtagacacaaaattgttgggattacatagtttggccttgcatcaaggaaaagttgcaggttatctgtacagtaatttgccagtcgtcttatgcatatgatgcatacctttttactgttctagtgttttgtaatccagatattgtagccggtgttcttggtgaaatatgcgccaggagagactgagacttattttgccaccttactttgtgcaaagccagctgcccttcaactttgctggacaggcaatcacatattttcagaagtgaagcggtaggccccggtagttctgatgagcaagcaagtgaaaagtttgtatgtggtgtatgacgatgtaccttggatctctttacttccaattgaacctgcacatgttcctggcttcgtgtcatcacaatgaccttgtattgtttcagtgttcacctacagttcatgtaccttaggttccttttctgtttttgccttacacgtaattggttgcagcagagcaccaaggatcggggatgtacaaatcaatatcagtttgcaactttgcatggaaggcatgcccttgcaaggcctcttggacagactccttcctcagtgctgaccgcatttgcagttgcagtgcgttagaggtggctgctgatgctctgggcactagagaaccaaaagcatagtagtaaaggctttgtgcacatatctagtagtaaaggcctcttggacagactccttcctcagtgctgaccccatccatttctacaaatcgaattctggagacaacgccttagtggaatctgcgagttcaaaaaaatacatggaggtgataaagaaaagaatgacggatcttacaaatcagattagactacgtaaatggtggtagcacggtttatttaaatgttcctatcatgaatcagtactaactacatgtcacacagatgctgctttgaaccctcggacacactatgcgtatggcactagtgtttcagttatgagtgatcttcggcaggcattcgaatatatgactgatgtggatgcagcagtccaagcactgcaggagttgagttgtacagaagaaagcaaggggagtttgacagacctttggctgaaaaaatggcgtacgatcacaacactttgcttggtaagtaattacccgttgtctttagtacattaaggcttttgttcgtcgtgtgaatgtgctactttttgcagcatcatggtgggccatgtttggtgtagacactccaacgttacaaatgcttgctttgagattggtttcacagtgttgttcctccagtggctacgatagtataggtagcatggtgtaccatgttaaggcgagggcaatgataagagacttcaccattgtgttgtcgtctccttcgaatgaggccaccgtgacttgatagctcatgataaactggatcaaccttccgttgtactttggccaattcccgtccctatagttgcttggccatggcgttgcctgtagtctggcggagagtgggcatctgttatcagtgaaattgaaggcatggaaggtgttgctctgatgagtctatctaactttgtcaaaactgctcaatctcacatggccatgcgaggggtgcgtcggatcctactgggcctgcaacagcgagatttcctgctcaagggcttggaggtgctctttttcttgctagataaggagacgtattatggcctgtgccttactacgttgctgcttggccgcttgagcatctctctgcttctgaaggttggagttgcacatgcaaaggctcttgagtaagagttgctcttcggtgttgacaccaaggtccgggccgtcgtggaggtctgcatcattgtattccggaggcatttcaaatgggtgatgttggtggcctgctatggcattgaaacctaaggggccagaggcaggttcttcatcaaatccagacaaactttagcttggtagggttggcttttggggtttgggagggggtcccccaagttttctaaactggtggtgtggacctcgcactcttgttc

SEQ ID NO: 58550 - DNA, 5015 bp, Zea Mays
aaatattcattatcttatattcaaataaataaaataaaaaccgactgaatttgcttatttccggctcttgttgaaaccgccacccgattcctccgctcgccaaatcctcgccgtgccctcgtagcaattccttgcgtcggcgcatcatcgcggcctcctctccctctctctctctatctctctcaatctctccgttggcaaatcgttgaatcgacgtgcttggccccggccgctctgagcccgccgccagcctcctcgtctgaagaagaacgacagccgtcgggctccggtggtcccgccgaagaacggcaggtagccagccgcgctcatcacgccggcgactcgattggcattgtattggcctttccgtttgttgtcagatcgaaaagaagaggaaagaatcgggaagcccgcccccctggtggatatgcgaggccatgtttttcatgtcacacccccgaccgattcgcctcgatttcgttcttctgttcttctgcgccgcaatggctccttcgctcgttcatatctgttattctgttgtgaatactcggtttgagtcaatgatgcgatttctttcattcaaaatcttctgggtgctcctgtgttattctgatttattcgctctgtttcgacgccagttaatctatcgtgtcggctgttgacaatatctttggtttcttgtccgcgacagagttctcgaagcaaaacgacctgatgagattcctcaaggggagcaaggtggaggtattgcaggaggcagatgtgccgtttggttcttggaggcctggtgagatcgtctccggcaatggacacgcctactttgtgagatatgatgaaagtcccgttgactccagcgtggctgttgaaagggtgccaagaaggttgatgaggcctcgccctcctgcggatgatcctgtacgctggagtttgggtagtatcattgaggcctttgacagctactcgtggaaggttgccgaggtggtgagagtgcttggaaagaatcaatatctagtcaggctccttgggtcctcgctggagttgagtgcacatgcatcggttcttcgaatgaggaagctttggctagatgacatatggattgtgactcagaagtattctgcaagatgcttggatggtggtgcattccgaggtcaatcaaaagataaaaatttagaccataacttcagaatggacagtcgtcaacttgagaaccagaatgcctttgagggtgatacatctagaggcatcaagagaaaatcgtctgctatatcaacacatcctcaatgcagtgaaatcactaagagattgcggacaccaaatagagatggaaggtactcaaagctggttgatagaagtttttcccctttggctgaaaaggtagatgatgttgattccccatgcattattctacgcgggaaatgcatccatgctggtcataaatggcatactggaacaactgaagaatttagtgatacagagagtatatcatcttctgttggcagttctagtcctaacagtacccctcatagatcacaacattataatttggtctaccaaagtggagatagctgtagtagaactgatgatgatgaagcttctacatctgaaagagaaacatcagaacatgataacaatgggtcgagggaagaaacccatgtgctggaattacatgcttatcgcgcaacaatgttagccttgcatgcttgtgggtcaattagctgggagcaagaggctttgttgactaacctaaggttaacactgaacatctcaattgatgaacatctagctgaattgaggagtttggttacccgtgctgttacttccagatagcttttgttgttactttcctggtggcatttcatatctttcaaattattggccaaggttggaggcttgtaaagcatccttccataggttcttgtaaatggaggagtctgccacatgttttgcagtgcgataaatgtggcaacatttccaatgaacttccattggtcaagctgggtcaagactggttccagattaatactggttgctggataaaatggtcaaattagattggtttatcatccaaagacaaaaaggtgatctgcttgttgtgtgatttttcacagaacaagcatatttcttctatgatggcatgcacccgtttgactgtccagaagagcacttgagggaacatctgtatcagcaccggagtgtttcctctttccagcaccggagtgtttccaccatcgtcattagaggtaggaccctcccacaacctagaagcaagaccctcgcacgcccgatctgaggatgacttcgagggatatgacgattgacttctcgagtcagacgatgaacttacatttgatgcgcaacctgaaggcccggctaactggaactgggtggctgagctacaataggaggttcaaactgagctgcctgctgaactaagtatgattcaagacgaaaaccactctaagtatgacctctcggatgaggacgtctccgtggaagggacggacgcgtccgatgatgatattttggcagataatcaggacccggctgatgaggatattgaagatatcgagccgaaagaagatgagaaagattcagaggagctcattgttatcgatgatgagccatgggcgccagatccatttattcctgttgttcctaatccgaagactcgagcaccggagattcctgtaccagaagcccctgcgccagtagctcttgcttcagagggtcccccacaaggaaatacaatgcctgagctcgtcccgcaaccggattgggtaaggacaaaatctcacaatcatcaactcaggtgtggctgaagacaatattcgtatggagactactcaaatataccgctgccctgaacactgactgagcatgacgctgccttgattgaactcgaggaattaaagaagcagaatgcccaactgtgactcatctggagaatgaaggacaacctcaggctgccgtgaaacttagattttcctgacttgcagccgacttctatgtagacacaaaattgttgggattacatagtttggccttgcatcaaggaaaagttgcaggttatctgtacagtaatttgccagtcgtcttatgcatatgatgcatacctttttactgttctagtgttttgtaatccagatattgtagccggtgttcttggtgaaatatgcgccaggagagactgagacttattttgccaccttactttgtgcaaagccagctgcccttcaactttgctggacaggcaatcacatattttcagaagtgaagcggtaggccccggtagttctgatgagcaagcaagtgaaaagtttgtatgtggtgtatgacgatgtaccttggatctctttacttccaattgaacctgcacatgttcctggcttcgtgtcatcacaatgaccttgtattgtttcagtgttcacctacagttcatgtaccttaggttccttttctgtttttgccttacacgtaattggttgcagcagagcaccaaggatcggggatgtacaaatcaatatcagtttgcaactttgcatggaaggcatgcccttgcaaggcctcttggacagactccttcctcagtgctgaccgcatttgcagttgcagtgcgttagaggtggctgctgatgctctgggcactagagaaccaaaagcatagtagtaaaggctttgtgcacatatctagtagtaaaggcctcttggacagactccttcctcagtgctgaccccatccatttctacaaatcgaattctggagacaacgccttagtggaatctgcgagttcaaaaaaatacatggaggtgataaagaaaagaatgacggatcttacaaatcagattagactacgtaaatggtggtagcacggtttatttaaatgttcctatcatgaatcagtactaactacatgtcacacagatgctgctttgaaccctcggacacactatgcgtatggcactagtgtttcagttatgagtgatcttcggcaggcattcgaatatatgactgatgtggatgcagcagtccaagcactgcaggagttgagttgtacagaagaaagcaaggggagtttgacagacctttggctgaaaaaatggcgtacgatcacaacactttgcttggtaagtaattacccgttgtctttagtacattaaggcttttgttcgtcgtgtgaatgtgctactttttgcagcatcatggtgggccatgtttggtgtagacactccaacgttacaaatgcttgctttgagattggtttcacagtgttgttcctccagtggctacgatagtataggtagcatggtgtaccatgttaaggcgagggcaatgataagagacttcaccattgtgttgtcgtctccttcgaatgaggccaccgtgacttgatagctcatgataaactggatcaaccttccgttgtactttggccaattcccgtccctatagttgcttggccatggcgttgcctgtagtctggcggagagtgggcatctgttatcagtgaaattgaaggcatggaaggtgttgctctgatgagtctatctaactttgtcaaaactgctcaatctcacatggccatgcgaggggtgcgtcggatcctactgggcctgcaacagcgagatttcctgctcaagggcttggaggtgctctttttcttgctagataaggagacgtattatggcctgtgccttactacgttgctgcttggccgcttgagcatctctctgcttctgaaggttggagttgcacatgcaaaggctcttgagtaagagttgctcttcggtgttgacaccaaggtccgggccgtcgtggaggtctgcatcattgtattccggaggcatttcaaatgggtgatgttggtggcctgctatggcattgaaacctaaggggccagaggcaggttcttcatcaaatccagacaaactttagcttggtagggttggcttttggggtttgggagggggtcccccaagttttctaaactggtggtgtggacctcgcactcttgttc

SEQ ID NO: 58551 - DNA, 4157 bp, Zea Mays
actgaatttgcttatttccggctcttgttgaaaccgccacccgattcctccgctcgccaaatcctcgccgtgccctcgtagcaattccttgcgtcggcgcatcatcgcggcctcctctccctctctctctctatctctctcaatctctccgttggcaaatcgttgaatcgacgtgcttggccccggccgctctgagcccgccgccagcctcctcgtctgaagaagaacgacagccgtcgggctccggtggtcccgccgaagaacggcaggtagccagccgcgctcatcacgccggcgactcgattggcattgtattggcctttccgtttgttgagttctcgaagcaaaacgacctgatgagattcctcaaggggagcaaggtggaggtattgcaggaggcagatgtgccgtttggttcttggaggcctggtgagatcgtctccggcaatggacacgcctactttgtgagatatgatgaaagtcccgttgactccagcgtggctgttgaaagggtgccaagaaggttgatgaggcctcgccctcctgcggatgatcctgtacgctggagtttgggtagtatcattgaggcctttgacagctactcgtggaaggttgccgaggtggtgagagtgcttggaaagaatcaatatctagtcaggctccttgggtcctcgctggagttgagtgcacatgcatcggttcttcgaatgaggaagctttggctagatgacatatggattgtgactcagaagtattctgcaagatgcttggatggtggtgcattccgaggtcaatcaaaagataaaaatttagaccataacttcagaatggacagtcgtcaacttgagaaccagaatgcctttgagggtgatacatctagaggcatcaagagaaaatcgtctgctatatcaacacatcctcaatgcagtgaaatcactaagagattgcggacaccaaatagagatggaaggtactcaaagctggttgatagaagtttttcccctttggctgaaaagggccaaggttggaggcttgtaaagcatccttccataggttcttgtaaatggaggagtctgccacatgttttgcagtgcgataaatgtggcaacatttccaatgaacttccattggtcaagctgggtcaagactggttccagattaatactggttgctggataaaatggtcaaattagattggtttatcatccaaagacaaaaaggtgatctgcttgttgtgtgatttttcacagaacaagcatatttcttctatgatggcatgcacccgtttgactgtccagaagagcacttgagggaacatctgtatcagcaccggagtgtttcctctttccagcaccggagtgtttccaccatcgtcattagaggtaggaccctcccacaacctagaagcaagaccctcgcacgcccgatctgaggatgacttcgagggatatgacgattgacttctcgagtcagacgatgaacttacatttgatgcgcaacctgaaggcccggctaactggaactgggtggctgagctacaataggaggttcaaactgagctgcctgctgaactaagtatgattcaagacgaaaaccactctaagtatgacctctcggatgaggacgtctccgtggaagggacggacgcgtccgatgatgatattttggcagataatcaggacccggctgatgaggatattgaagatatcgagccgaaagaagatgagaaagattcagaggagctcattgttatcgatgatgagccatgggcgccagatccatttattcctgttgttcctaatccgaagactcgagcaccggagattcctgtaccagaagcccctgcgccagtagctcttgcttcagagggtcccccacaaggaaatacaatgcctgagctcgtcccgcaaccggattgggtaaggacaaaatctcacaatcatcaactcaggtgtggctgaagacaatattcgtatggagactactcaaatataccgctgccctgaacactgactgagcatgacgctgccttgattgaactcgaggaattaaagaagcagaatgcccaactgtgactcatctggagaatgaaggacaacctcaggctgccgtgaaacttagattttcctgacttgcagccgacttctatgtagacacaaaattgttgggattacatagtttggccttgcatcaaggaaaagttgcaggttatctgtacagtaatttgccagtcgtcttatgcatatgatgcatacctttttactgttctagtgttttgtaatccagatattgtagccggtgttcttggtgaaatatgcgccaggagagactgagacttattttgccaccttactttgtgcaaagccagctgcccttcaactttgctggacaggcaatcacatattttcagaagtgaagcggtaggccccggtagttctgatgagcaagcaagtgaaaagtttgtatgtggtgtatgacgatgtaccttggatctctttacttccaattgaacctgcacatgttcctggcttcgtgtcatcacaatgaccttgtattgtttcagtgttcacctacagttcatgtaccttaggttccttttctgtttttgccttacacgtaattggttgcagcagagcaccaaggatcggggatgtacaaatcaatatcagtttgcaactttgcatggaaggcatgcccttgcaaggcctcttggacagactccttcctcagtgctgaccgcatttgcagttgcagtgcgttagaggtggctgctgatgctctgggcactagagaaccaaaagcatagtagtaaaggctttgtgcacatatctagtagtaaaggcctcttggacagactccttcctcagtgctgaccccatccatttctacaaatcgaattctggagacaacgccttagtggaatctgcgagttcaaaaaaatacatggaggtgataaagaaaagaatgacggatcttacaaatcagattagactacgtaaatggtggtagcacggtttatttaaatgttcctatcatgaatcagtactaactacatgtcacacagatgctgctttgaaccctcggacacactatgcgtatggcactagtgtttcagttatgagtgatcttcggcaggcattcgaatatatgactgatgtggatgcagcagtccaagcactgcaggagttgagttgtacagaagaaagcaaggggagtttgacagacctttggctgaaaaaatggcgtacgatcacaacactttgcttggtaagtaattacccgttgtctttagtacattaaggcttttgttcgtcgtgtgaatgtgctactttttgcagcatcatggtgggccatgtttggtgtagacactccaacgttacaaatgcttgctttgagattggtttcacagtgttgttcctccagtggctacgatagtataggtagcatggtgtaccatgttaaggcgagggcaatgataagagacttcaccattgtgttgtcgtctccttcgaatgaggccaccgtgacttgatagctcatgataaactggatcaaccttccgttgtactttggccaattcccgtccctatagttgcttggccatggcgttgcctgtagtctggcggagagtgggcatctgttatcagtgaaattgaaggcatggaaggtgttgctctgatgagtctatctaactttgtcaaaactgctcaatctcacatggccatgcgaggggtgcgtcggatcctactgggcctgcaacagcgagatttcctgctcaagggcttggaggtgctctttttcttgctagataaggagacgtattatggcctgtgccttactacgttgctgcttggccgcttgagcatctctctgcttctgaaggttggagttgcacatgcaaaggctcttgagtaagagttgctcttcggtgttgacaccaaggtccgggccgtcgtggaggtctgcatcattgtattccggaggcatttcaaatgggtgatgttggtggcctgctatggcattgaaacctaaggggccagaggcaggttcttcatcaaatccagacaaactttagcttggtagggttggcttttggggtttgggagggggtcccccaagttttctaaactggtggtgtggacctcgcactcttgttc

SEQ ID NO: 58552 - DNA, 4472 bp, Zea Mays
actgaatttgcttatttccggctcttgttgaaaccgccacccgattcctccgctcgccaaatcctcgccgtgccctcgtagcaattccttgcgtcggcgcatcatcgcggcctcctctccctctctctctctatctctctcaatctctccgttggcaaatcgttgaatcgacgtgcttggccccggccgctctgagcccgccgccagcctcctcgtctgaagaagaacgacagccgtcgggctccggtggtcccgccgaagaacggcaggtagccagccgcgctcatcacgccggcgactcgattggcattgtattggcctttccgtttgttgtcagatcgaaaagaagaggaaagaatcgggaagcccgcccccctggtggatatgcgaggccatgtttttcatgtcacacccccgaccgattcgcctcgatttcgttcttctgttcttctgcgccgcaatggctccttcgctcgttcatatctgttattctgttgtgaatactcggtttgagtcaatgatgcgatttctttcattcaaaatcttctgggtgctcctgtgttattctgatttattcgctctgtttcgacgccagttaatctatcgtgtcggctgttgacaatatctttggtttcttgtccgcgacagagttctcgaagcaaaacgacctgatgagattcctcaaggggagcaaggtggaggtattgcaggaggcagatgtgccgtttggttcttggaggcctggtgagatcgtctccggcaatggacacgcctactttgtgagatatgatgaaagtcccgttgactccagcgtggctgttgaaagggtgccaagaaggttgatgaggcctcgccctcctgcggatgatcctgtacgctggagtttgggtagtatcattgaggcctttgacagctactcgtggaaggttgccgaggtggtgagagtgcttggaaagaatcaatatctagtcaggctccttgggtcctcgctggagttgagtgcacatgcatcggttcttcgaatgaggaagctttggctagatgacatatggattgtgactcagaagtattctgcaagatgcttggatggtggtgcattccgaggtcaatcaaaagataaaaatttagaccataacttcagaatggacagtcgtcaacttgagaaccagaatgcctttgagggtgatacatctagaggcatcaagagaaaatcgtctgctatatcaacacatcctcaatgcagtgaaatcactaagagattgcggacaccaaatagagatggaaggtactcaaagctggttgatagaagtttttcccctttggctgaaaagggccaaggttggaggcttgtaaagcatccttccataggttcttgtaaatggaggagtctgccacatgttttgcagtgcgataaatgtggcaacatttccaatgaacttccattggtcaagctgggtcaagactggttccagattaatactggttgctggataaaatggtcaaattagattggtttatcatccaaagacaaaaaggtgatctgcttgttgtgtgatttttcacagaacaagcatatttcttctatgatggcatgcacccgtttgactgtccagaagagcacttgagggaacatctgtatcagcaccggagtgtttcctctttccagcaccggagtgtttccaccatcgtcattagaggtaggaccctcccacaacctagaagcaagaccctcgcacgcccgatctgaggatgacttcgagggatatgacgattgacttctcgagtcagacgatgaacttacatttgatgcgcaacctgaaggcccggctaactggaactgggtggctgagctacaataggaggttcaaactgagctgcctgctgaactaagtatgattcaagacgaaaaccactctaagtatgacctctcggatgaggacgtctccgtggaagggacggacgcgtccgatgatgatattttggcagataatcaggacccggctgatgaggatattgaagatatcgagccgaaagaagatgagaaagattcagaggagctcattgttatcgatgatgagccatgggcgccagatccatttattcctgttgttcctaatccgaagactcgagcaccggagattcctgtaccagaagcccctgcgccagtagctcttgcttcagagggtcccccacaaggaaatacaatgcctgagctcgtcccgcaaccggattgggtaaggacaaaatctcacaatcatcaactcaggtgtggctgaagacaatattcgtatggagactactcaaatataccgctgccctgaacactgactgagcatgacgctgccttgattgaactcgaggaattaaagaagcagaatgcccaactgtgactcatctggagaatgaaggacaacctcaggctgccgtgaaacttagattttcctgacttgcagccgacttctatgtagacacaaaattgttgggattacatagtttggccttgcatcaaggaaaagttgcaggttatctgtacagtaatttgccagtcgtcttatgcatatgatgcatacctttttactgttctagtgttttgtaatccagatattgtagccggtgttcttggtgaaatatgcgccaggagagactgagacttattttgccaccttactttgtgcaaagccagctgcccttcaactttgctggacaggcaatcacatattttcagaagtgaagcggtaggccccggtagttctgatgagcaagcaagtgaaaagtttgtatgtggtgtatgacgatgtaccttggatctctttacttccaattgaacctgcacatgttcctggcttcgtgtcatcacaatgaccttgtattgtttcagtgttcacctacagttcatgtaccttaggttccttttctgtttttgccttacacgtaattggttgcagcagagcaccaaggatcggggatgtacaaatcaatatcagtttgcaactttgcatggaaggcatgcccttgcaaggcctcttggacagactccttcctcagtgctgaccgcatttgcagttgcagtgcgttagaggtggctgctgatgctctgggcactagagaaccaaaagcatagtagtaaaggctttgtgcacatatctagtagtaaaggcctcttggacagactccttcctcagtgctgaccccatccatttctacaaatcgaattctggagacaacgccttagtggaatctgcgagttcaaaaaaatacatggaggtgataaagaaaagaatgacggatcttacaaatcagattagactacgtaaatggtggtagcacggtttatttaaatgttcctatcatgaatcagtactaactacatgtcacacagatgctgctttgaaccctcggacacactatgcgtatggcactagtgtttcagttatgagtgatcttcggcaggcattcgaatatatgactgatgtggatgcagcagtccaagcactgcaggagttgagttgtacagaagaaagcaaggggagtttgacagacctttggctgaaaaaatggcgtacgatcacaacactttgcttggtaagtaattacccgttgtctttagtacattaaggcttttgttcgtcgtgtgaatgtgctactttttgcagcatcatggtgggccatgtttggtgtagacactccaacgttacaaatgcttgctttgagattggtttcacagtgttgttcctccagtggctacgatagtataggtagcatggtgtaccatgttaaggcgagggcaatgataagagacttcaccattgtgttgtcgtctccttcgaatgaggccaccgtgacttgatagctcatgataaactggatcaaccttccgttgtactttggccaattcccgtccctatagttgcttggccatggcgttgcctgtagtctggcggagagtgggcatctgttatcagtgaaattgaaggcatggaaggtgttgctctgatgagtctatctaactttgtcaaaactgctcaatctcacatggccatgcgaggggtgcgtcggatcctactgggcctgcaacagcgagatttcctgctcaagggcttggaggtgctctttttcttgctagataaggagacgtattatggcctgtgccttactacgttgctgcttggccgcttgagcatctctctgcttctgaaggttggagttgcacatgcaaaggctcttgagtaagagttgctcttcggtgttgacaccaaggtccgggccgtcgtggaggtctgcatcattgtattccggaggcatttcaaatgggtgatgttggtggcctgctatggcattgaaacctaaggggccagaggcaggttcttcatcaaatccagacaaactttagcttggtagggttggcttttggggtttgggagggggtcccccaagttttctaaactggtggtgtggacctcgcactcttgttc

SEQ ID NO: 58553 - DNA, 4531 bp, Zea Mays
actgaatttgcttatttccggctcttgttgaaaccgccacccgattcctccgctcgccaaatcctcgccgtgccctcgtagcaattccttgcgtcggcgcatcatcgcggcctcctctccctctctctctctatctctctcaatctctccgttggcaaatcgttgaatcgacgtgcttggccccggccgctctgagcccgccgccagcctcctcgtctgaagaagaacgacagccgtcgggctccggtggtcccgccgaagaacggcaggtagccagccgcgctcatcacgccggcgactcgattggcattgtattggcctttccgtttgttgagttctcgaagcaaaacgacctgatgagattcctcaaggggagcaaggtggaggtattgcaggaggcagatgtgccgtttggttcttggaggcctggtgagatcgtctccggcaatggacacgcctactttgtgagatatgatgaaagtcccgttgactccagcgtggctgttgaaagggtgccaagaaggttgatgaggcctcgccctcctgcggatgatcctgtacgctggagtttgggtagtatcattgaggcctttgacagctactcgtggaaggttgccgaggtggtgagagtgcttggaaagaatcaatatctagtcaggctccttgggtcctcgctggagttgagtgcacatgcatcggttcttcgaatgaggaagctttggctagatgacatatggattgtgactcagaagtattctgcaagatgcttggatggtggtgcattccgaggtcaatcaaaagataaaaatttagaccataacttcagaatggacagtcgtcaacttgagaaccagaatgcctttgagggtgatacatctagaggcatcaagagaaaatcgtctgctatatcaacacatcctcaatgcagtgaaatcactaagagattgcggacaccaaatagagatggaaggtactcaaagctggttgatagaagtttttcccctttggctgaaaaggtagatgatgttgattccccatgcattattctacgcgggaaatgcatccatgctggtcataaatggcatactggaacaactgaagaatttagtgatacagagagtatatcatcttctgttggcagttctagtcctaacagtacccctcatagatcacaacattataatttggtctaccaaagtggagatagctgtagtagaactgatgatgatgaagcttctacatctgaaagagaaacatcagaacatgataacaatgggtcgagggaagaaacccatgtgctggaattacatgcttatcgcgcaacaatgttagccttgcatgcttgtgggtcaattagctgggagcaagaggctttgttgactaacctaagggccaaggttggaggcttgtaaagcatccttccataggttcttgtaaatggaggagtctgccacatgttttgcagtgcgataaatgtggcaacatttccaatgaacttccattggtcaagctgggtcaagactggttccagattaatactggttgctggataaaatggtcaaattagattggtttatcatccaaagacaaaaaggtgatctgcttgttgtgtgatttttcacagaacaagcatatttcttctatgatggcatgcacccgtttgactgtccagaagagcacttgagggaacatctgtatcagcaccggagtgtttcctctttccagcaccggagtgtttccaccatcgtcattagaggtaggaccctcccacaacctagaagcaagaccctcgcacgcccgatctgaggatgacttcgagggatatgacgattgacttctcgagtcagacgatgaacttacatttgatgcgcaacctgaaggcccggctaactggaactgggtggctgagctacaataggaggttcaaactgagctgcctgctgaactaagtatgattcaagacgaaaaccactctaagtatgacctctcggatgaggacgtctccgtggaagggacggacgcgtccgatgatgatattttggcagataatcaggacccggctgatgaggatattgaagatatcgagccgaaagaagatgagaaagattcagaggagctcattgttatcgatgatgagccatgggcgccagatccatttattcctgttgttcctaatccgaagactcgagcaccggagattcctgtaccagaagcccctgcgccagtagctcttgcttcagagggtcccccacaaggaaatacaatgcctgagctcgtcccgcaaccggattgggtaaggacaaaatctcacaatcatcaactcaggtgtggctgaagacaatattcgtatggagactactcaaatataccgctgccctgaacactgactgagcatgacgctgccttgattgaactcgaggaattaaagaagcagaatgcccaactgtgactcatctggagaatgaaggacaacctcaggctgccgtgaaacttagattttcctgacttgcagccgacttctatgtagacacaaaattgttgggattacatagtttggccttgcatcaaggaaaagttgcaggttatctgtacagtaatttgccagtcgtcttatgcatatgatgcatacctttttactgttctagtgttttgtaatccagatattgtagccggtgttcttggtgaaatatgcgccaggagagactgagacttattttgccaccttactttgtgcaaagccagctgcccttcaactttgctggacaggcaatcacatattttcagaagtgaagcggtaggccccggtagttctgatgagcaagcaagtgaaaagtttgtatgtggtgtatgacgatgtaccttggatctctttacttccaattgaacctgcacatgttcctggcttcgtgtcatcacaatgaccttgtattgtttcagtgttcacctacagttcatgtaccttaggttccttttctgtttttgccttacacgtaattggttgcagcagagcaccaaggatcggggatgtacaaatcaatatcagtttgcaactttgcatggaaggcatgcccttgcaaggcctcttggacagactccttcctcagtgctgaccgcatttgcagttgcagtgcgttagaggtggctgctgatgctctgggcactagagaaccaaaagcatagtagtaaaggctttgtgcacatatctagtagtaaaggcctcttggacagactccttcctcagtgctgaccccatccatttctacaaatcgaattctggagacaacgccttagtggaatctgcgagttcaaaaaaatacatggaggtgataaagaaaagaatgacggatcttacaaatcagattagactacgtaaatggtggtagcacggtttatttaaatgttcctatcatgaatcagtactaactacatgtcacacagatgctgctttgaaccctcggacacactatgcgtatggcactagtgtttcagttatgagtgatcttcggcaggcattcgaatatatgactgatgtggatgcagcagtccaagcactgcaggagttgagttgtacagaagaaagcaaggggagtttgacagacctttggctgaaaaaatggcgtacgatcacaacactttgcttggtaagtaattacccgttgtctttagtacattaaggcttttgttcgtcgtgtgaatgtgctactttttgcagcatcatggtgggccatgtttggtgtagacactccaacgttacaaatgcttgctttgagattggtttcacagtgttgttcctccagtggctacgatagtataggtagcatggtgtaccatgttaaggcgagggcaatgataagagacttcaccattgtgttgtcgtctccttcgaatgaggccaccgtgacttgatagctcatgataaactggatcaaccttccgttgtactttggccaattcccgtccctatagttgcttggccatggcgttgcctgtagtctggcggagagtgggcatctgttatcagtgaaattgaaggcatggaaggtgttgctctgatgagtctatctaactttgtcaaaactgctcaatctcacatggccatgcgaggggtgcgtcggatcctactgggcctgcaacagcgagatttcctgctcaagggcttggaggtgctctttttcttgctagataaggagacgtattatggcctgtgccttactacgttgctgcttggccgcttgagcatctctctgcttctgaaggttggagttgcacatgcaaaggctcttgagtaagagttgctcttcggtgttgacaccaaggtccgggccgtcgtggaggtctgcatcattgtattccggaggcatttcaaatgggtgatgttggtggcctgctatggcattgaaacctaaggggccagaggcaggttcttcatcaaatccagacaaactttagcttggtagggttggcttttggggtttgggagggggtcccccaagttttctaaactggtggtgtggacctcgcactcttgttc

SEQ ID NO: 58554 - DNA, 4426 bp, Zea Mays
actgaatttgcttatttccggctcttgttgaaaccgccacccgattcctccgctcgccaaatcctcgccgtgccctcgtagcaattccttgcgtcggcgcatcatcgcggcctcctctccctctctctctctatctctctcaatctctccgttggcaaatcgttgaatcgacgtgcttggccccggccgctctgagcccgccgccagcctcctcgtctgaagaagaacgacagccgtcgggctccggtggtcccgccgaagaacggcaggtagccagccgcgctcatcacgccggcgactcgattggcattgtattggcctttccgtttgttgtcagatcgaaaagaagaggaaagaatcgggaagcccgcccccctggtggatatgcgaggccatgtttttcatgtcacacccccgaccgattcgcctcgatttcgttcttctgttcttctgcgccgcaatggctccttcgctcgttcatatctgttattctgttgtgaatactcggtttgagtcaatgatgcgatttctttcattcaaaatcttctgggtgctcctgtgttattctgatttattcgctctgtttcgacgccagttaatctatcgtgtcggctgttgacaatatctttggtttcttgtccgcgacagagttctcgaagcaaaacgacctgatgagattcctcaaggggagcaaggtggaggtattgcaggaggcagatgtgccgtttggttcttggaggcctggtgagatcgtctccggcaatggacacgcctactttgtgagatatgatgaaagtcccgttgactccagcgtggctgttgaaagggtgccaagaaggttgatgaggcctcgccctcctgcggatgatcctgtacgctggagtttgggtagtatcattgaggcctttgacagctactcgtggaaggttgccgaggtggtgagagtgcttggaaagaatcaatatctagtcaggctccttgggtcctcgctggagttgagtgcacatgcatcggttcttcgaatgaggaagctttggctagatgacatatggattgtgactcagaagtattctgcaagatgcttggatggtggtgcattccgaggtcaatcaaaagataaaaatttagaccataacttcagaatggacagtcgtcaacttgagaaccagaatgcctttgagggtgatacatctagaggcatcaagagaaaatcgtctgctatatcaacacatcctcaatgcagtgaaatcactaagagattgcggacaccaaatagagatggaagggccaaggttggaggcttgtaaagcatccttccataggttcttgtaaatggaggagtctgccacatgttttgcagtgcgataaatgtggcaacatttccaatgaacttccattggtcaagctgggtcaagactggttccagattaatactggttgctggataaaatggtcaaattagattggtttatcatccaaagacaaaaaggtgatctgcttgttgtgtgatttttcacagaacaagcatatttcttctatgatggcatgcacccgtttgactgtccagaagagcacttgagggaacatctgtatcagcaccggagtgtttcctctttccagcaccggagtgtttccaccatcgtcattagaggtaggaccctcccacaacctagaagcaagaccctcgcacgcccgatctgaggatgacttcgagggatatgacgattgacttctcgagtcagacgatgaacttacatttgatgcgcaacctgaaggcccggctaactggaactgggtggctgagctacaataggaggttcaaactgagctgcctgctgaactaagtatgattcaagacgaaaaccactctaagtatgacctctcggatgaggacgtctccgtggaagggacggacgcgtccgatgatgatattttggcagataatcaggacccggctgatgaggatattgaagatatcgagccgaaagaagatgagaaagattcagaggagctcattgttatcgatgatgagccatgggcgccagatccatttattcctgttgttcctaatccgaagactcgagcaccggagattcctgtaccagaagcccctgcgccagtagctcttgcttcagagggtcccccacaaggaaatacaatgcctgagctcgtcccgcaaccggattgggtaaggacaaaatctcacaatcatcaactcaggtgtggctgaagacaatattcgtatggagactactcaaatataccgctgccctgaacactgactgagcatgacgctgccttgattgaactcgaggaattaaagaagcagaatgcccaactgtgactcatctggagaatgaaggacaacctcaggctgccgtgaaacttagattttcctgacttgcagccgacttctatgtagacacaaaattgttgggattacatagtttggccttgcatcaaggaaaagttgcaggttatctgtacagtaatttgccagtcgtcttatgcatatgatgcatacctttttactgttctagtgttttgtaatccagatattgtagccggtgttcttggtgaaatatgcgccaggagagactgagacttattttgccaccttactttgtgcaaagccagctgcccttcaactttgctggacaggcaatcacatattttcagaagtgaagcggtaggccccggtagttctgatgagcaagcaagtgaaaagtttgtatgtggtgtatgacgatgtaccttggatctctttacttccaattgaacctgcacatgttcctggcttcgtgtcatcacaatgaccttgtattgtttcagtgttcacctacagttcatgtaccttaggttccttttctgtttttgccttacacgtaattggttgcagcagagcaccaaggatcggggatgtacaaatcaatatcagtttgcaactttgcatggaaggcatgcccttgcaaggcctcttggacagactccttcctcagtgctgaccgcatttgcagttgcagtgcgttagaggtggctgctgatgctctgggcactagagaaccaaaagcatagtagtaaaggctttgtgcacatatctagtagtaaaggcctcttggacagactccttcctcagtgctgaccccatccatttctacaaatcgaattctggagacaacgccttagtggaatctgcgagttcaaaaaaatacatggaggtgataaagaaaagaatgacggatcttacaaatcagattagactacgtaaatggtggtagcacggtttatttaaatgttcctatcatgaatcagtactaactacatgtcacacagatgctgctttgaaccctcggacacactatgcgtatggcactagtgtttcagttatgagtgatcttcggcaggcattcgaatatatgactgatgtggatgcagcagtccaagcactgcaggagttgagttgtacagaagaaagcaaggggagtttgacagacctttggctgaaaaaatggcgtacgatcacaacactttgcttggtaagtaattacccgttgtctttagtacattaaggcttttgttcgtcgtgtgaatgtgctactttttgcagcatcatggtgggccatgtttggtgtagacactccaacgttacaaatgcttgctttgagattggtttcacagtgttgttcctccagtggctacgatagtataggtagcatggtgtaccatgttaaggcgagggcaatgataagagacttcaccattgtgttgtcgtctccttcgaatgaggccaccgtgacttgatagctcatgataaactggatcaaccttccgttgtactttggccaattcccgtccctatagttgcttggccatggcgttgcctgtagtctggcggagagtgggcatctgttatcagtgaaattgaaggcatggaaggtgttgctctgatgagtctatctaactttgtcaaaactgctcaatctcacatggccatgcgaggggtgcgtcggatcctactgggcctgcaacagcgagatttcctgctcaagggcttggaggtgctctttttcttgctagataaggagacgtattatggcctgtgccttactacgttgctgcttggccgcttgagcatctctctgcttctgaaggttggagttgcacatgcaaaggctcttgagtaagagttgctcttcggtgttgacaccaaggtccgggccgtcgtggaggtctgcatcattgtattccggaggcatttcaaatgggtgatgttggtggcctgctatggcattgaaacctaaggggccagaggcaggttcttcatcaaatccagacaaactttagcttggtagggttggcttttggggtttgggagggggtcccccaagttttctaaactggtggtgtggacctcgcactcttgttc

SEQ ID NO: 58555 - DNA, 1762 bp, Zea Mays
actgacaaaaatctctatataagcacagtgtccggcatcttggccccttccccacccttcgccctttcaaggaggccggcctcgcctcacactcccgcccgcctccggcgattcatccacccaataaaggtttgggcgcgctcggtgggcggcgtactccagggtcatcgttagttggacgggctagggtgctttctcaccgggggaagggaagcgaatccaaacgatggagaagaagaaggtggcgatcccgctggtgtgccacggtcactcgcggccggtggtggatctcttctacagccccgtcacacccgatggttacttcctcatcagcgccagcaaggacacaaatccaatgcttcgtaatggtgagactggtgactggattgggacttttcaaggtcataaaggagctgtttggagctgttgccttgacaggaatgctctgagggctgcatctgcttctgctgacttctcggctaaagtatgggatgcacttactggtgatgaactacattcatttgaacataagcatatagttcgggcatgtgctttctctgaggacacccaccttttactcactggaggcatggaaaagactttgcgtgtgtatgatattaatcgtcctgatgcagctccaagagagcttgacaaatcacctggttctgtccgaactgctgcctggcttcatagtgaccaaactatattgagttcctgcactgacatgggtggagtaaggctatgggatgtgagaacaggtaaaattgtccaaactcttgaaaccaaggcttctattactagtgcagaagtaagccaggatggcaggttcatcactacagcagatggctcaagtgtaaaattttgggacgcgaatcacttcggccttgtgaaaagctatgatatgccgtgcaatgtggagtcagcttcacttgaacccaagtctgggagtaaatttgtagctggaggagaagatttgtgggttcatgtattcgatttcttcactggtgaagaaatagcttgtaacaaagggcatcatggaccggtccactgtgtccggtttgcacctggtggtgaatcatacgcatcgggttcagaagatggcaccattaggatctggcagcttagcccagttaatgctgatgacgacgaggcggccaatgcaaatggcaaggcaaatgctgcagtgaacgaggttacaaccaagctcgagggcggcttccacattcccaaggagggacaggctggggggtaggacctcatgtgctttgttgtggtgcttgtggttcttattgcgaggagattgcccatagggctgccacggtcattcagtttctccctgcagagccatcaacacctgtttgcgatccaagggtatcatggcttcaagagtcatcaccctggtaactggggaaaaaccatacccctcgtaagcatggtggtgggtttttggatggggccttcgctttgatagaacatagcaactgtagtgtcaaaaataaacaagagaatacaacttgggtaggtatcgtgtcttcggtcattaaagtgaagtattctgtatcgccgccagtaatttttgtggcttttgatgttggaacgccgattttcaaatcaaagctgacgaccacttcttgatcatgaggcaatatagatagcgtcatgcccatatcaaatgacagatttctctgctcactggacatgcttttttggtggcatccgcggacacgatacgtgaaatttagttttatgttattgtacacct

SEQ ID NO: 58556 - DNA, 1460 bp, Zea Mays
agaaaacagttggcacttggcaggatgtaccttaatggatagacacaaatccaatgcttcgtaatggtgagactggtgactggattgggacttttcaaggtcataaaggagctgtttggagctgttgccttgacaggaatgctctgagggctgcatctgcttctgctgacttctcggctaaagtatgggatgcacttactggtgatgaactacattcatttgaacataagcatatagttcgggcatgtgctttctctgaggacacccaccttttactcactggaggcatggaaaagactttgcgtgtgtatgatattaatcgtcctgatgcagctccaagagagcttgacaaatcacctggttctgtccgaactgctgcctggcttcatagtgaccaaactatattgagttcctgcactgacatgggtggagtaaggctatgggatgtgagaacaggtaaaattgtccaaactcttgaaaccaaggcttctattactagtgcagaagtaagccaggatggcaggttcatcactacagcagatggctcaagtgtaaaattttgggacgcgaatcacttcggccttgtgaaaagctatgatatgccgtgcaatgtggagtcagcttcacttgaacccaagtctgggagtaaatttgtagctggaggagaagatttgtgggttcatgtattcgatttcttcactggtgaagaaatagcttgtaacaaagggcatcatggaccggtccactgtgtccggtttgcacctggtggtgaatcatacgcatcgggttcagaagatggcaccattaggatctggcagcttagcccagttaatgctgatgacgacgaggcggccaatgcaaatggcaaggcaaatgctgcagtgaacgaggttacaaccaagctcgagggcggcttccacattcccaaggagggacaggctggggggtaggacctcatgtgctttgttgtggtgcttgtggttcttattgcgaggagattgcccatagggctgccacggtcattcagtttctccctgcagagccatcaacacctgtttgcgatccaagggtatcatggcttcaagagtcatcaccctggtaactggggaaaaaccatacccctcgtaagcatggtggtgggtttttggatggggccttcgctttgatagaacatagcaactgtagtgtcaaaaataaacaagagaatacaacttgggtaggtatcgtgtcttcggtcattaaagtgaagtattctgtatcgccgccagtaatttttgtggcttttgatgttggaacgccgattttcaaatcaaagctgacgaccacttcttgatcatgaggcaatatagatagcgtcatgcccatatcaaatgacagatttctctgctcactggacatgcttttttggtggcatccgcggacacgatacgtgaaatttagttttatgttattgtacacct

SEQ ID NO: 58557 - DNA, 1319 bp, Zea Mays
ttccaatcagcgttgctgctcatttaattttcccttttacaaaattggatgcatttactggtgatgaactacattcatttgaacataagcatatagttcgggcatgtgctttctctgaggacacccaccttttactcactggaggcatggaaaagactttgcgtgtgtatgatattaatcgtcctgatgcagctccaagagagcttgacaaatcacctggttctgtccgaactgctgcctggcttcatagtgaccaaactatattgagttcctgcactgacatgggtggagtaaggctatgggatgtgagaacaggtaaaattgtccaaactcttgaaaccaaggcttctattactagtgcagaagtaagccaggatggcaggttcatcactacagcagatggctcaagtgtaaaattttgggacgcgaatcacttcggccttgtgaaaagctatgatatgccgtgcaatgtggagtcagcttcacttgaacccaagtctgggagtaaatttgtagctggaggagaagatttgtgggttcatgtattcgatttcttcactggtgaagaaatagcttgtaacaaagggcatcatggaccggtccactgtgtccggtttgcacctggtggtgaatcatacgcatcgggttcagaagatggcaccattaggatctggcagcttagcccagttaatgctgatgacgacgaggcggccaatgcaaatggcaaggcaaatgctgcagtgaacgaggttacaaccaagctcgagggcggcttccacattcccaaggagggacaggctggggggtaggacctcatgtgctttgttgtggtgcttgtggttcttattgcgaggagattgcccatagggctgccacggtcattcagtttctccctgcagagccatcaacacctgtttgcgatccaagggtatcatggcttcaagagtcatcaccctggtaactggggaaaaaccatacccctcgtaagcatggtggtgggtttttggatggggccttcgctttgatagaacatagcaactgtagtgtcaaaaataaacaagagaatacaacttgggtaggtatcgtgtcttcggtcattaaagtgaagtattctgtatcgccgccagtaatttttgtggcttttgatgttggaacgccgattttcaaatcaaagctgacgaccacttcttgatcatgaggcaatatagatagcgtcatgcccatatcaaatgacagatttctctgctcactggacatgcttttttggtggcatccgcggacacgatacgtgaaatttagttttatgttattgtacacct

SEQ ID NO: 58558 - DNA, 1398 bp, Zea Mays
atttctttgtttgcttcaatgcttcctgtgacatgaatgtggacgtgctaaagttcatatactgccactctgatcggccagcaactttaaactgggcatatttatcaatgtgtttgtaaagtatgggatgcacttactggtgatgaactacattcatttgaacataagcatatagttcgggcatgtgctttctctgaggacacccaccttttactcactggaggcatggaaaagactttgcgtgtgtatgatattaatcgtcctgatgcagctccaagagagcttgacaaatcacctggttctgtccgaactgctgcctggcttcatagtgaccaaactatattgagttcctgcactgacatgggtggagtaaggctatgggatgtgagaacaggtaaaattgtccaaactcttgaaaccaaggcttctattactagtgcagaagtaagccaggatggcaggttcatcactacagcagatggctcaagtgtaaaattttgggacgcgaatcacttcggccttgtgaaaagctatgatatgccgtgcaatgtggagtcagcttcacttgaacccaagtctgggagtaaatttgtagctggaggagaagatttgtgggttcatgtattcgatttcttcactggtgaagaaatagcttgtaacaaagggcatcatggaccggtccactgtgtccggtttgcacctggtggtgaatcatacgcatcgggttcagaagatggcaccattaggatctggcagcttagcccagttaatgctgatgacgacgaggcggccaatgcaaatggcaaggcaaatgctgcagtgaacgaggttacaaccaagctcgagggcggcttccacattcccaaggagggacaggctggggggtaggacctcatgtgctttgttgtggtgcttgtggttcttattgcgaggagattgcccatagggctgccacggtcattcagtttctccctgcagagccatcaacacctgtttgcgatccaagggtatcatggcttcaagagtcatcaccctggtaactggggaaaaaccatacccctcgtaagcatggtggtgggtttttggatggggccttcgctttgatagaacatagcaactgtagtgtcaaaaataaacaagagaatacaacttgggtaggtatcgtgtcttcggtcattaaagtgaagtattctgtatcgccgccagtaatttttgtggcttttgatgttggaacgccgattttcaaatcaaagctgacgaccacttcttgatcatgaggcaatatagatagcgtcatgcccatatcaaatgacagatttctctgctcactggacatgcttttttggtggcatccgcggacacgatacgtgaaatttagttttatgttattgtacacct

SEQ ID NO: 58559 - DNA, 1347 bp, Zea Mays
gctaaagttcatatactgccactctgatcggccagcaactttaaactgggcatatttatcaatgtgtttgtatgggatgcacttactggtgatgaactacattcatttgaacataagcatatagttcgggcatgtgctttctctgaggacacccaccttttactcactggaggcatggaaaagactttgcgtgtgtatgatattaatcgtcctgatgcagctccaagagagcttgacaaatcacctggttctgtccgaactgctgcctggcttcatagtgaccaaactatattgagttcctgcactgacatgggtggagtaaggctatgggatgtgagaacaggtaaaattgtccaaactcttgaaaccaaggcttctattactagtgcagaagtaagccaggatggcaggttcatcactacagcagatggctcaagtgtaaaattttgggacgcgaatcacttcggccttgtgaaaagctatgatatgccgtgcaatgtggagtcagcttcacttgaacccaagtctgggagtaaatttgtagctggaggagaagatttgtgggttcatgtattcgatttcttcactggtgaagaaatagcttgtaacaaagggcatcatggaccggtccactgtgtccggtttgcacctggtggtgaatcatacgcatcgggttcagaagatggcaccattaggatctggcagcttagcccagttaatgctgatgacgacgaggcggccaatgcaaatggcaaggcaaatgctgcagtgaacgaggttacaaccaagctcgagggcggcttccacattcccaaggagggacaggctggggggtaggacctcatgtgctttgttgtggtgcttgtggttcttattgcgaggagattgcccatagggctgccacggtcattcagtttctccctgcagagccatcaacacctgtttgcgatccaagggtatcatggcttcaagagtcatcaccctggtaactggggaaaaaccatacccctcgtaagcatggtggtgggtttttggatggggccttcgctttgatagaacatagcaactgtagtgtcaaaaataaacaagagaatacaacttgggtaggtatcgtgtcttcggtcattaaagtgaagtattctgtatcgccgccagtaatttttgtggcttttgatgttggaacgccgattttcaaatcaaagctgacgaccacttcttgatcatgaggcaatatagatagcgtcatgcccatatcaaatgacagatttctctgctcactggacatgcttttttggtggcatccgcggacacgatacgtgaaatttagttttatgttattgtacacct

SEQ ID NO: 58560 - DNA, 1348 bp, Zea Mays
ggtgcttaggtggtcgcttaggcgtctggctggtgactcgcctcgctgtagcatcgtgataaccattaaagtatgggatgcacttactggtgatgaactacattcatttgaacataagcatatagttcgggcatgtgctttctctgaggacacccaccttttactcactggaggcatggaaaagactttgcgtgtgtatgatattaatcgtcctgatgcagctccaagagagcttgacaaatcacctggttctgtccgaactgctgcctggcttcatagtgaccaaactatattgagttcctgcactgacatgggtggagtaaggctatgggatgtgagaacaggtaaaattgtccaaactcttgaaaccaaggcttctattactagtgcagaagtaagccaggatggcaggttcatcactacagcagatggctcaagtgtaaaattttgggacgcgaatcacttcggccttgtgaaaagctatgatatgccgtgcaatgtggagtcagcttcacttgaacccaagtctgggagtaaatttgtagctggaggagaagatttgtgggttcatgtattcgatttcttcactggtgaagaaatagcttgtaacaaagggcatcatggaccggtccactgtgtccggtttgcacctggtggtgaatcatacgcatcgggttcagaagatggcaccattaggatctggcagcttagcccagttaatgctgatgacgacgaggcggccaatgcaaatggcaaggcaaatgctgcagtgaacgaggttacaaccaagctcgagggcggcttccacattcccaaggagggacaggctggggggtaggacctcatgtgctttgttgtggtgcttgtggttcttattgcgaggagattgcccatagggctgccacggtcattcagtttctccctgcagagccatcaacacctgtttgcgatccaagggtatcatggcttcaagagtcatcaccctggtaactggggaaaaaccatacccctcgtaagcatggtggtgggtttttggatggggccttcgctttgatagaacatagcaactgtagtgtcaaaaataaacaagagaatacaacttgggtaggtatcgtgtcttcggtcattaaagtgaagtattctgtatcgccgccagtaatttttgtggcttttgatgttggaacgccgattttcaaatcaaagctgacgaccacttcttgatcatgaggcaatatagatagcgtcatgcccatatcaaatgacagatttctctgctcactggacatgcttttttggtggcatccgcggacacgatacgtgaaatttagttttatgttattgtacacct

SEQ ID NO: 58561 - DNA, 1749 bp, Zea Mays
tcggcatccatcacagatatcgctcggaggcccgcgggtacgcagaccaccacggcgccgttacttatacgctcccctttcgcccacgatgaaataccgagacgaaatcctcaagccccaaccccaaccccaaacccaaacctctctcggaagttcctctcgcgtggccggtttcctcaacctccgtgtcggctcaatagtttcgcgagcgggcggggcgggggtctgagctcgatggccacttctggcgagcaatcggctggcggtgggtaaagccatcttcagatgtcagcaagagcatgtgtttagacctttctgtgaaggataagtctgtcaagcctccacggaggcactcaatacaaactaagccaggagctagcccaaggccaataccttctggaactgtgactccggtgtctggggttcggtcaaagagatcggacggccaggggaggtttgatactccgacatcagaagtgtccatgtccatgtcaaggcgcaagttcagcacgctttcttcaatctcgtactggatgacacagatcaggcttgcagaggctgcttccaaacactcagtttctctgggcttctttaagcttgctcttgaatcagaatgtgagcctttggaccggatgagggaagaactcaagtcctatgtagtccgccattgcttagcgacagaattggaggacccagtcaaggacattcttcaggtttatgatattgtggacgattttgagaagctgaagatctctgcagagccctcagagcaacaaaaaaagtctgaaaaggctgctcgtaatgtctccaatgtgtcagccaattgtaatctgaagccaaggtcactaaactctggtgctactgaaagtaaggaagctgggaagaaagagggcattcagaaagcgaaacctgatgcaagggtcagaggctccaataacaggaatccagtaaaatgcaccaccgcaaaggaagtagttgctaagaacactggtaagaaaaccaagaaagaggccaagggtcaggaggaagttagcaatggagatagcgatgcatcctcagcccttccagatcaggaatctgttgatgttgtgaaggagatcacccatgaagataaagagaacatggacgagaatgaaatggctatggatgttgccatagcgcaagaattctagaacagccggaccagcttcagattcaatcgttttttattgctgaagatgaagtattagtgtgtggttgcttattttggttttcatcattgttaatatgatagtagagcttgtctgtgtgattgctgaaccatatacgctcctgaagagtgtgtcataagttgatgattgcctgtattcctttttcaagtttgcagctttgcatgtggtaatcgtgcatctgaatatagtcggatttatcttttctcgcgattcgaaccgacagaagatcctccctggtatttgtgttgtgttaatcgcgtcaagagttgttgtacgagatgttgagggatgccaggctggtgagctcaccgaggatcgagatgctgccgcagaggccattgctcgcgaggctgagtgactgcagctgcgtcagaccggacatctcgtcaggcagctcgccgacggacctgttcgagctcaggtccaggctgatgcccaggttcgacagcgcgccgatctccggcggtatggggccggagaagctgttgttgctcaggtccagcattgtcagcttcttcaggttccgaatcgacttggg

SEQ ID NO: 58562 - DNA, 1591 bp, Zea Mays
atcaatatttcaagcagtctatgggaagacgatgggtcagccttcgagacagtagatgtgcagactacgactatctcttcaaaactaagcatctgattgtttggtgttatggtaaagccatcttcagatgtcagcaagagcatgtgtttagacctttctgtgaaggataagtctgtcaagcctccacggaggcactcaatacaaactaagccaggagctagcccaaggccaataccttctggaactgtgactccggtgtctggggttcggtcaaagagatcggacggccaggggaggtttgatactccgacatcagaagtgtccatgtccatgtcaaggcgcaagttcagcacgctttcttcaatctcgtactggatgacacagatcaggcttgcagaggctgcttccaaacactcagtttctctgggcttctttaagcttgctcttgaatcagaatgtgagcctttggaccggatgagggaagaactcaagtcctatgtagtccgccattgcttagcgacagaattggaggacccagtcaaggacattcttcaggtttatgatattgtggacgattttgagaagctgaagatctctgcagagccctcagagcaacaaaaaaagtctgaaaaggctgctcgtaatgtctccaatgtgtcagccaattgtaatctgaagccaaggtcactaaactctggtgctactgaaagtaaggaagctgggaagaaagagggcattcagaaagcgaaacctgatgcaagggtcagaggctccaataacaggaatccagtaaaatgcaccaccgcaaaggaagtagttgctaagaacactggtaagaaaaccaagaaagaggccaagggtcaggaggaagttagcaatggagatagcgatgcatcctcagcccttccagatcaggaatctgttgatgttgtgaaggagatcacccatgaagataaagagaacatggacgagaatgaaatggctatggatgttgccatagcgcaagaattctagaacagccggaccagcttcagattcaatcgttttttattgctgaagatgaagtattagtgtgtggttgcttattttggttttcatcattgttaatatgatagtagagcttgtctgtgtgattgctgaaccatatacgctcctgaagagtgtgtcataagttgatgattgcctgtattcctttttcaagtttgcagctttgcatgtggtaatcgtgcatctgaatatagtcggatttatcttttctcgcgattcgaaccgacagaagatcctccctggtatttgtgttgtgttaatcgcgtcaagagttgttgtacgagatgttgagggatgccaggctggtgagctcaccgaggatcgagatgctgccgcagaggccattgctcgcgaggctgagtgactgcagctgcgtcagaccggacatctcgtcaggcagctcgccgacggacctgttcgagctcaggtccaggctgatgcccaggttcgacagcgcgccgatctccggcggtatggggccggagaagctgttgttgctcaggtccagcattgtcagcttcttcaggttccgaatcgacttggg

SEQ ID NO: 58563 - DNA, 1556 bp, Zea Mays
gatgggtcagccttcgagacagtagatgtgcagactacgactatctcttcaaaactaagcatctgattgtttggtgttatggtaaagccatcttcagatgtcagcaagagcatgtgtttagacctttctgtgaaggataagtctgtcaagcctccacggaggcactcaatacaaactaagccaggagctagcccaaggccaataccttctggaactgtgactccggtgtctggggttcggtcaaagagatcggacggccaggggaggtttgatactccgacatcagaagtgtccatgtccatgtcaaggcgcaagttcagcacgctttcttcaatctcgtactggatgacacagatcaggcttgcagaggctgcttccaaacactcagtttctctgggcttctttaagcttgctcttgaatcagaatcctttggaccggatgagggaagaactcaagtcctatgtagtccgccattgcttagcgacagaattggaggacccagtcaaggacattcttcaggtttatgatattgtggacgattttgagaagctgaagatctctgcagagccctcagagcaacaaaaaaagtctgaaaaggctgctcgtaatgtctccaatgtgtcagccaattgtaatctgaagccaaggtcactaaactctggtgctactgaaagtaaggaagctgggaagaaagagggcattcagaaagcgaaacctgatgcaagggtcagaggctccaataacaggaatccagtaaaatgcaccaccgcaaaggaagtagttgctaagaacactggtaagaaaaccaagaaagaggccaagggtcaggaggaagttagcaatggagatagcgatgcatcctcagcccttccagatcaggaatctgttgatgttgtgaaggagatcacccatgaagataaagagaacatggacgagaatgaaatggctatggatgttgccatagcgcaagaattctagaacagccggaccagcttcagattcaatcgttttttattgctgaagatgaagtattagtgtgtggttgcttattttggttttcatcattgttaatatgatagtagagcttgtctgtgtgattgctgaaccatatacgctcctgaagagtgtgtcataagttgatgattgcctgtattcctttttcaagtttgcagctttgcatgtggtaatcgtgcatctgaatatagtcggatttatcttttctcgcgattcgaaccgacagaagatcctccctggtatttgtgttgtgttaatcgcgtcaagagttgttgtacgagatgttgagggatgccaggctggtgagctcaccgaggatcgagatgctgccgcagaggccattgctcgcgaggctgagtgactgcagctgcgtcagaccggacatctcgtcaggcagctcgccgacggacctgttcgagctcaggtccaggctgatgcccaggttcgacagcgcgccgatctccggcggtatggggccggagaagctgttgttgctcaggtccagcattgtcagcttcttcaggttccgaatcgacttggg

SEQ ID NO: 58564 - DNA, 1957 bp, Zea Mays
atcacaggcagcacagcttgacagcgaggttggtggcggccggccgtgggtctatttatatagagaagaaatcccaggagaccgtcgtccgccgcctcctctctccgcacaggctcaccaaacgacgaacactctccctcgacccgtgaccgtgagcaagcgggtggcgacggcgcgcggccggccatggtgagcgagagcaaccgcggcggtgcggaccggacgacggcggcgggggaggagcgcgggcagctgctgttcgacgtgccggagatcaggttcaccaagctcttcatcaacggatccttcgtcgacgccgtctcaggcaggggtcccagacggcgtgatcaacgtcgtgccaggcttcggcccgacggcaggagccgcgctggcgtctcacatggacgttgacatggtgagtttcaccggatccacggaggtcgggcgcctcataatgaaggcctccgcggagagcaacctgaagcccgtctacctggagctgggcggcaagtccccgctcatcgtcttcgacgacgccgacctcgacatggccgtggagctcgccgtcggcgccagcttcttcaacaagggagaggcctgcgtcgccgcgagccgcgtctacgtgcaggaacgcgtctacgacaggttcgaggagaggttggcggagaggatgaggagctgggtcgtgggcgacccgttcagcgaccctagcgccgaccagggcccgcaggtggacaaggctcagtatgagagggttctgagctacattgaccatggcaagcgagaaggggccactcttctgactggaggaaggccatgcggtccggaagggaaaggctactacattgagcccacagttttcaccaacgtcaaggaggacatgatcatagcgaaggaggagatcttcggacccgtcatgtgcctgatgaagttcaagacggtggaggaggcgatcgcgagggcgaacgacacgcggtacgggctgggggcgggggtggtgacgcgggacctggacgtggcgaaccgggtggtgaggtcggtgcgcgccggggtggtgtgggtgaactgctacttcgccatgggcagcgactgccccttcggcggccgcaagatgagcggcttcggcaaggacgagggcatgcacgcgctcgacaagtacctggccgtcaagtccgtcgtcaccccgctccgcgcctcgccctggatctgattctctttaatttctggtgtcagtcacccacccacaacacatatacagcagtggtcaaaagatatttatttattgataataaagtagctagctatattgtgcggaaatccttgtagctagtcagctgtatcaatcagctggacgacgggacggccagcgcggtcaagcagctagcgcatgcacctgcaggctgcacccactatctccctgtcggtgtcgtacgtcgccgatcaagtcttccgtgagtcgtgcgtgcgtgcgttagtggagtgtgctcatcatgcatctttgcgtctagcttctcaaggaaatcaacccaaccccaacgagctggccgcactgcagtgcagagccagacggacactaccagcggcagcggcgccacttcagccggccgggcgcccgccgcctgctcaacaatatattcacccaccaccgtacctacacagccaactagctagcagtagcagctgctatttgcagggtcgtcgtcgatctccgccgcccatggacgacatggagatggagggattgtcgttgcccgtctcgatcaggtgcctcgcgcttctcatcaccctcctcccggcgctcttcttcgtcctcccgaggatgccgcagcccgcgcacgaccgtcgtcgcgaggcggctgcgagggcgacgaccaggatctactggcaggccgtcgaccagatggtggcgtgcgcgctggtgctcaccgccctcctcgccacctacatataccactag

SEQ ID NO: 58565 - DNA, 1430 bp, Zea Mays
gttactgcttctataacacgcgatcccgcttccactcggcgaccaccgggcaccgccgccggtacaccgcgcatcgaatcgccaccagtgccgattctgctgacccctcgccatcgctggcgggcgaatcgacgccatggccgccgcgcgccggggccgcgccgacggtgccaacggcgtcgtccgtccccgcccccgcgaccgtgtcgtcggcgtcagcggaagcatggcggggcgcgtggcggtcctcgctttctgtgtcgccgggatctggtccgcctacatctaccagggcgtcctccaggagactcttttgctgggtttgtcctcagatccacgaagcggttcaggccggaggcgcggcggttcgaggcttcgagcaccttgcgttcctcaacttcgcgcagaatgtcgtatgcttcgtctggtccttcctaatgattaagttgtggtcgagcgggagcgggagtagctccgacggccgtgcgccgctatcgaagtactggggcgtcagcgtaaccaataccatcgggccgaccatggggatcgaggcgctcaagtacattaactatccggctcagtaatgctgatgggaaccctgctctatggtgtgaagtacacacttccagagtatttttgtacctttcttgttgctggcggtgtgtcctcctttgcgttgttgaagacaagctccaagagaccaagacagttaagaagcttgccaaccctaatgcacctcttggctatacattgtgcttcctcaacttagcttttgatgggtatactaactcgacccaagatttaataaagtcaaggtacccaaagactaatccatgggatataatgcttggcatgaacctctgggggaccatatataatgctgtagttatgtttgttgcgccattactattcagtaactggccatatgcagatggtttcgaggcattgagattttgccaggagaacccagaggtggcctgggacatttttctgttctgcctatgtggcgccgtgggtcagaattatatcttcttaaccatcagcaggttcggcgctcttactaacacaacgatcactaccactgtatttttgttctactgtcccgaaagtaacctgttatagaattagaatcaaggtttttattcacgtatacctcttatattgtgtttggaagagcagtgatgtcttggacattttggagacgacttaaattttactaagccacaggccacaggttatttggatgagtaaaattggtctaggaatgtttatagtaaggatttaggttatgttcccaatcgtaatgaatatttgttgtcaggagatgttatgagaccattattcatgtagatatacgaatacaacgggtgctcaatgctccattacgaaatgtaaatgacagactgatactggtaaattccatattttcg

SEQ ID NO: 58566 - DNA, 1441 bp, Zea Mays
gttactgcttctataacacgcgatcccgcttccactcggcgaccaccgggcaccgccgccggtacaccgcgcatcgaatcgccaccagtgccgattctgctgacccctcgccatcgctggcgggcgaatcgacgccatggccgccgcgcgccggggccgcgccgacggtgccaacggcgtcgtccgtccccgcccccgcgaccgtgtcgtcggcgtcagcggaagcatggcggggcgcgtggcggtcctcgctttctgtgtcgccgggatctggtccgcctacatctaccagggcgtcctccaggagactctatccacgaagcggttcaggccggaggcgcggcggttcgaggcttcgagcaccttgcgttcctcaacttcgcgcagaatgtcgtatgcttcgtctggtccttcctaatgattaagttgtggtcgagcgggagcgggagtagctccgacggccgtgcgccgctatcgaagtactggggcgtcagcgtaaccaataccatcgggccgaccatggggatcgaggcgctcaagtacattaactatccggctcaggtgttggcaaaatcttctaagatgatccccgtaatgctgatgggaaccctgctctatggtgtgaagtacacacttccagagtatttttgtacctttcttgttgctggcggtgtgtcctcctttgcgttgttgaagacaagctccaagagaccaagacagttaagaagcttgccaaccctaatgcacctcttggctatacattgtgcttcctcaacttagcttttgatgggtatactaactcgacccaagatttaataaagtcaaggtacccaaagactaatccatgggatataatgcttggcatgaacctctgggggaccatatataatgctgtagttatgtttgttgcgccattactattcagtaactggccatatgcagatggtttcgaggcattgagattttgccaggagaacccagaggtggcctgggacatttttctgttctgcctatgtggcgccgtgggtcagaattatatcttcttaaccatcagcaggttcggcgctcttactaacacaacgatcactaccactgtatttttgttctactgtcccgaaagtaacctgttatagaattagaatcaaggtttttattcacgtatacctcttatattgtgtttggaagagcagtgatgtcttggacattttggagacgacttaaattttactaagccacaggccacaggttatttggatgagtaaaattggtctaggaatgtttatagtaaggatttaggttatgttcccaatcgtaatgaatatttgttgtcaggagatgttatgagaccattattcatgtagatatacgaatacaacgggtgctcaatgctccattacgaaatgtaaatgacagactgatactggtaaattccatattttcg

SEQ ID NO: 58567 - DNA, 1097 bp, Zea Mays
gttactgcttctataacacgcgatcccgcttccactcggcgaccaccgggcaccgccgccggtacaccgcgcatcgaatcgccaccagtgccgattctgctgacccctcgccatcgctggcgggcgaatcgacgccatggccgccgcgcgccggggccgcgccgacggtgccaacggcgtcgtccgtccccgcccccgcgaccgtgtcgtcggcgtcagcggaagcatggcggggcgcgtggcggtcctcgctttctgtgtcgccgggatctggtccgcctacatctaccagggcgtcctccaggagactctatccacgaagcggttcaggccggaggcgcggcggttcgaggcttcgagcaccttgcgttcctcaacttcgcgcagaatgtcgtatgcttcgtctggtccttcctaatgattaagttgtggtcgagcgggagcgggagtagctccgacggccgtgcgccgctatcgaagtactggggcgtcagcgtaaccaataccatcgggccgaccatggggatcgaggcgctcaagtacattaactatccggctcaggtgttggcaaaatcttctaagatgatccccgtaatgctgatgggaaccctgctctatggtgtgaagtacacacttccagagtatttttgtacctttcttgttgctggcggtgtgtcctcctttgcgttgttgaagacaagctccaagagaccaagacagttaagaagcttgccaaccctaatgcacctcttggctatacattgtgcttcctcaacttagcttttgatgggtatactaactcgacccaagatttaataaagtcaaggtacccaaagactaatccatgggatataatgcttggcatgaacctctgggggaccatatataatgctgtagttatgtttgttgcgccattactattcagtaactggccatatgcagatggtttcgaggcattgagattttgccaggagaacccagaggtggcctgggacatttttctgttctgcctatgtggcgccgtgggtcagaattatatcttcttaaccatcagcagtgtgttgtacaggaggaacggcttcaacttgagaggcaac

SEQ ID NO: 58568 - DNA, 2018 bp, Zea Mays
gttactgcttctataacacgcgatcccgcttccactcggcgaccaccgggcaccgccgccggtacaccgcgcatcgaatcgccaccagtgccgattctgctgacccctcgccatcgctggcgggcgaatcgacgccatggccgccgcgcgccggggccgcgccgacggtgccaacggcgtcgtccgtccccgcccccgcgaccgtgtcgtcggcgtcagcggaagcatggcggggcgcgtggcggtcctcgctttctgtgtcgccgggatctggtccgcctacatctaccagggcgtcctccaggagactcttttgctgggtttgtcctcagatccacgaagcggttcaggccggaggcgcggcggttcgaggcttcgagcaccttgcgttcctcaacttcgcgcagaatgtcgtatgcttcgtctggtccttcctaatgattaagttgtggtcgagcgggagcgggagtagctccgacggccgtgcgccgctatcgaagtactggggcgtcagcgtaaccaataccatcgggccgaccatggggatcgaggcgctcaagtacattaactatccggctcaggtttggttccgcctgctattgccgtctcaccttggttgttatatgcactgtcccggacattgtgtcatgttaatgttaggttcctgtcgcgggcacatgggtaatattgtcactgacgcttatggattgagatgttccgatagagttaattgactatatagggagctctttggaagtgcttcctcaagtgaacatttaggaagaacattgcatagattggattgtatgcgatatggcgactggcgagcgtgtgcggtatcgaccatcggcaatccatctctagagagcattgatccaagcatcgttcttgctcaacggatttgtttttttctcttgacaagctcgaagatatgtggcgcgaggtttctttacgcaatcccgactaatttctgttggtgtgaacaggtgttggcaaaatcttctaagatgatcccttaatgctgatgggaacccttctctatagtgtgaagtacacacttccagagtatttttgtacctttcttgttgctggcggtgtgtcctcctttgcgttgttgaagacaagctccaagacagttaagaagcttgtcaaccctaatgcacctcttggctatacattgtgcttcctcaacttagcttttgatgggtatactaactcgacccaagatataataaagtcaaggtacccaaacacgaatccatgggatataatgcttggcatgaacctctgggggaccatatataatgctgtagttatgtttgttgcgccattactattcagtaactggccatatgcagatggtttcgaggcattgagattttgccaggagaacccagaggtggcctgggacatttttctgttctgcctatgtggcgccgtgcgtcagaattatatcttcttaaccatcagcaggttcggcgctcttactaacacaacgatcactaccacccgtaaattcatgagcatcgtggtttcatctgtcatcagtggcaatccattatcttcaaagcaacggggtagtgttacgatggtcttcttaggcctctctgtccaaatatatctcaaatggaagagagagaagggcagacaccccagtgagtaagctcgattgttgactcttgtacctgttccgatttgtaacttcaattggacagatctgttgtgaggttgaccaggataatgttaatgtagtctgctgaaattatgagctatgcctagagcgatacgtaatgtgaggctgtgagagccttattcatgtagatatgtaaattggtctaggaatgtttatagtaaggatttaggttatgttcccaatcgtaatgaatatttgttgtcaggagatgttatgagagccttattcatgtagatatgcgaatacaatgggtgctcaatgctccattacgaaatgtaaatgacagactgatactggtaaattccatattttcgttgcacgtcca

SEQ ID NO: 58569 - DNA, 1622 bp, Zea Mays
gttactgcttctataacacgcgatcccgcttccactcggcgaccaccgggcaccgccgccggtacaccgcgcatcgaatcgccaccagtgccgattctgctgacccctcgccatcgctggcgggcgaatcgacgccatggccgccgcgcgccggggccgcgccgacggtgccaacggcgtcgtccgtccccgcccccgcgaccgtgtcgtcggcgtcagcggaagcatggcggggcgcgtggcggtcctcgctttctgtgtcgccgggatctggtccgcctacatctaccagggcgtcctccaggagactcttttgctgggtttgtcctcagatccacgaagcggttcaggccggaggcgcggcggttcgaggcttcgagcaccttgcgttcctcaacttcgcgcagaatgtcgtatgcttcgtctggtccttcctaatgattaagttgtggtcgagcgggagcgggagtagctccgacggccgtgcgccgctatcgaagtactggggcgtcagcgtaaccaataccatcgggccgaccatggggatcgaggcgctcaagtacattaactatccggctcaggtgttggcaaaatcttctaagatgatccccgtaatgctgatgggaaccctgctctatggtgtgaagtacacacttccagagtatttttgtacctttcttgttgctggcggtgtgtcctcctttgcgttgttgaagacaagctccaagagaccaagacagttaagaagcttgccaaccctaatgcacctcttggctatacattgtgcttcctcaacttagcttttgatgggtatactaactcgacccaagatataataaagtcaaggtacccaaacacgaatccatgggatataatgcttggcatgaacctctgggggaccatatataatgctgtagttatgtttgttgcgccattactattcagtaactggccatatgcagatggtttcgaggcattgagattttgccaggagaacccagaggtggcctgggacatttttctgttctgcctatgtggcgccgtgcgtcagaattatatcttcttaaccatcagcaggttcggcgctcttactaacacaacgatcactaccacccgtaaattcatgagcatcgtggtttcatctgtcatcagtggcaatccattatcttcaaagcaacggggtagtgttacgatggtcttcttaggcctctctgtccaaatatatctcaaatggaagagagagaagggcagacaccccagtgagtaagctcgattgttgactcttgtacctgttccgatttgtaacttcaattggacagatctgttgtgaggttgaccaggataatgttaatgtagtctgctgaaattatgagctatgcctagagcgatacgtaatgtgaggctgtgagagccttattcatgtagatatgtaaattggtctaggaatgtttatagtaaggatttaggttatgttcccaatcgtaatgaatatttgttgtcaggagatgttatgagagccttattcatgtagatatgcgaatacaatgggtgctcaatgctccattacgaaatgtaaatgacagactgatactggtaaattccatattttcgttgcacgtcca

SEQ ID NO: 58570 - DNA, 1937 bp, Zea Mays
gttactgcttctataacacgcgatcccgcttccactcggcgaccaccgggcaccgccgccggtacaccgcgcatcgaatcgccaccagtgccgattctgctgacccctcgccatcgctggcgggcgaatcgacgccatggccgccgcgcgccggggccgcgccgacggtgccaacggcgtcgtccgtccccgcccccgcgaccgtgtcgtcggcgtcagcggaagcatggcggggcgcgtggcggtcctcgctttctgtgtcgccgggatctggtccgcctacatctaccagggcgtcctccaggagactctatccacgaagcggttcaggccggaggcgcggcggttcgaggcttcgagcaccttgcgttcctcaacttcgcgcagaatgtcgtatgcttcgtctggtccttcctaatgattaagttgtggtcgagcgggagcgggagtagctccgacggccgtgcgccgctatcgaagtactggggcgtcagcgtaaccaataccatcgggccgaccatggggatcgaggcgctcaagtacattaactatccggctcagggagctctttggaagtgcttcctcaagtgaacatttaggaagaacattgcattgattggattgtatgtgatatggcgactggcgatcgtgtgcggtatcgaccatcggcaatccatctctaggtgattgtcttgtatttcagaatgtaaccttacatcttgtaaacgaatccataaagcaactaattcttagagttgggtcgtggtagctatcttattgcagagagcattgatccaagcatcgttcttgctcaacggatttgtttttttctcttgacaagctcgaagatatgtggcgcgaggtttctttacgcaatcccgactaatttctgttggtgtgaacaggtgttggcaaaatcttctaagatgatcccttaatgctgatgggaacccttctctatagtgtgaagtacacacttccagagtatttttgtacctttcttgttgctggcggtgtgtcctcctttgcgttgttgaagacaagctccaagacagttaagaagcttgtcaaccctaatgcacctcttggctatacattgtgcttcctcaacttagcttttgatgggtatactaactcgacccaagatataataaagtcaaggtacccaaacacgaatccatgggatataatgcttggcatgaacctctgggggaccatatataatgctgtagttatgtttgttgcgccattactattcagtaactggccatatgcagatggtttcgaggcattgagattttgccaggagaacccagaggtggcctgggacatttttctgttctgcctatgtggcgccgtgcgtcagaattatatcttcttaaccatcagcaggttcggcgctcttactaacacaacgatcactaccacccgtaaattcatgagcatcgtggtttcatctgtcatcagtggcaatccattatcttcaaagcaacggggtagtgttacgatggtcttcttaggcctctctgtccaaatatatctcaaatggaagagagagaagggcagacaccccagtgagtaagctcgattgttgactcttgtacctgttccgatttgtaacttcaattggacagatctgttgtgaggttgaccaggataatgttaatgtagtctgctgaaattatgagctatgcctagagcgatacgtaatgtgaggctgtgagagccttattcatgtagatatgtaaattggtctaggaatgtttatagtaaggatttaggttatgttcccaatcgtaatgaatatttgttgtcaggagatgttatgagagccttattcatgtagatatgcgaatacaatgggtgctcaatgctccattacgaaatgtaaatgacagactgatactggtaaattccatattttcgttgcacgtcca

SEQ ID NO: 58571 - DNA, 1583 bp, Zea Mays
gttactgcttctataacacgcgatcccgcttccactcggcgaccaccgggcaccgccgccggtacaccgcgcatcgaatcgccaccagtgccgattctgctgacccctcgccatcgctggcgggcgaatcgacgccatggccgccgcgcgccggggccgcgccgacggtgccaacggcgtcgtccgtccccgcccccgcgaccgtgtcgtcggcgtcagcggaagcatggcggggcgcgtggcggtcctcgctttctgtgtcgccgggatctggtccgcctacatctaccagggcgtcctccaggagactcttttgctgggtttgtcctcagatccacgaagcggttcaggccggaggcgcggcggttcgaggcttcgagcaccttgcgttcctcaacttcgcgcagaatgtcgtatgcttcgtctggtccttcctaatgattaagttgtggtcgagcgggagcgggagtagctccgacggccgtgcgccgctatcgaagtactggggcgtcagcgtaaccaataccatcgggccgaccatggggatcgaggcgctcaagtacattaactatccggctcagtaatgctgatgggaacccttctctatagtgtgaagtacacacttccagagtatttttgtacctttcttgttgctggcggtgtgtcctcctttgcgttgttgaagacaagctccaagacagttaagaagcttgtcaaccctaatgcacctcttggctatacattgtgcttcctcaacttagcttttgatgggtatactaactcgacccaagatataataaagtcaaggtacccaaacacgaatccatgggatataatgcttggcatgaacctctgggggaccatatataatgctgtagttatgtttgttgcgccattactattcagtaactggccatatgcagatggtttcgaggcattgagattttgccaggagaacccagaggtggcctgggacatttttctgttctgcctatgtggcgccgtgcgtcagaattatatcttcttaaccatcagcaggttcggcgctcttactaacacaacgatcactaccacccgtaaattcatgagcatcgtggtttcatctgtcatcagtggcaatccattatcttcaaagcaacggggtagtgttacgatggtcttcttaggcctctctgtccaaatatatctcaaatggaagagagagaagggcagacaccccagtgagtaagctcgattgttgactcttgtacctgttccgatttgtaacttcaattggacagatctgttgtgaggttgaccaggataatgttaatgtagtctgctgaaattatgagctatgcctagagcgatacgtaatgtgaggctgtgagagccttattcatgtagatatgtaaattggtctaggaatgtttatagtaaggatttaggttatgttcccaatcgtaatgaatatttgttgtcaggagatgttatgagagccttattcatgtagatatgcgaatacaatgggtgctcaatgctccattacgaaatgtaaatgacagactgatactggtaaattccatattttcgttgcacgtcca

SEQ ID NO: 58572 - DNA, 1953 bp, Zea Mays
gttactgcttctataacacgcgatcccgcttccactcggcgaccaccgggcaccgccgccggtacaccgcgcatcgaatcgccaccagtgccgattctgctgacccctcgccatcgctggcgggcgaatcgacgccatggccgccgcgcgccggggccgcgccgacggtgccaacggcgtcgtccgtccccgcccccgcgaccgtgtcgtcggcgtcagcggaagcatggcggggcgcgtggcggtcctcgctttctgtgtcgccgggatctggtccgcctacatctaccagggcgtcctccaggagactcttttgctgggtttgtcctcagatccacgaagcggttcaggccggaggcgcggcggttcgaggcttcgagcaccttgcgttcctcaacttcgcgcagaatgtcgtatgcttcgtctggtccttcctaatgattaagttgtggtcgagcgggagcgggagtagctccgacggccgtgcgccgctatcgaagtactggggcgtcagcgtaaccaataccatcgggccgaccatggggatcgaggcgctcaagtacattaactatccggctcaggttcctgtcgcgggcacatgggtaatattgtcactgacgcttatggattgagatgttccgatagagttaattgactatatagggagctctttggaagtgcttcctcaagtgaacatttaggaagaacattgcattgattggattgtatgtgatatggcgactggcgatcgtgtgcggtatcgaccatcggcaatccatctctagctatcttattgcagagagcattgatccaagcatcgttcttgctcaacggatttgtttttttctcttgacaagctcgaagatatgtggcgcgaggtttctttacgcaatcccgactaatttctgttggtgtgaacaggtgttggcaaaatcttctaagatgatcccttaatgctgatgggaacccttctctatagtgtgaagtacacacttccagagtatttttgtacctttcttgttgctggcggtgtgtcctcctttgcgttgttgaagacaagctccaagacagttaagaagcttgtcaaccctaatgcacctcttggctatacattgtgcttcctcaacttagcttttgatgggtatactaactcgacccaagatataataaagtcaaggtacccaaacacgaatccatgggatataatgcttggcatgaacctctgggggaccatatataatgctgtagttatgtttgttgcgccattactattcagtaactggccatatgcagatggtttcgaggcattgagattttgccaggagaacccagaggtggcctgggacatttttctgttctgcctatgtggcgccgtgcgtcagaattatatcttcttaaccatcagcaggttcggcgctcttactaacacaacgatcactaccacccgtaaattcatgagcatcgtggtttcatctgtcatcagtggcaatccattatcttcaaagcaacggggtagtgttacgatggtcttcttaggcctctctgtccaaatatatctcaaatggaagagagagaagggcagacaccccagtgagtaagctcgattgttgactcttgtacctgttccgatttgtaacttcaattggacagatctgttgtgaggttgaccaggataatgttaatgtagtctgctgaaattatgagctatgcctagagcgatacgtaatgtgaggctgtgagagccttattcatgtagatatgtaaattggtctaggaatgtttatagtaaggatttaggttatgttcccaatcgtaatgaatatttgttgtcaggagatgttatgagagccttattcatgtagatatgcgaatacaatgggtgctcaatgctccattacgaaatgtaaatgacagactgatactggtaaattccatattttcgttgcacgtcca

SEQ ID NO: 58573 - DNA, 1382 bp, Zea Mays
gttttctgctacttatcagacaagctccaagagaccaagacagttaagaagcttgccaaccctaatgcacctcttggctatacattgtgcttcctcaacttagcttttgatgggtatactaactcgacccaagatttaataaagtcaaggtacccaaagactaatccatgggatataatgcttggcatgaacctctgggggaccatatataatgctgtagttatgtttgttgcgccattactattcagtaactggccatatgcagatggtttcgaggcattgagattttgccaggagaacccagaggtggcctgggacatttttctgttctgcctatgtggcgccgtgggtcagaattatatcttcttaaccatcagcagtaatgctgatgggaacccttctctatagtgtgaagtacacacttccagagtatttttgtacctttcttgttgctggcggtgtgtcctcctttgcgttgttgaagacaagctccaagacagttaagaagcttgtcaaccctaatgcacctcttggctatacattgtgcttcctcaacttagcttttgatgggtatactaactcgacccaagatataataaagtcaaggtacccaaacacgaatccatgggatataatgcttggcatgaacctctgggggaccatatataatgctgtagttatgtttgttgcgccattactattcagtaactggccatatgcagatggtttcgaggcattgagattttgccaggagaacccagaggtggcctgggacatttttctgttctgcctatgtggcgccgtgcgtcagaattatatcttcttaaccatcagcaggttcggcgctcttactaacacaacgatcactaccacccgtaaattcatgagcatcgtggtttcatctgtcatcagtggcaatccattatcttcaaagcaacggggtagtgttacgatggtcttcttaggcctctctgtccaaatatatctcaaatggaagagagagaagggcagacaccccagtgagtaagctcgattgttgactcttgtacctgttccgatttgtaacttcaattggacagatctgttgtgaggttgaccaggataatgttaatgtagtctgctgaaattatgagctatgcctagagcgatacgtaatgtgaggctgtgagagccttattcatgtagatatgtaaattggtctaggaatgtttatagtaaggatttaggttatgttcccaatcgtaatgaatatttgttgtcaggagatgttatgagagccttattcatgtagatatgcgaatacaatgggtgctcaatgctccattacgaaatgtaaatgacagactgatactggtaaattccatattttcgttgcacgtcca

SEQ ID NO: 58574 - DNA, 1877 bp, Zea Mays
ctcttacgtgctcttcgctccttccccacggttacgctgggcttctataacacgcgatcccgcttccactcggcgaccaccgggcaccgccgccggtacaccgcgcatcgaatcgccaccagtgccgattctgctgacccctcgccatcgccggcgggcgaatcgacaccatggccgccgcacgccggggccgcgccgacggtgccaacggcgtcgtccgtccccgcccccgcgaccgtgtcgtcggcgtcagcggaagcatggcggggcgcgtggccgtcctcgccttctgtgtcgccgggatctggtccgcctacatctaccagggcgtcctccaggagactctatccacgaagcggttcgggccggaggcgcggcggttcgagcaccttgcgttcctcaacttcgcgcagaatgtcgtatgcttcgtctggtccttcctaatgactaagttgtggtcgggcgggagcgggagcagctccgacggccgtgcgccgctatcgaagtactggggcgtcagcgtaaccaataccatcgggccgaccatggggatcgaggcgctcaagtacattaactatccggctcagggagctctttggaagtgcttcctcaagtgaacatttaggaagaacattgcattgattggattgtatgtgatatggcgactggcgatcgtgtgcggtatcgaccatcggcaatccatctctagctatcttattgcagagagcattgatccaagcatcgttcttgctcaacggatttgtttttttctcttgacaagctcgaagatatgtggcgcgaggtttctttacgcaatcccgactaatttctgttggtgtgaacaggtgttggcaaaatcttctaagatgatcccttaatgctgatgggaacccttctctatagtgtgaagtacacacttccagagtatttttgtacctttcttgttgctggcggtgtgtcctcctttgcgttgttgaagacaagctccaagacagttaagaagcttgtcaaccctaatgcacctcttggctatacattgtgcttcctcaacttagcttttgatgggtatactaactcgacccaagatataataaagtcaaggtacccaaacacgaatccatgggatataatgcttggcatgaacctctgggggaccatatataatgctgtagttatgtttgttgcgccattactattcagtaactggccatatgcagatggtttcgaggcattgagattttgccaggagaacccagaggtggcctgggacatttttctgttctgcctatgtggcgccgtgcgtcagaattatatcttcttaaccatcagcaggttcggcgctcttactaacacaacgatcactaccacccgtaaattcatgagcatcgtggtttcatctgtcatcagtggcaatccattatcttcaaagcaacggggtagtgttacgatggtcttcttaggcctctctgtccaaatatatctcaaatggaagagagagaagggcagacaccccagtgagtaagctcgattgttgactcttgtacctgttccgatttgtaacttcaattggacagatctgttgtgaggttgaccaggataatgttaatgtagtctgctgaaattatgagctatgcctagagcgatacgtaatgtgaggctgtgagagccttattcatgtagatatgtaaattggtctaggaatgtttatagtaaggatttaggttatgttcccaatcgtaatgaatatttgttgtcaggagatgttatgagagccttattcatgtagatatgcgaatacaatgggtgctcaatgctccattacgaaatgtaaatgacagactgatactggtaaattccatattttcgttgcacgtcca

SEQ ID NO: 58575 - DNA, 1650 bp, Zea Mays
ctcttacgtgctcttcgctccttccccacggttacgctgggcttctataacacgcgatcccgcttccactcggcgaccaccgggcaccgccgccggtacaccgcgcatcgaatcgccaccagtgccgattctgctgacccctcgccatcgccggcgggcgaatcgacaccatggccgccgcacgccggggccgcgccgacggtgccaacggcgtcgtccgtccccgcccccgcgaccgtgtcgtcggcgtcagcggaagcatggcggggcgcgtggccgtcctcgccttctgtgtcgccgggatctggtccgcctacatctaccagggcgtcctccaggagactctatccacgaagcggttcgggccggaggcgcggcggttcgagcaccttgcgttcctcaacttcgcgcagaatgtcgtatgcttcgtctggtccttcctaagtgagagctcactccctccgaccctccctctcgcgccgcatggctgtctgattgcgcatttcgcgcaacgtcgtggactcgtggtgatcggttccgtctcctctagtcctctgcgtgggtggcgactgcatacgagggttcctgacatttctgctgcttttccagtgactaagttgtggtcgggcgggagcgggagcagctccgacggccgtgcgccgctatcgaagtactggggcgtcagcgtaaccaataccatcgggccgaccatggggatcgaggcgctcaagtacattaactatccggctcagacaagctccaagacagttaagaagcttgtcaaccctaatgcacctcttggctatacattgtgcttcctcaacttagcttttgatgggtatactaactcgacccaagatataataaagtcaaggtacccaaacacgaatccatgggatataatgcttggcatgaacctctgggggaccatatataatgctgtagttatgtttgttgcgccattactattcagtaactggccatatgcagatggtttcgaggcattgagattttgccaggagaacccagaggtggcctgggacatttttctgttctgcctatgtggcgccgtgcgtcagaattatatcttcttaaccatcagcaggttcggcgctcttactaacacaacgatcactaccacccgtaaattcatgagcatcgtggtttcatctgtcatcagtggcaatccattatcttcaaagcaacggggtagtgttacgatggtcttcttaggcctctctgtccaaatatatctcaaatggaagagagagaagggcagacaccccagtgagtaagctcgattgttgactcttgtacctgttccgatttgtaacttcaattggacagatctgttgtgaggttgaccaggataatgttaatgtagtctgctgaaattatgagctatgcctagagcgatacgtaatgtgaggctgtgagagccttattcatgtagatatgtaaattggtctaggaatgtttatagtaaggatttaggttatgttcccaatcgtaatgaatatttgttgtcaggagatgttatgagagccttattcatgtagatatgcgaatacaatgggtgctcaatgctccattacgaaatgtaaatgacagactgatactggtaaattccatattttcgttgcacgtcca

SEQ ID NO: 58576 - DNA, 1589 bp, Zea Mays
ctcttacgtgctcttcgctccttccccacggttacgctgggcttctataacacgcgatcccgcttccactcggcgaccaccgggcaccgccgccggtacaccgcgcatcgaatcgccaccagtgccgattctgctgacccctcgccatcgccggcgggcgaatcgacaccatggccgccgcacgccggggccgcgccgacggtgccaacggcgtcgtccgtccccgcccccgcgaccgtgtcgtcggcgtcagcggaagcatggcggggcgcgtggccgtcctcgccttctgtgtcgccgggatctggtccgcctacatctaccagggcgtcctccaggagactctatccacgaagcggttcgggccggaggcgcggcggttcgagcaccttgcgttcctcaacttcgcgcagaatgtcgtatgcttcgtctggtccttcctaatgactaagttgtggtcgggcgggagcgggagcagctccgacggccgtgcgccgctatcgaagtactggggcgtcagcgtaaccaataccatcgggccgaccatggggatcgaggcgctcaagtacattaactatccggctcagtaatgctgatgggaacccttctctatagtgtgaagtacacacttccagagtatttttgtacctttcttgttgctggcggtgtgtcctcctttgcgttgttgaagacaagctccaagacagttaagaagcttgtcaaccctaatgcacctcttggctatacattgtgcttcctcaacttagcttttgatgggtatactaactcgacccaagatataataaagtcaaggtacccaaacacgaatccatgggatataatgcttggcatgaacctctgggggaccatatataatgctgtagttatgtttgttgcgccattactattcagtaactggccatatgcagatggtttcgaggcattgagattttgccaggagaacccagaggtggcctgggacatttttctgttctgcctatgtggcgccgtgcgtcagaattatatcttcttaaccatcagcaggttcggcgctcttactaacacaacgatcactaccacccgtaaattcatgagcatcgtggtttcatctgtcatcagtggcaatccattatcttcaaagcaacggggtagtgttacgatggtcttcttaggcctctctgtccaaatatatctcaaatggaagagagagaagggcagacaccccagtgagtaagctcgattgttgactcttgtacctgttccgatttgtaacttcaattggacagatctgttgtgaggttgaccaggataatgttaatgtagtctgctgaaattatgagctatgcctagagcgatacgtaatgtgaggctgtgagagccttattcatgtagatatgtaaattggtctaggaatgtttatagtaaggatttaggttatgttcccaatcgtaatgaatatttgttgtcaggagatgttatgagagccttattcatgtagatatgcgaatacaatgggtgctcaatgctccattacgaaatgtaaatgacagactgatactggtaaattccatattttcgttgcacgtcca

SEQ ID NO: 58577 - DNA, 1939 bp, Zea Mays
ctcttacgtgctcttcgctccttccccacggttacgctgggcttctataacacgcgatcccgcttccactcggcgaccaccgggcaccgccgccggtacaccgcgcatcgaatcgccaccagtgccgattctgctgacccctcgccatcgccggcgggcgaatcgacaccatggccgccgcacgccggggccgcgccgacggtgccaacggcgtcgtccgtccccgcccccgcgaccgtgtcgtcggcgtcagcggaagcatggcggggcgcgtggccgtcctcgccttctgtgtcgccgggatctggtccgcctacatctaccagggcgtcctccaggagactctatccacgaagcggttcgggccggaggcgcggcggttcgagcaccttgcgttcctcaacttcgcgcagaatgtcgtatgcttcgtctggtccttcctaatgactaagttgtggtcgggcgggagcgggagcagctccgacggccgtgcgccgctatcgaagtactggggcgtcagcgtaaccaataccatcgggccgaccatggggatcgaggcgctcaagtacattaactatccggctcaggtttggttccgcctgctattgccgtctcaccttggttgttatatgcactgtcccggacattgtgtcatgttaatgttaggttcctgtcgcgggcacatgggtaatattgtcactgacgcttatggattgagatgttccgatagagttaattgactatatagggagctctttggaagtgcttcctcaagtgaacatttaggaagaacattgcattgattggattgtatgtgatatggcgactggcgatcgtgtgcggtatcgaccatcggcaatccatctctagctatcttattgcagagagcattgatccaagcatcgttcttgctcaacggatttgtttttttctcttgacaagctcgaagatatgtggcgcgaggtttctttacgcaatcccgactaatttctgttggtgtgaacaggtgttggcaaaatcttctaagatgatcccttaatgctgatgggaacccttctctatagtgtgaagtacacacttccagagtatttttgtacctttcttgttgctggcggtgtgtcctcctttgcgttgttgaagacaagctccaagacagttaagaagcttgtcaaccctaatgcacctcttggctatacattgtgcttcctcaacttagcttttgatgggtatactaactcgacccaagatataataaagtcaagtaactggccatatgcagatggtttcgaggcattgagattttgccaggagaacccagaggtggcctgggacatttttctgttctgcctatgtggcgccgtgcgtcagaattatatcttcttaaccatcagcaggttcggcgctcttactaacacaacgatcactaccacccgtaaattcatgagcatcgtggtttcatctgtcatcagtggcaatccattatcttcaaagcaacggggtagtgttacgatggtcttcttaggcctctctgtccaaatatatctcaaatggaagagagagaagggcagacaccccagtgagtaagctcgattgttgactcttgtacctgttccgatttgtaacttcaattggacagatctgttgtgaggttgaccaggataatgttaatgtagtctgctgaaattatgagctatgcctagagcgatacgtaatgtgaggctgtgagagccttattcatgtagatatgtaaattggtctaggaatgtttatagtaaggatttaggttatgttcccaatcgtaatgaatatttgttgtcaggagatgttatgagagccttattcatgtagatatgcgaatacaatgggtgctcaatgctccattacgaaatgtaaatgacagactgatactggtaaattccatattttcgttgcacgtcca

SEQ ID NO: 58578 - DNA, 1865 bp, Zea Mays
ctcttacgtgctcttcgctccttccccacggttacgctgggcttctataacacgcgatcccgcttccactcggcgaccaccgggcaccgccgccggtacaccgcgcatcgaatcgccaccagtgccgattctgctgacccctcgccatcgccggcgggcgaatcgacaccatggccgccgcacgccggggccgcgccgacggtgccaacggcgtcgtccgtccccgcccccgcgaccgtgtcgtcggcgtcagcggaagcatggcggggcgcgtggccgtcctcgccttctgtgtcgccgggatctggtccgcctacatctaccagggcgtcctccaggagactctatccacgaagcggttcgggccggaggcgcggcggttcgagcaccttgcgttcctcaacttcgcgcagaatgtcgtatgcttcgtctggtccttcctaatgactaagttgtggtcgggcgggagcgggagcagctccgacggccgtgcgccgctatcgaagtactggggcgtcagcgtaaccaataccatcgggccgaccatggggatcgaggcgctcaagtacattaactatccggctcagagttaattgactatatagggagctctttggaagtgcttcctcaagtgaacatttaggaagaacattgcattgattggattgtatgtgatatggcgactggcgatcgtgtgcggtatcgaccatcggcaatccatctctagctatcttattgcagagagcattgatccaagcatcgttcttgctcaacggatttgtttttttctcttgacaagctcgaagatatgtggcgcgaggtttctttacgcaatcccgactaatttctgttggtgtgaacagtaatgctgatgggaacccttctctatagtgtgaagtacacacttccagagtatttttgtacctttcttgttgctggcggtgtgtcctcctttgcgttgttgaagacaagctccaagacagttaagaagcttgtcaaccctaatgcacctcttggctatacattgtgcttcctcaacttagcttttgatgggtatactaactcgacccaagatataataaagtcaaggtacccaaacacgaatccatgggatataatgcttggcatgaacctctgggggaccatatataatgctgtagttatgtttgttgcgccattactattcagtaactggccatatgcagatggtttcgaggcattgagattttgccaggagaacccagaggtggcctgggacatttttctgttctgcctatgtggcgccgtgcgtcagaattatatcttcttaaccatcagcaggttcggcgctcttactaacacaacgatcactaccacccgtaaattcatgagcatcgtggtttcatctgtcatcagtggcaatccattatcttcaaagcaacggggtagtgttacgatggtcttcttaggcctctctgtccaaatatatctcaaatggaagagagagaagggcagacaccccagtgagtaagctcgattgttgactcttgtacctgttccgatttgtaacttcaattggacagatctgttgtgaggttgaccaggataatgttaatgtagtctgctgaaattatgagctatgcctagagcgatacgtaatgtgaggctgtgagagccttattcatgtagatatgtaaattggtctaggaatgtttatagtaaggatttaggttatgttcccaatcgtaatgaatatttgttgtcaggagatgttatgagagccttattcatgtagatatgcgaatacaatgggtgctcaatgctccattacgaaatgtaaatgacagactgatactggtaaattccatattttcgttgcacgtcca

SEQ ID NO: 58579 - DNA, 1378 bp, Zea Mays
ctcttacgtgctcttcgctccttccccacggttacgctgggcttctataacacgcgatcccgcttccactcggcgaccaccgggcaccgccgccggtacaccgcgcatcgaatcgccaccagtgccgattctgctgacccctcgccatcgccggcgggcgaatcgacaccatggccgccgcacgccggggccgcgccgacggtgccaacggcgtcgtccgtccccgcccccgcgaccgtgtcgtcggcgtcagcggaagcatggcggggcgcgtggccgtcctcgccttctgtgtcgccgggatctggtccgcctacatctaccagggcgtcctccaggagactctgtgttggcaaaatcttctaagatgatcccttaatgctgatgggaacccttctctatagtgtgaagtacacacttccagagtatttttgtacctttcttgttgctggcggtgtgtcctcctttgcgttgttgaagacaagctccaagacagttaagaagcttgtcaaccctaatgcacctcttggctatacattgtgcttcctcaacttagcttttgatgggtatactaactcgacccaagatataataaagtcaaggtacccaaacacgaatccatgggatataatgcttggcatgaacctctgggggaccatatataatgctgtagttatgtttgttgcgccattactattcagtaactggccatatgcagatggtttcgaggcattgagattttgccaggagaacccagaggtggcctgggacatttttctgttctgcctatgtggcgccgtgcgtcagaattatatcttcttaaccatcagcaggttcggcgctcttactaacacaacgatcactaccacccgtaaattcatgagcatcgtggtttcatctgtcatcagtggcaatccattatcttcaaagcaacggggtagtgttacgatggtcttcttaggcctctctgtccaaatatatctcaaatggaagagagagaagggcagacaccccagtgagtaagctcgattgttgactcttgtacctgttccgatttgtaacttcaattggacagatctgttgtgaggttgaccaggataatgttaatgtagtctgctgaaattatgagctatgcctagagcgatacgtaatgtgaggctgtgagagccttattcatgtagatatgtaaattggtctaggaatgtttatagtaaggatttaggttatgttcccaatcgtaatgaatatttgttgtcaggagatgttatgagagccttattcatgtagatatgcgaatacaatgggtgctcaatgctccattacgaaatgtaaatgacagactgatactggtaaattccatattttcgttgcacgtcca

SEQ ID NO: 58580 - DNA, 4072 bp, Zea Mays
atcagcgacggcgtgcgcgcctgcaccgtcaggatcaccaacccctgcgcgcgcgccatggaagggatgatttagacatgcaccgcagattaagttagccatcagaaagagttcggtaggcatccgcagcccattgtctttggctttgggccgggccgaaattctacacgcattcccaattctgacatgacgaattttggtgtgaatcctgtgcagtttattttctctgaatttgtgtttttttttgttgcctaatataaaaagcaaaagggacccatcatgtcaagagacgatccatcatcatgttgaatgattgggtaaatatcaggcgacagtgacaaaagctctgcgtacttgcgacggggccgccacagctcgggctccgcccgtgcgcggcgtcgctttgcgcccgtgagcggtgagccgagcggcaaagcaagcggaggagaccgactcgactccggcacccgtcgtcccacgcatccttttgatcggccaaatagaatcaggttaagcgcgggcttgggctttatgtgtgtaattgtcagcgctgctgactacgatctacgaaccgtacgggccagggtgagacgtttgcatggctccgaagtccgaatggccggaacacagacggtcagacgctcatatataaggcatgcgtattttactctaatagcgcatgcgctatctattataataaaaaaagactttatgctcgttggatggatcatgtatgtctgagtatagataaacctagataaaactatgagttggtcatattatacttatatacgatctaatgagcatgaaactttttttgttgttgttgttgttgttgttggagtccatatgagtatatctacacattaaacatatggttccctgcccaccctcgctccgcgtgcccgtgccggcagcaggaaggcggtgcccccggcccgaatcttcccgacgattgatgaagttgtagacacgcgggcccgcggcagttcgcgtccgcacgtcgggccctggcgtcacgcttggggctttcggctttgccagcgtctgtctcgacgtgccagatgtacggatttctttacactgacgaagaaatctagtacaccaaccaccaaatgggcctgcatcacagatattctggtactaggtaggagtgatttacacgtgtctggtgaccaggtttttgttcggtacggaccacggcaaggccctccagaacgttctgccgtcgcacggacacggcggttacctactcgttcgtcgcttgtccctgtccgttgatccttggtggacccgtcgtcattagacgagacagacgcgtagcgtacgtactacagtctctttcttgtctttcatcaccgccagggccaggcgcgtagaacgtagagattagcgtggtcggcgccaccgaaccttaccggcttaccgcccacacaaaatgggcccgcacgccggcctccaggtactactgggctactcagaatgagatggcttccgaggattggcacggcaccttgcattgggcggggcctcctacgttttgtttttggcgtcctagcaccaatcattggacctgatgcgtatgccgcccatggccatggcagtggcacagctgcaatatcacggctgattggttgctcatatcaacttatctcggaccatcgtatgtgttgattttgtttgagtttatgtctggttgactgtacgtgttagacgcaggttgcatgagtaaatgcaaaacaaatcattttccacgtgattggttcgtttcactggtccgcctggctcgcatcagtcagccaggctatatatagcctggttgagtgtatgcaaaggtttagtgtttggttacttggctcaattaaatctggcggtattgagacagtgtttggttgtatgtatcaaaacatgtactagtgaagaatgcacaaataaaattttaaatattatatagcatatatggtctagttttgatcgaaaaaatattggggacacaaatataaaatttgttcggtgattaaatcttttaattagaagatataacaaaaaaactaactaaaaacatacctcggtatacgtgccgttgcatgtactgagcctggctgggcccgtacgctcgccgcgagctttgctcggaagcctggctgcggtcgcttcgagtagagccgggatgcatagagaagctaaccaaacaaacactgctttataactctgcgggtacaatttctctattcacccagtctaccaaacacgctgtttaagattattaacctacatccgtccctatgcccaaaactacggtatccagccgaccagagcgtgcctagcctgtccatacgcgcgaagctatccaatcaagccccttgtgtatccagctgccgtgcagggaaccgggtggcccacccatagattttatcaggaaacatcgtaatactactatactaccccgactcctgcctggaacaggggtccgtgtacgcgggcatactactgttcatttatttctggcgccatgcccagtcccatactcccatgacgtgatgacaattaataacagacgatggacagcatatatatatatatagcaggacatgtaacgtgacgtatatagaaaggaggcacatgcatttgcatgacagcacgcacgcacgtaagatcgagagtggtgatgtagaggaaggagtatgtatgtacactactgttctgtacggtagtagtagtagtgtgcgtgcacggacgttatgttatgacgacgcgcgcgcgtaccgtgagctcgacgaaggcgctggcgatgtagacggtgtaggtggtgaggaaggcgtcggagaggaagccgccgagcagcgccagcaggaacgccgtgcccatgaagctggtcaccgccgtggccgactgcgacggcgagtagcccatggaccccatcaggtacgtcaccaggttgctcgcggtcgccaggaacgccaggttctccagcacctccaccactgttgtccgaccatgcacatcatcatatatatcagttgccacggtgcagtttattaattaatcatgtgatttttgtcaagtgcagtacagagagacaaaagcagtcgcatcaaaacactatgtaggaacggacgacgggctgtgtggcgcgcgttcccgatgcgtaccggccaaattttactccgcgacccatttgtgccttgcgatccgtgccatgttttaatgcgggttttggggacgaacggacgacggactcatctctgcggtgcgcctcaacgccggaacggaaccccatccattccagttccagctccactccaagtctccaaccaaccgctctcgtcaccagaccagatcagatcagaggagacggagaaaaacaagaatagtttcccgtccccctctcgtcaggagcctgacgatgacagcactcaacaagacaacacagactagtttccctttccctctcgcgcatgcaaccgtggcgatggcgtccgcggggaacttgtctgcagcgagaagcttccagatcggcgggcacatccgagcagcagaggaacccgtcctcgggacgagggcagaggggcagacaccaccagctcagctctgcccaccactttgtagaatcgacgagccagcagtccatgccgggggcgggcaagttgcgggcgaggagcacgggcaggaactgtatgcgaaagggagctgggagcgaaaggagagggagggagggagagaatggagcccagtggggacgaaaaaaaggagtgcagcgagcgagaggccgagaaagggcacgtcgtcgaccaccacctgtcggagtcggacgaaagcagattgcaaggccggccgtgggagggaggagaagaaactagcgcagatcagcagaggggaatggaagccgtgtgtcagcgtccaacccccggcccagcccacactcgacagcttcgggcgttcatgcgctcgtgggccggcctagccaagagagtccaccactcacatcccaaaagtcaggctgatgagaggaggaggactctcccttttaagctgcccacggcccccttggctagccaatgtgggactaagc

SEQ ID NO: 58581 - DNA, 1057 bp, Zea Mays
ggccatgcagtgctagcaccatatagaccactctccactgcctgcgtggtgtgctcatggctgtttgctccctcgttcagccaccttagggtttggttttgtgaagtttttcccctactcttgagctccaaatttgtggtcatcgtgtgagtgatgtggcagtgttcaggcctaggtaacctccctttcaaacccccaaatctgatttgctcttgtgctgtgtgccagctccctagttggtgaccacgcccactaaattccccacatcgccgtggccaggctttctcgtggagtttttcacccgtgtggtgaatgttccgtgctctgcaaaggaaagatttttgatgccttggctttattagttgctccttatggaggtcttgaagcttagattacttatgtgtatcttttatggaaaggcttcacctttccaggtattgtagttaagttatgcactctgaagactatcaggacttgtaacaatttcaaccccttttatgttgtaaaacttgagttctgggtattttgtaaaagtcttctgctctatctccaatgtgtgtgtatcaaatgtgattactgtaatatgccgttatgtgggagatccttgggatgatgagttcaagttgatgaactcgatagccttgttaagttacccggtacacgtgcatagcaatctgagagcattaaggcaaggattagtgtatgtgggcctgataacttgggagggctgtcacagtcacgaccattggaaaccattgcttcatgataagtggaaggctctgtacttcagtcaacatcctctgcacaactcagagcaaaagcaatgttgcattcttcaatcaatctcctcggaggcctaatatctcttttggccctcccaactacaacagactgttgtggttgttgcacaacaagagaagaatgctcagtggacaaagaatcatcaattatgggtgaaatatcatgaacctacagatttggaatagcagcatcctgaaacatattgtcatccccatctaagttctccacctacaaacttactttatgtggaactgac

SEQ ID NO: 58582 - DNA, 758 bp, Zea Mays
tgcacatcagcagaggctgggctagccgctgaggtgggtgccactagtagattcccatgggtagctggctgctgcgtgggccagtttttagcagagctccaagagcaacttccagactgaatcactgaattcatgagaagctgtgccaaacagttttttttttactgtgaagtgattatttgctgatttattgaagtgattttctgaaatgaaccaggagactgggaaaacaattcttgtgattcactccgcacacagaattattagtaaatcatggagaatcaaataatcacttttcacaagagaatcaggttccacagaaaatctggagcgggaggggctctaccaaactggcccttaaatcactttcatcttctccatctccaactccaaagtgcataaggataagaacgttgtgacagtgttcagcgcgcctaactactgctaccgatgcggaaacatggctgccatcctcgaaattggcgagaacatggatcagaacttcctccaattcgacccagctccgaggcaaattgagccggacatgacgcgcaagacaccagactactttttgtagaaaaaacaggtgtggctaaaaaaaaaagagaagagacgaggggaagatgcaggaaatggacccgatgttctgttgtgtctgtattgtgatgccttgctagtcaccatgccgcgcccatgccaaccggtgctaatgccatgctggatctggatgagtaagcctgctttggcatagagttcag

SEQ ID NO: 58583 - DNA, 595 bp, Zea Mays
ccaagagcaacttccagactgaatcactgaattcatgagaagctgtgccaaacagttttttttttactgtgaagtgattatttgctgatttattgaagtgattttctgaaatgaaccaggagactgggaaaacaattcttgtgattcactccgcacacagaattattagtaaatcatggagaatcaaataatcacttttcacaagagaatcaggttccacagaaaatctggagcgggaggggctctaccaaactggcccttaaatcactttcatcttctccatctccaactccaaagtgcataaggataagaacgttgtgacagtgttcagcgcgcctaactactgctaccgatgcggaaacatggctgccatcctcgaaattggcgagaacatggatcagaacttcctccaattcgacccagctccgaggcaaattgagccggacatgacgcgcaagacaccagactactttttgtagaaaaaacaggtgtggctaaaaaaaaaagagaagagacgaggggaagatgcaggaaatggacccgatgttctgttgtgtctgtattgtgatgccttgctaggacatcactgtataag

SEQ ID NO: 58584 - DNA, 556 bp, Zea Mays
ctgaaatgaaccaggagactgggaaaacaattcttgtgattcactccgcacacagaattattagtaaatcatggagaatcaaataatcacttttcacaagagaatcaggttccacagaaaatctggagcgggaggggctctaccaaactggcccttaaatcactttcatcttctccatctccaactccaaagtgcataaggataagaacgttgtgacagtgttcagcgcgcctaactactgctaccgatgcggaaacatggctgccatcctcgaaattggcgagaacatggatcagaacttcctccaattcgacccagctccgaggcaaattgagccggacatgacgcgcaagacaccagactactttttgtagaaaaaacaggtgtggctaaaaaaaaaagagaagagacgaggggaagatgcaggaaatggacccgatgttctgttgtgtctgtattgtgatgccttgctagacatcgttgtacactaggcttttgcaatgctttcatataggacatcactgtataagcacgccgatgaggacgtgggaggcga

SEQ ID NO: 58585 - DNA, 819 bp, Zea Mays
gaaacagccacgagcgcatggcagcggcagagacatctacgggttctccgcctccacaagggcggccttgtccttgtggatgaagaacgcgtagaagccaccgccgatggtggcgaacgccatcgcccacacgacgagcgccagcagcggcggcatgatggcggccaccttctgcgagaacatgacggtgagcagcgtggtcagcccccagacgcaggccttgatccacccccggcgcggcgagtcaggcggcgtccgctcgaacaggcgaaggcagaggaagagcagcagcaggtcgacgtacgagcccgacacgaacgctattgacccggggtcgcggtccgagcggtagatcgccatgcccgagttgaaggtcaggaacacgaaccccagaaatgtcagccatgggatcccgccgtctcccttttcatcctccgtactcccattatttgctgggtttctcctcgatcccagaagtgattgcttctctggggacttggaatgcataactgtacttggcagcggcaggctgtactatctgcaatgcaatgcgaccacggttcaagccgtcagttgaacctgggctattgtgaaaatcagaagacgaagaaaaataaatcaatctttatctcttccactcttcaaatcagccatcttgcttctttcccaaactctatatgatcatatatagggtatgtttggttcagcttttttctgaccagcttttctgaaaatccggctgtggggagaatctggctgtggggagaatctgagtattattacgattacgtgtggagtaagataaagttgtttataggg

SEQ ID NO: 58586 - DNA, 1796 bp, Zea Mays
tccaccgaggccccacgaatccgggtcatcttgcgatcaatccagtccgtccaacccttgccatccgaaccgcaaccctagatttcgcttcctctctgtcccctccgctgcgccgccataacataaatccgccgcccctctccctcagtaaacccctctcttcttcccgcggtctgctcgttcgatctgtgcagcagatctgaggtcccgggcgaccgtgaagcagcttcaatcgtcggcatggcgctcgtattgcatagtggggctggaaacaagaatgccttcaaagcacttattgctgcagaatacagtgggatcaaggttgagttgaccaaggattttgagatgggtgtctccaacaagacccctgagtttcttaagatgaacccccttgggaaggttcctgttctggagactcctgatggccctgtttttgagagtaatgctatcgcacgctatgttgctcgcttgaaggatgacaaccctctttttgggtcttcccgtattgaacaagcccacgttgagcaatggatggattttgccgcaacagaagttgatcctggtgttgcatggtacttgtatccaaggcttgggtacctcccttatgttagcacaactgaggaaacagctatttcttcattgaagaggtcgcttggtgctctgaacacacaccttgcttcaaacacataccttgttgggcatgctgttactctagctgacattgtaatgacatgcaacctctaccatggaattgcacggatcttgaccaagaccttcacgtctgatttccctcatgtcgagaggtatttctggaccatggttaaccagcctaacttcaagaaggtcattggtgaggtcaagcaggcagagtctgcacctcctattccgaaaaaggctgctccttctaaggagccaaaggcaaaggatgtcaagaaggaggctccaaaggaggcccccaagccaaaggtggttgaggcaccagcagaagaggaagcaccaaagccaaagccaaagaatcctcttgacttgctgccaccaagcaagatggtccttgatgactggaagaggctatactcaaacacaaagactaacttccgggaggttgccatcaaaggtttctgggacatgtacgacccagagggctactctttgtggttctgtgactacaagtacaatgatgagaacaccgtctcctttgtgaccctgaacaaggatgttcccaagtttgtaatggacgaggtctatgacatggagctctacgagtggaccaaggtggacatctctgatgaggcccagaaggagcgtgtcaatgcgatgattgaggaccaggagccctttgagggcgaggccttgcttgacgcgaaatgcttcaagtgagtgtgcttgcctggagacagaactgtttagcccttgaatttgcctatggaagagtttgcccttttactagtgtcgatgttgatctggtataccttgctatgaactggttaaagtttgtgctggtttgggattttttgtgcatcttgtgatacctcaagtcttcatcatttaaatgtttagccgtaataatctggttattttttcttctcatgactgagatgttgtgattatgtttttgttttatacacgccataaatttcaagccggcagagcccatttaggaacgccaagccggcagagccatttaggaacgccttaaactatatcatggcttcagcagaattttgatccgagttgtagtttgtgctatttgtgcaaactattcggttttagcaaatttatcactttaatattttgaa

SEQ ID NO: 58587 - DNA, 1894 bp, Zea Mays
ccgaggccccacgaatccgggtcatcttgcgatcaatccagtccgtccaacccttgccatccgaaccgcaaccctagatttcgcttcctctctgtcccctccgctgcgccgccataacataaatccgccgcccctctccctcagtaaacccctctcttcttcccgcggtctgctcgttcgatctgtgcagcagatctgaggtcccgggcgaccgtgaagcagcttcaatcgtcggcatggcgctcgtattgcatagtggggctggaaacaagaatgccttcaaagcacttattgctgcagaatacagtgggatcaaggttgagttgaccaaggattttgagatgggtgtctccaacaagacccctgagtttcttaagatgaacccccttgggaagactcctgatggccctgtttttgagagtaatgctatcgcacgctatgttgctcgcttgaaggatgacaaccctctttttgggtcttcccgtattgaacaagcccacgttgagcaatggatggattttgccgcaacagaagttgatcctggtgttgcatggtacttgtatccaaggcttgggtacctcccttatgttagcacaactgaggaaacagctatttcttcattgaagaggtcgcttggtgctctgaacacacaccttgcttcaaacacataccttgttgggcatgctgttactctagctgacattgtaatgacatgcaacctctaccatggaattgcacggatcttgaccaagaccttcacgtctgatttccctcatgtcgagaggtatttctggaccatggttaaccagcctaacttcaagaaggtcattggtgaggtcaagcaggcagagtctgcacctcctattccgaaaaaggctgctccttctaaggagccaaaggcaaaggatgtcaagaaggaggctccaaaggaggcccccaagccaaaggtggttgaggcaccagcagaagaggaagcaccaaagccaaagccaaagaatcctcttgacttgctgccaccaagcaagatggtccttgatgactggaagaggctatactcaaacacaaagactaacttccgggaggttgccatcaaaggtttctgggacatgtacgacccagagggctactctttgtggttctgtgactacaagtacaatgatgagaacaccgtctcctttgtgaccctgaacaaggttggtggattcctgcagcggatggacctgtgccgcaagtacgcctttgggaagatgctcgtgataggctctgagccacccttcaagctgaagggcctttggctcttccgtggccaggatgttcccaagtttgtaatggacgaggtctatgacatggagctctacgagtggaccaaggtggacatctctgatgaggcccagaaggagcgtgtcaatgcgatgattgaggaccaggagccctttgagggcgaggccttgcttgacgcgaaatgcttcaagtgagtgtgcttgcctggagacagaactgtttagcccttgaatttgcctatggaagagtttgcccttttactagtgtcgatgttgatctggtataccttgctatgaactggttaaagtttgtgctggtttgggattttttgtgcatcttgtgatacctcaagtcttcatcatttaaatgtttagccgtaataatctggttattttttcttctcatgactgagatgttgtgattatgtttttgttttatacacgccataaatttcaagccggcagagcccatttaggaacgccaagccggcagagccatttaggaacgccttaaactatatcatggcttcagcagaattttgatccgagttgtagtttgtgctatttgtgcaaactattcggttttagcaaatttatcactttaatattttgaa

SEQ ID NO: 58588 - DNA, 1888 bp, Zea Mays
ccgaggccccacgaatccgggtcatcttgcgatcaatccagtccgtccaacccttgccatccgaaccgcaaccctagatttcgcttcctctctgtcccctccgctgcgccgccataacataaatccgccgcccctctccctcagtaaacccctctcttcttcccgcggtctgctcgttcgatctgtgcagcagatctgaggtcccgggcgaccgtgaagcagcttcaatcgtcggcatggcgctcgtattgcatagtggggctggaaacaagaatgccttcaaagcacttattgctgcagaatacagtgggatcaaggttgagttgaccaaggattttgagatgggtgtctccaacaagacccctgagtttcttaagatgaacccccttgggaaggttcctgttctggagactcctgatggccctgtttttgagattgctcgcttgaaggatgacaaccctctttttgggtcttcccgtattgaacaagcccacgttgagcaatggatggattttgccgcaacagaagttgatcctggtgttgcatggtacttgtatccaaggcttgggtacctcccttatgttagcacaactgaggaaacagctatttcttcattgaagaggtcgcttggtgctctgaacacacaccttgcttcaaacacataccttgttgggcatgctgttactctagctgacattgtaatgacatgcaacctctaccatggaattgcacggatcttgaccaagaccttcacgtctgatttccctcatgtcgagaggtatttctggaccatggttaaccagcctaacttcaagaaggtcattggtgaggtcaagcaggcagagtctgcacctcctattccgaaaaaggctgctccttctaaggagccaaaggcaaaggatgtcaagaaggaggctccaaaggaggcccccaagccaaaggtggttgaggcaccagcagaagaggaagcaccaaagccaaagccaaagaatcctcttgacttgctgccaccaagcaagatggtccttgatgactggaagaggctatactcaaacacaaagactaacttccgggaggttgccatcaaaggtttctgggacatgtacgacccagagggctactctttgtggttctgtgactacaagtacaatgatgagaacaccgtctcctttgtgaccctgaacaaggttggtggattcctgcagcggatggacctgtgccgcaagtacgcctttgggaagatgctcgtgataggctctgagccacccttcaagctgaagggcctttggctcttccgtggccaggatgttcccaagtttgtaatggacgaggtctatgacatggagctctacgagtggaccaaggtggacatctctgatgaggcccagaaggagcgtgtcaatgcgatgattgaggaccaggagccctttgagggcgaggccttgcttgacgcgaaatgcttcaagtgagtgtgcttgcctggagacagaactgtttagcccttgaatttgcctatggaagagtttgcccttttactagtgtcgatgttgatctggtataccttgctatgaactggttaaagtttgtgctggtttgggattttttgtgcatcttgtgatacctcaagtcttcatcatttaaatgtttagccgtaataatctggttattttttcttctcatgactgagatgttgtgattatgtttttgttttatacacgccataaatttcaagccggcagagcccatttaggaacgccaagccggcagagccatttaggaacgccttaaactatatcatggcttcagcagaattttgatccgagttgtagtttgtgctatttgtgcaaactattcggttttagcaaatttatcactttaatattttgaa

SEQ ID NO: 58589 - DNA, 1596 bp, Zea Mays
gggagtgggagggagagaggtagtcctgtagctggcgggtggcggctggtattgcatagtggggctggaaacaagaatgccttcaaagcacttattgctgcagaatacagtgggatcaaggttgagttgaccaaggattttgagatgggtgtctccaacaagacccctgagtttcttaagatgaacccccttgggaaggttcctgttctggagactcctgatggccctgtttttgagagtaatgctatcgcacgctatgttgctcgcttgaaggatgacaaccctctttttgggtcttcccgtattgaacaagcccacgttgagcaatggatggattttgccgcaacagaagttgatcctggtgttgcatggtacttgtatccaaggcttgggtacctcccttatgttagcacaactgaggaaacagctatttcttcattgaagaggtcgcttggtgctctgaacacacaccttgcttcaaacacataccttgttgggcatgctgttactctagctgacattgtaatgacatgcaacctctaccatggaattgcacggatcttgaccaagaccttcacgtctgatttccctcatgtcgagaggtatttctggaccatggttaaccagcctaacttcaagaaggtcattggtgaggtcaagcaggcagagtctgcacctcctattccgaaaaaggctgctccttctaaggagccaaaggcaaaggatgtcaagaaggaggctccaaaggaggcccccaagccaaaggtggttgaggcaccagcagaagaggaagcaccaaagccaaagccaaagaatcctcttgacttgctgccaccaagcaagatggtccttgatgactggaagaggctatactcaaacacaaagactaacttccgggaggttgccatcaaagcggatggacctgtgccgcaagtacgcctttgggaagatgctcgtgataggctctgagccacccttcaagctgaagggcctttggctcttccgtggccaggatgttcccaagtttgtaatggacgaggtctatgacatggagctctacgagtggaccaaggtggacatctctgatgaggcccagaaggagcgtgtcaatgcgatgattgaggaccaggagccctttgagggcgaggccttgcttgacgcgaaatgcttcaagtgagtgtgcttgcctggagacagaactgtttagcccttgaatttgcctatggaagagtttgcccttttactagtgtcgatgttgatctggtataccttgctatgaactggttaaagtttgtgctggtttgggattttttgtgcatcttgtgatacctcaagtcttcatcatttaaatgtttagccgtaataatctggttattttttcttctcatgactgagatgttgtgattatgtttttgttttatacacgccataaatttcaagccggcagagcccatttaggaacgccaagccggcagagccatttaggaacgccttaaactatatcatggcttcagcagaattttgatccgagttgtagtttgtgctatttgtgcaaactattcggttttagcaaatttatcactttaatattttgaa

SEQ ID NO: 58590 - DNA, 2055 bp, Zea Mays
aaacacgcaaaacgtgcttctgtccctctcctgttataatttcgtcttcttccctctcccaccggtgtcctcgcctcgcctatccgatctgccacctcgccgtctcgcacgttcctttccccaactccccagcgcctctccgcgccgcgatccagatccaggttgttcagcatgggtctggtgaaggaaggcgtcgacatggaggagggaaccctagagatcggcatggagtacaggactgtatctggtgtggccgggcctctggttatcttggataaagtaaagggcccaaagtaccaagaaattgtaaacatccgacttggagatggcaccactcgccgtggtcaagtccttgaagttgatggagaaaaagctgttgtgcaggtttttgaaggaacttctggaatagacaacaaatacacaaccgtgcagtttacaggcgaggttttgaaaactcctgtctcactcgatatgcttgggcgcatttttaatggttctggaaaacctattgacaatggccccccgatattacctgaagcctacttggatatctctggaagttctattaatcccagtgagagaacctatccagaggagatgatccaaactgggatatccaccattgatgtgatgaactccattgctcgtgggcaaaaaatccccctattttctgctgctggactccctcacaatgaaattgctgctcagatctgtcgtcaggctggccttgtgaagacattggagaaaggaaagcatgcagagggtggtgaagatgacaactttgctattgtgtttgctgctatgggagtgaacatggaaacagctcaattcttcaaacgtgattttgaagagaacggttccatggaacgggtcaccctttttctgaatctggctaatgatcccaccattgaacgtattatcacccctcggattgctctaacaacagcagaatatttggcatatgaatgtgggaagcatgtacttgtcatcttgacagatatgagctcttatgcagacgcacttcgtgaggtttctgcagcccgagaagaggtgccaggtaggcgtggttatcctggatatatgtatactgatctggcaacaatatatgagcgtgctgggcgtattgaaggaagaacagggtccattacccaaattcctattctgacaatgcctaatgatgatatcacacacccaactccggaccttactggatacattactgagggacagatatacattgataggcagctccataacagacagatttatccacctatcaatgtcctgccatctctatctcgattgatgaagagtgctattggtgagggcatgacacgtagagaccattcggatgtgtctaatcagctttatgccaactacgcaattggaaaggatgttcaggccatgaaggcagtcgttggagaggaggcactctcgtctgaggatctgagttccttgacaagtttgagaggaagtttgtgacacaaggagcatacgacacacggaacatcttccagtcactagatcttgcatggacattgcttcggatcttccctcgcgaacttctccaccgtatcccggcgaagaccttggaccagtactatagcagagatgcctcccactgaatcactgatcgttgatcagtgttccaatagtttggcaagtgttgaataaattgaacagattggcttcatggccttttccctgtatttatgtgtagtcaggtccaattcttttctgttgatgagcgcaagtttttcgtagatgactcgcggtcacggcaatatttgtgatattgtgtcatctgtggactatggttaaatttcagttatttgttttctttcaccttccagaactgttagcaagagcattctggaccaggatgctcgaacacaactggctgtatgtacatttgtgaatggtgaataaagaaggggcaataaactgctgcgaaatatgtgctactgcctcaccagaagttctgtctaatgtgtgcgaagttgttatctgagggctcagttttgatgagaattctttgacgtgaagagaagaaaa

SEQ ID NO: 58591 - DNA, 2649 bp, Zea Mays
aaaacaagcgtctccctccaccggtccaccccccctctggctctctgcttctgcacctgcgtgtgctagcgcgagcgcgtgcgtcccttccccggcacgagcggcgcacaccgtcacatccgcgctccgttcgccttccagaaaatttaaaccccagcggagccggccacggccagtcagccgccacacggtctccgacgcgctgcccgctcgcctgccaaacccccaccccctcggcggcgatgctgacacgtcgccgtagcaaccacccgggctgctccttccccctcccgttcctcgtctgcggcctgctcctcgctgcggccgtcgcattttccccagctgcggccgccgaagcagctgacggcggcgctgggcacgagggccgcgcggggaaaccggaggtagaggccgaggcggaggcgcgcggggatggggttgccgtggcggaagccggcggcgaggtggtggctcagggcaatgccacggaggccaaggagggcagccttgccgacatgatcgaccgcgcgctggagaaggagttcccggagtccgagggcgagcagggcggtggagagaccgaccctggcagcttcaacaacacggtagctgagaagcagggagttcttgaaactgtagctagaagagtaacaaagaagaatgaaaccaaagataacaagtcatttccttttaaggaggttttcttggatcgaactgagcaagaggatgttcccacgttgatagatcggaaggataatgtttttatcatctcaaacccaaagtcaaaataccctgtgctgcagctggaccttaggttgatatcagatcttgttgttgttatcgtatccgctacatgtggtggaattgcctttgcttgccttgggcaaccggatctataattgggcctggaggttttagctttgtcaatgaaatggtgcaagttgaaacggtagcccagtttggtgtgatatttctcctgtttgcattgggacttgagttttctactgcaaaacttcgagttgttcgtgctgttgctgttctcggaggattgctccaaattatgttgttcatgtttctttgtggtattttggctaccctatgtggaggcaaaactaaagaaggtgtttttgttggtgttcttctctccatgtcttcaacagctgtcgttttaaagtttctgatggaaagaaatagtatcaatgctcttcatggccaggttacagtcgggatacttatattgcaggattgtgctgttggcctgctgtttgcgcttcttccaattttgagtggtacatctggccttcttcacggagttgcatcaatgatgaagtcgctggtggtattgataacattcctgaccattctctctatcctctcccgtaccggcgttccttggtttcttaaactgatgataagtctgtcatcacagacaaatgaactatatcagctggcagcagttgcattctgcttgttatttgcttggtgtagtgataagttgggcctgagtctcgagttgggttcttttgcagctggagtaatgatatcaacaacagaccttgcacaacatactcttgaacaaatcgaacccatccgcaactttttcgctgctcttttccttgccagcattgggatgctaattaatgtccatttcttgtggaaccatgtggatatactccttgcagcagtaattttggtgatcaccgtaaagacctttattgttgctattgttgtaaaagggtttgggtatagcaacaaaacatctcttcttgtcggcatgtcacttgcacaaataggagagtttgcttttgttctcttaagccgtgcttcaagtattcatctaatcgagggcaagctatacctgcttcttcttggaaccactgcacttagtttggtgacaacccctctgctattcaaaatgatccctgcaatggtccacctcggggttcttttgagatggttttctgtcgataccaatcaggtggagctgggcctgaaaaatgatgtcctccgcatcgatagcggcaagcgcataaatctgatagtccaaggctcacatgactcatgacacatttgacacactgcaagctactttttgtatggcttaagtttacaagctctgtaaagtgttttcacctgtactgaagagtttctagcagatatacgagggtggaggcaagagaactcaactcagatcttgctcctagtgcaagatcaatcctcccccgtcatgacggctgcaagggcaaagtcgggttttgccgttcttgagagcagtgtgtcttggatgattggtgcagtgagtggctgtcgaccccaaatgagggtctcgtgtaacatatgaatgtatggtgattaattaattggattagcatgataggatgtaggcctgatcctcagtaaaggttatgcccttgtgttctttcaccaaagttgtgtatcctcactacacgaaagtgtgtacgacatccatcagatcacgaattttgttgtgtagccatatatgtcagtttcttaacatgtccaagttcatgagtttttttttcctcacgggaagcttttgagtaacctttgttcagatatcactttgttggatcgagtccaggatctcaatgatgggtgtgtttcaatgaatttgttcactttttatta

SEQ ID NO: 58592 - DNA, 2689 bp, Zea Mays
aaacaagcgtctccctccaccggtccaccccccctctggctctctgcttctgcacctgcgtgtgctagcgcgagcgcgtgcgtcccttccccggcacgagcggcgcacaccgtcacatccgcgctccgttcgccttccagaaaatttaaaccccagcggagccggccacggccagtcagccgccacacggtctccgacgcgctgcccgctcgcctgccaaacccccaccccctcggcggcgatgctgacacgtcgccgtagcaaccacccgggctgctccttccccctcccgttcctcgtctgcggcctgctcctcgctgcggccgtcgcattttccccagctgcggccgccgaagcagctgacggcggcgctgggcacgagggccgcgcggggaaaccggaggtagaggccgaggcggaggcgcgcggggatggggttgccgtggcggaagccggcggcgaggtggtggctcagggcaatgccacggaggccaaggagggcagccttgccgacatgatcgaccgcgcgctggagaaggagttcccggagtccgagggcgagcagggcggtggagagaccgaccctggcagcttcaacaacacggtagctgagaagcagggagttcttgaaactgtagctagaagagtaacaaagaagaatgaaaccaaagataacaagtcatttccttttaaggaggttttcttggatcgaactgagcaagaggatgttcccacgttgatagatcggaaggataatgtttttatcatctcaaacccaaagtcaaaataccctgtgctgcagctggaccttaggttgatatcagatcttgttgttgttatcgtatccgctacatgtggtggaattgcctttgcttgccttgggcaaccggtgattacaggttatctacttgcaggatctataattgggcctggaggttttagctttgtcaatgaaatggtgcaagttgaaacggtagcccagtttggtgtgatatttctcctgtttgcattgggacttgagttttctactgcaaaacttcgagttgttcgtgctgttgctgttctcggaggattgctccaaattatgttgttcatgtttctttgtggtattttggctaccctatgtggaggcaaaactaaagaaggtgtttttgttggtgttcttctctccatgtcttcaacagctgtcgttttaaagtttctgatggaaagaaatagtatcaatgctcttcatggccaggttacagtcgggatacttatattgcaggattgtgctgttggcctgctgtttgcgcttcttccaattttgagtggtacatctggccttcttcacggagttgcatcaatgatgaagtcgctggtggtattgataacattcctgaccattctctctatcctctcccgtaccggcgttccttggtttcttaaactgatgataagtctgtcatcacagacaaatgaactatatcagctggcagcagttgcattctgcttgttatttgcttggtgtagtgataagttgggcctgagtctcgagttgggttcttttgcagctggagtaatgatatcaacaacagaccttgcacaacatactcttgaacaaatcgaacccatccgcaactttttcgctgctcttttccttgccagcattgggatgctaattaatgtccatttcttgtggaaccatgtggatatactccttgcagcagtaattttggtgatcaccgtaaagacctttattgttgctattgttgtaaaagggtttgggtatagcaacaaaacatctcttcttgtcggcatgtcacttgcacaaataggagagtttgcttttgttctcttaagccgtgcttcaagtattcatctaatcgagggcaagctatacctgcttcttcttggaaccactgcacttagtttggtgacaacccctctgctattcaaaatgatccctgcaatggtccacctcggggttcttttgagatggttttctgtcgataccaatcaggtggaggtacacgatcataccactgggcctgaaaaatgatgtcctccgcatcgatagcggcaagcgcataaatctgatagtccaaggctcacatgactcatgacacatttgacacactgcaagctactttttgtatggcttaagtttacaagctctgtaaagtgttttcacctgtactgaagagtttctagcagatatacgagggtggaggcaagagaactcaactcagatcttgctcctagtgcaagatcaatcctcccccgtcatgacggctgcaagggcaaagtcgggttttgccgttcttgagagcagtgtgtcttggatgattggtgcagtgagtggctgtcgaccccaaatgagggtctcgtgtaacatatgaatgtatggtgattaattaattggattagcatgataggatgtaggcctgatcctcagtaaaggttatgcccttgtgttctttcaccaaagttgtgtatcctcactacacgaaagtgtgtacgacatccatcagatcacgaattttgttgtgtagccatatatgtcagtttcttaacatgtccaagttcatgagtttttttttcctcacgggaagcttttgagtaacctttgttcagatatcactttgttggatcgagtccaggatctcaatgatgggtgtgtttcaatgaatttgttcactttttatta

SEQ ID NO: 58593 - DNA, 3027 bp, Zea Mays
ccaccggtccaccccccctctggctctctgcttctgcacctgcgtgtgctagcgcgagcgcgtgcgtcccttccccggcacgagcggcgcacaccgtcacatccgcgctccgttcgccttccagaaaatttaaaccccagcggagccggccacggccagtcagccgccacacggtctccgacgcgctgcccgctcgcctgccaaacccccaccccctcggcggcgatgctgacacgtcgccgtagcaaccacccgggctgctccttccccctcccgttcctcgtctgcggcctgctcctcgctgcggccgtcgcattttccccagctgcggccgccgaagcagctgacggcggcgctgggcacgagggccgcgcggggaaaccggaggtagaggccgaggcggaggcgcgcggggatggggttgccgtggcggaagccggcggcgaggtggtggctcagggcaatgccacggaggccaaggagggcagccttgccgacatgatcgaccgcgcgctggagaaggagttcccggagtccgagggcgagcagggcggtggagagaccgaccctggcagcttcaacaacacggtagctgagaagcagggagttcttgaaactgtagctagaagagtaacaaagaagaatgaaaccaaagataacaagtcatttccttttaaggaggttttcttggatcgaactgagcaagaggatgttcccacgttgatagatcggaaggataatgtttttatcatctcaaacccaaagtcaaaataccctgtgctgcagctggaccttaggttgatatcagatcttgttgttgttatcgtatccgctacatgtggtggaattgcctttgcttgccttgggcaaccggatctataattgggcctggaggttttagctttgtcaatgaaatggtgcaagttgaaacggtagcccagtttggtgtgatatttctcctgtttgcattgggacttgagttttctactgcaaaacttcgagttgttcgtgctgttgctgttctcggaggattgctccaaattatgttgttcatgtttctttgtggtattttggctaccctatgtggaggcaaaactaaagaaggtgtttttgttggtgttcttctctccatgtcttcaacagctgtcgttttaaagtttctgatggaaagaaatagtatcaatgctcttcatggccaggttacagtcgggatacttatattgcaggattgtgctgttggcctgctgtttgcgcttcttccaattttgagtggtacatctggccttcttcacggagttgcatcaatgatgaagtcgctggtggtattgataacattcctgaccattctctctatcctctcccgtaccggcgttccttggtttcttaaactgatgataagtctgtcatcacagacaaatgaactatatcagctggcagcagttgcattctgcttgttatttgcttggtgtagtgataagttgggcctgagtctcgagttgggttcttttgcagctggagtaatgatatcaacaacagaccttgcacaacatactcttgaacaagtaactttttacatgtaccttgcatgttttttctgtcccctttccaggaaaaggggggaattactatctactaccccctctttcaaaccacaggccactttagctttgttctaagtcaaacatctttgactttggccaaatattaaaaatacatcaacaaatgcacaaggcacgtttcatggataatttaatgaaatcaatttgatgttggagcattttctgtaaaccttgtgaaagttagagaagtttgacttatgagattgctgaattgatctataatttggaacggagaaagtctttagtttgatctttattttatgcttgagcaaactcatagctagactcttgtagttagtaattcattatattgttctcttatttcaggcttgttctttctgcagatcgaacccatccgcaactttttcgctgctcttttccttgccagcattgggatgctaattaatgtccatttcttgtggaaccatgtggatatactccttgcagcagtaattttggtgatcaccgtaaagacctttattgttgctattgttgtaaaagggtttgggtatagcaacaaaacatctcttcttgtcggcatgtcacttgcacaaataggagagtttgcttttgttctcttaagccgtgcttcaagtattcatctaatcgagggcaagctatacctgcttcttcttggaaccactgcacttagtttggtgacaacccctctgctattcaaaatgatccctgcaatggtccacctcggggttcttttgagatggttttctgtcgataccaatcagctgggcctgaaaaatgatgtcctccgcatcgatagcggcaagcgcataaatctgatagtccaaggctcacatgactcatgacacatttgacacactgcaagctactttttgtatggcttaagtttacaagctctgtaaagtgttttcacctgtactgaagagtttctagcagatatacgagggtggaggcaagagaactcaactcagatcttgctcctagtgcaagatcaatcctcccccgtcatgacggctgcaagggcaaagtcgggttttgccgttcttgagagcagtgtgtcttggatgattggtgcagtgagtggctgtcgaccccaaatgagggtctcgtgtaacatatgaatgtatggtgattaattaattggattagcatgataggatgtaggcctgatcctcagtaaaggttatgcccttgtgttctttcaccaaagttgtgtatcctcactacacgaaagtgtgtacgacatccatcagatcacgaattttgttgtgtagccatatatgtcagtttcttaacatgtccaagttcatgagtttttttttcctcacgggaagcttttgagtaacctttgttcagatatcactttgttggatcgagtccaggatctcaatgatgggtgtgtttcaatgaatttgttcactttttatta

SEQ ID NO: 58594 - DNA, 2650 bp, Zea Mays
caccggtccaccccccctctggctctctgcttctgcacctgcgtgtgctagcgcgagcgcgtgcgtcccttccccggcacgagcggcgcacaccgtcacatccgcgctccgttcgccttccagaaaatttaaaccccagcggagccggccacggccagtcagccgccacacggtctccgacgcgctgcccgctcgcctgccaaacccccaccccctcggcggcgatgctgacacgtcgccgtagcaaccacccgggctgctccttccccctcccgttcctcgtctgcggcctgctcctcgctgcggccgtcgcattttccccagctgcggccgccgaagcagctgacggcggcgctgggcacgagggccgcgcggggaaaccggaggtagaggccgaggcggaggcgcgcggggatggggttgccgtggcggaagccggcggcgaggtggtggctcagggcaatgccacggaggccaaggagggcagccttgccgacatgatcgaccgcgcgctggagaaggagttcccggagtccgagggcgagcagggcggtggagagaccgaccctggcagcttcaacaacacggtagctgagaagcagggagttcttgaaactgtagctagaagagtaacaaagaagaatgaaaccaaagataacaagtcatttccttttaaggaggttttcttggatcgaactgagcaagaggatgttcccacgttgatagatcggaaggataatgtttttatcatctcaaacccaaagtcaaaataccctgtgctgcagctggaccttaggttgatatcagatcttgttgttgttatcgtatccgctacatgtggtggaattgcctttgcttgccttgggcaaccggtgattacaggttatctacttgcaggatctataattgggcctggaggttttagctttgtcaatgaaatggtgcaagttgaaacggtagcccagtttggtgtgatatttctcctgtttgcattgggacttgagttttctactgcaaaacttcgagttgttcgtgctgttgctgttctcggaggattgctccaaattatgttgttcatgtttctttgtggtattttggctaccctatgtggaggcaaaactaaagaaggtgtttttgttggtgttcttctctccatgtcttcaacagctgtcgttttaaagtttctgatggaaagaaatagtatcaatgctcttcatggccaggttacagtcgggatacttatattgcaggattgtgctgttggcctgctgtttgcgcttcttccaattttgagtggtacatctggccttcttcacggagttgcatcaatgatgaagtcgctggtggtattgataacattcctgaccattctctctatcctctcccgtaccggcgttccttggtttcttaaactgatgataagtctgtcatcacagacaaatgaactatatcagctggcagcagttgcattctgcttgttatttgcttggtgtagtgataagttgggcctgagtctcgagttgggttcttttgcagctggagtaatgatatcaacaacagaccttgcacaacatactcttgaacaaatcgaacccatccgcaactttttcgctgctcttttccttgccagcattgggatgctaattaatgtccatttcttgtggaaccatgtggatatactccttgcagcagtaattttggtgatcaccgtaaagacctttattgttgctattgttgtaaaagggtttgggtatagcaacaaaacatctcttcttgtcggcatgtcacttgcacaaataggagagtttgcttttgttctcttaagccgtgcttcaagtattcatctaatcgagggcaagctatacctgcttcttcttggaaccactgcacttagtttggtgacaacccctctgctattcaaaatgatccctgcaatggtccacctcggggttcttttgagatggttttctgtcgataccaatcagctgggcctgaaaaatgatgtcctccgcatcgatagcggcaagcgcataaatctgatagtccaaggctcacatgactcatgacacatttgacacactgcaagctactttttgtatggcttaagtttacaagctctgtaaagtgttttcacctgtactgaagagtttctagcagatatacgagggtggaggcaagagaactcaactcagatcttgctcctagtgcaagatcaatcctcccccgtcatgacggctgcaagggcaaagtcgggttttgccgttcttgagagcagtgtgtcttggatgattggtgcagtgagtggctgtcgaccccaaatgagggtctcgtgtaacatatgaatgtatggtgattaattaattggattagcatgataggatgtaggcctgatcctcagtaaaggttatgcccttgtgttctttcaccaaagttgtgtatcctcactacacgaaagtgtgtacgacatccatcagatcacgaattttgttgtgtagccatatatgtcagtttcttaacatgtccaagttcatgagtttttttttcctcacgggaagcttttgagtaacctttgttcagatatcactttgttggatcgagtccaggatctcaatgatgggtgtgtttcaatgaatttgttcactttttatta

SEQ ID NO: 58595 - DNA, 3052 bp, Zea Mays
gtccaccccccctctggctctctgcttctgcacctgcgtgtgctagcgcgagcgcgtgcgtcccttccccggcacgagcggcgcacaccgtcacatccgcgctccgttcgccttccagaaaatttaaaccccagcggagccggccacggccagtcagccgccacacggtctccgacgcgctgcccgctcgcctgccaaacccccaccccctcggcggcgatgctgacacgtcgccgtagcaaccacccgggctgctccttccccctcccgttcctcgtctgcggcctgctcctcgctgcggccgtcgcattttccccagctgcggccgccgaagcagctgacggcggcgctgggcacgagggccgcgcggggaaaccggaggtagaggccgaggcggaggcgcgcggggatggggttgccgtggcggaagccggcggcgaggtggtggctcagggcaatgccacggaggccaaggagggcagccttgccgacatgatcgaccgcgcgctggagaaggagttcccggagtccgagggcgagcagggcggtggagagaccgaccctggcagcttcaacaacacggtagctgagaagcagggagttcttgaaactgtagctagaagagtaacaaagaagaatgaaaccaaagataacaagtcatttccttttaaggaggttttcttggatcgaactgagcaagaggatgttcccacgttgatagatcggaaggataatgtttttatcatctcaaacccaaagtcaaaataccctgtgctgcagctggaccttaggttgatatcagatcttgttgttgttatcgtatccgctacatgtggtggaattgcctttgcttgccttgggcaaccggtgattacaggttatctacttgcaggatctataattgggcctggaggttttagctttgtcaatgaaatggtgcaagttgaaacggtagcccagtttggtgtgatatttctcctgtttgcattgggacttgagttttctactgcaaaacttcgagttgttcgtgctgttgctgttctcggaggattgctccaaattatgttgttcatgtttctttgtggtattttggctaccctatgtggaggcaaaactaaagaaggtgtttttgttggtgttcttctctccatgtcttcaacagctgtcgttttaaagtttctgatggaaagaaatagtatcaatgctcttcatggccaggttacagtcgggatacttatattgcaggattgtgctgttggcctgctgtttgcgcttcttccaattttgagtggtacatctggccttcttcacggagttgcatcaatgatgaagtcgctggtggtattgataacattcctgaccattctctctatcctctcccgtaccggcgttccttggtttcttaaactgatgataagtctgtcatcacagacaaatgaactatatcagctggcagcagttgcattctgcttgttatttgcttggtgtagtgataagttgggcctgagtctcgagttgggttcttttgcagctggagtaatgatatcaacaacagaccttgcacaacatactcttgaacaagtaactttttacatgtaccttgcatgttttttctgtcccctttccaggaaaaggggggaattactatctactaccccctctttcaaaccacaggccactttagctttgttctaagtcaaacatctttgactttggccaaatattaaaaatacatcaacaaatgcacaaggcacgtttcatggataatttaatgaaatcaatttgatgttggagcattttctgtaaaccttgtgaaagttagagaagtttgacttatgagattgctgaattgatctataatttggaacggagaaagtctttagtttgatctttattttatgcttgagcaaactcatagctagactcttgtagttagtaattcattatattgttctcttatttcaggcttgttctttctgcagatcgaacccatccgcaactttttcgctgctcttttccttgccagcattgggatgctaattaatgtccatttcttgtggaaccatgtggatatactccttgcagcagtaattttggtgatcaccgtaaagacctttattgttgctattgttgtaaaagggtttgggtatagcaacaaaacatctcttcttgtcggcatgtcacttgcacaaataggagagtttgcttttgttctcttaagccgtgcttcaagtattcatctaatcgagggcaagctatacctgcttcttcttggaaccactgcacttagtttggtgacaacccctctgctattcaaaatgatccctgcaatggtccacctcggggttcttttgagatggttttctgtcgataccaatcaggtggagctgggcctgaaaaatgatgtcctccgcatcgatagcggcaagcgcataaatctgatagtccaaggctcacatgactcatgacacatttgacacactgcaagctactttttgtatggcttaagtttacaagctctgtaaagtgttttcacctgtactgaagagtttctagcagatatacgagggtggaggcaagagaactcaactcagatcttgctcctagtgcaagatcaatcctcccccgtcatgacggctgcaagggcaaagtcgggttttgccgttcttgagagcagtgtgtcttggatgattggtgcagtgagtggctgtcgaccccaaatgagggtctcgtgtaacatatgaatgtatggtgattaattaattggattagcatgataggatgtaggcctgatcctcagtaaaggttatgcccttgtgttctttcaccaaagttgtgtatcctcactacacgaaagtgtgtacgacatccatcagatcacgaattttgttgtgtagccatatatgtcagtttcttaacatgtccaagttcatgagtttttttttcctcacgggaagcttttgagtaacctttgttcagatatcactttgttggatcgagtccaggatctcaatgatgggtgtgtttcaatgaatttgttcactttttatta

SEQ ID NO: 58596 - DNA, 2658 bp, Zea Mays
cctctggctctctgcttctgcacctgcgtgtgctagcgcgagcgcgtgcgtcccttccccggcacgagcggcgcacaccgtcacatccgcgctccgttcgccttccagaaaatttaaaccccagcggagccggccacggccagtcagccgccacacggtctccgacgcgctgcccgctcgcctgccaaacccccaccccctcggcggcgatgctgacacgtcgccgtagcaaccacccgggctgctccttccccctcccgttcctcgtctgcggcctgctcctcgctgcggccgtcgcattttccccagctgcggccgccgaagcagctgacggcggcgctgggcacgagggccgcgcggggaaaccggaggtagaggccgaggcggaggcgcgcggggatggggttgccgtggcggaagccggcggcgaggtggtggctcagggcaatgccacggaggccaaggagggcagccttgccgacatgatcgaccgcgcgctggagaaggagttcccggagtccgagggcgagcagggcggtggagagaccgaccctggcagcttcaacaacacggtagctgagaagcagggagttcttgaaactgtagctagaagagtaacaaagaagaatgaaaccaaagataacaagtcatttccttttaaggaggttttcttggatcgaactgagcaagaggatgttcccacgttgatagatcggaaggataatgtttttatcatctcaaacccaaagtcaaaataccctgtgctgcagctggaccttaggttgatatcagatcttgttgttgttatcgtatccgctacatgtggtggaattgcctttgcttgccttgggcaaccggtgattacaggttatctacttgcaggatctataattgggcctggaggttttagctttgtcaatgaaatggtgcaagttgaaacggtagcccagtttggtgtgatatttctcctgtttgcattgggacttgagttttctactgcaaaacttcgagttgttcgtgctgttgctgttctcggaggattgctccaaattatgttgttcatgtttctttgtggtattttggctaccctatgtggaggcaaaactaaagaaggtgtttttgttggtgttcttctctccatgtcttcaacagctgtcgttttaaagtttctgatggaaagaaatagtatcaatgctcttcatggccaggttacagtcgggatacttatattgcaggattgtgctgttggcctgctgtttgcgcttcttccaattttgagtggtacatctggccttcttcacggagttgcatcaatgatgaagtcgctggtggtattgataacattcctgaccattctctctatcctctcccgtaccggcgttccttggtttcttaaactgatgataagtctgtcatcacagacaaatgaactatatcagctggcagcagttgcattctgcttgttatttgcttggtgtagtgataagttgggcctgagtctcgagttgggttcttttgcagctggagtaatgatatcaacaacagaccttgcacaacatactcttgaacaagcttgttctttctgcagatcgaacccatccgcaactttttcgctgctcttttccttgccagcattgggatgctaattaatgtccatttcttgtggaaccatgtggatatactccttgcagcagtaattttggtgatcaccgtaaagacctttattgttgctattgttgtaaaagggtttgggtatagcaacaaaacatctcttcttgtcggcatgtcacttgcacaaataggagagtttgcttttgttctcttaagccgtgcttcaagtattcatctaatcgagggcaagctatacctgcttcttcttggaaccactgcacttagtttggtgacaacccctctgctattcaaaatgatccctgcaatggtccacctcggggttcttttgagatggttttctgtcgataccaatcaggtggagctgggcctgaaaaatgatgtcctccgcatcgatagcggcaagcgcataaatctgatagtccaaggctcacatgactcatgacacatttgacacactgcaagctactttttgtatggcttaagtttacaagctctgtaaagtgttttcacctgtactgaagagtttctagcagatatacgagggtggaggcaagagaactcaactcagatcttgctcctagtgcaagatcaatcctcccccgtcatgacggctgcaagggcaaagtcgggttttgccgttcttgagagcagtgtgtcttggatgattggtgcagtgagtggctgtcgaccccaaatgagggtctcgtgtaacatatgaatgtatggtgattaattaattggattagcatgataggatgtaggcctgatcctcagtaaaggttatgcccttgtgttctttcaccaaagttgtgtatcctcactacacgaaagtgtgtacgacatccatcagatcacgaattttgttgtgtagccatatatgtcagtttcttaacatgtccaagttcatgagtttttttttcctcacgggaagcttttgagtaacctttgttcagatatcactttgttggatcgagtccaggatctcaatgatgggtgtgtttcaatgaatttgttcactttttatta

SEQ ID NO: 58597 - DNA, 3049 bp, Zea Mays
ctctgcttctgcacctgcgtgtgctagcgcgagcgcgtgcgtcccttccccggcacgagcggcgcacaccgtcacatccgcgctccgttcgccttccagaaaatttaaaccccagcggagccggccacggccagtcagccgccacacggtctccgacgcgctgcccgctcgcctgccaaacccccaccccctcggcggcgatgctgacacgtcgccgtagcaaccacccgggctgctccttccccctcccgttcctcgtctgcggcctgctcctcgctgcggccgtcgcattttccccagctgcggccgccgaagcagctgacggcggcgctgggcacgagggccgcgcggggaaaccggaggtagaggccgaggcggaggcgcgcggggatggggttgccgtggcggaagccggcggcgaggtggtggctcagggcaatgccacggaggccaaggagggcagccttgccgacatgatcgaccgcgcgctggagaaggagttcccggagtccgagggcgagcagggcggtggagagaccgaccctggcagcttcaacaacacggtagctgagaagcagggagttcttgaaactgtagctagaagagtaacaaagaagaatgaaaccaaagataacaagtcatttccttttaaggaggttttcttggatcgaactgagcaagaggatgttcccacgttgatagatcggaaggataatgtttttatcatctcaaacccaaagtcaaaataccctgtgctgcagctggaccttaggttgatatcagatcttgttgttgttatcgtatccgctacatgtggtggaattgcctttgcttgccttgggcaaccggtgattacaggttatctacttgcaggatctataattgggcctggaggttttagctttgtcaatgaaatggtgcaagttgaaacggtagcccagtttggtgtgatatttctcctgtttgcattgggacttgagttttctactgcaaaacttcgagttgttcgtgctgttgctgttctcggaggattgctccaaattatgttgttcatgtttctttgtggtattttggctaccctatgtggaggcaaaactaaagaaggtgtttttgttggtgttcttctctccatgtcttcaacagctgtcgttttaaagtttctgatggaaagaaatagtatcaatgctcttcatggccaggttacagtcgggatacttatattgcaggattgtgctgttggcctgctgtttgcgcttcttccaattttgagtggtacatctggccttcttcacggagttgcatcaatgatgaagtcgctggtggtattgataacattcctgaccattctctctatcctctcccgtaccggcgttccttggtttcttaaactgatgataagtctgtcatcacagacaaatgaactatatcagctggcagcagttgcattctgcttgttatttgcttggtgtagtgataagttgggcctgagtctcgagttgggttcttttgcagctggagtaatgatatcaacaacagaccttgcacaacatactcttgaacaagtaactttttacatgtaccttgcatgttttttctgtcccctttccaggaaaaggggggaattactatctactaccccctctttcaaaccacaggccactttagctttgttctaagtcaaacatctttgactttggccaaatattaaaaatacatcaacaaatgcacaaggcacgtttcatggataatttaatgaaatcaatttgatgttggagcattttctgtaaaccttgtgaaagttagagaagtttgacttatgagattgctgaattgatctataatttggaacggagaaagtctttagtttgatctttattttatgcttgagcaaactcatagctagactcttgtagttagtaattcattatattgttctcttatttcaggcttgttctttctgcagatcgaacccatccgcaactttttcgctgctcttttccttgccagcattgggatgctaattaatgtccatttcttgtggaaccatgtggatatactccttgcagcagtaattttggtgatcaccgtaaagacctttattgttgctattgttgtaaaagggtttgggtatagcaacaaaacatctcttcttgtcggcatgtcacttgcacaaataggagagtttgcttttgttctcttaagccgtgcttcaagtattcatctaatcgagggcaagctatacctgcttcttcttggaaccactgcacttagtttggtgacaacccctctgctattcaaaatgatccctgcaatggtccacctcggggttcttttgagatggttttctgtcgataccaatcaggtggaggtacacgatcataccactgggcctgaaaaatgatgtcctccgcatcgatagcggcaagcgcataaatctgatagtccaaggctcacatgactcatgacacatttgacacactgcaagctactttttgtatggcttaagtttacaagctctgtaaagtgttttcacctgtactgaagagtttctagcagatatacgagggtggaggcaagagaactcaactcagatcttgctcctagtgcaagatcaatcctcccccgtcatgacggctgcaagggcaaagtcgggttttgccgttcttgagagcagtgtgtcttggatgattggtgcagtgagtggctgtcgaccccaaatgagggtctcgtgtaacatatgaatgtatggtgattaattaattggattagcatgataggatgtaggcctgatcctcagtaaaggttatgcccttgtgttctttcaccaaagttgtgtatcctcactacacgaaagtgtgtacgacatccatcagatcacgaattttgttgtgtagccatatatgtcagtttcttaacatgtccaagttcatgagtttttttttcctcacgggaagcttttgagtaacctttgttcagatatcactttgttggatcgagtccaggatctcaatgatgggtgtgtttcaatgaatttgttcactttttatta

SEQ ID NO: 58598 - DNA, 3052 bp, Zea Mays
gcgagcgcgtgcgtcccttccccggcacgagcggcgcacaccgtcacatccgcgctccgttcgccttccagaaaatttaaaccccagcggagccggccacggccagtcagccgccacacggtctccgacgcgctgcccgctcgcctgccaaacccccaccccctcggcggcgatgctgacacgtcgccgtagcaaccacccgggctgctccttccccctcccgttcctcgtctgcggcctgctcctcgctgcggccgtcgcattttccccagctgcggccgccgaagcagctgacggcggcgctgggcacgagggccgcgcggggaaaccggaggtagaggccgaggcggaggcgcgcggggatggggttgccgtggcggaagccggcggcgaggtggtggctcagggcaatgccacggaggccaaggagggcagccttgccgacatgatcgaccgcgcgctggagaaggagttcccggagtccgagggcgagcagggcggtggagagaccgaccctggcagcttcaacaacacggtagctgagaagcagggagttcttgaaactgtagctagaagagtaacaaagaagaatgaaaccaaagataacaagtcatttccttttaaggaggttttcttggatcgaactgagcaagaggatgttcccacgttgatagatcggaaggataatgtttttatcatctcaaacccaaagtcaaaataccctgtgctgcagctggaccttaggttgatatcagatcttgttgttgttatcgtatccgctacatgtggtggaattgcctttgcttgccttgggcaaccggatctataattgggcctggaggttttagctttgtcaatgaaatggtgcaagttgaaacggtagcccagtttggtgtgatatttctcctgtttgcattgggacttgagttttctactgcaaaacttcgagttgttcgtgctgttgctgttctcggaggattgctccaaattatgttgttcatgtttctttgtgctatgtggaggcaaaactaaagaaggtgtttttgttggtgttcttctctccatgtcttcaacagctgtcgttttaaagtttctgatggaaagaaatagtatcaatgctcttcatggccaggttacagtcgggatacttatattgcaggattgtgctgttggcctgctgtttgcgcttcttccaattttgagtggtacatctggccttcttcacggagttgcatcaatgatgaagtcgctggtggtattgataacattcctgaccattctctctatcctctcccgtaccggcgttccttggtttcttaaactgatgataagtctgtcatcacagacaaatgaactatatcagctggcagcagttgcattctgcttgttatttgcttggtgtagtgataagttgggcctgagtctcgagttgggttcttttgcagctggagtaatgatatcaacaacagaccttgcacaacatactcttgaacaagtaactttttacatgtaccttgcatgttttttctgtcccctttccaggaaaaggggggaattactatctactaccccctctttcaaaccacaggccactttagctttgttctaagtcaaacatctttgactttggccaaatattaaaaatacatcaacaaatgcacaaggcacgtttcatggataatttaatgaaatcaatttgatgttggagcattttctgtaaaccttgtgaaagttagagaagtttgacttatgagattgctgaattgatctataatttggaacggagaaagtctttagtttgatctttattttatgcttgagcaaactcatagctagactcttgtagttagtaattcattatattgttctcttatttcaggcttgttctttctgcagatcgaacccatccgcaactttttcgctgctcttttccttgccagcattgggatgctaattaatgtccatttcttgtggaaccatgtggatatactccttgcagcagtaattttggtgatcaccgtaaagacctttattgttgctattgttgtaaaagggtttgggtatagcaacaaaacatctcttcttgtcggcatgtcacttgcacaaataggagagtttgcttttgttctcttaagccgtgcttcaagtattcatctaatcgagggcaagctatacctgcttcttcttggaaccactgcacttagtttggtgacaacccctctgctattcaaaatgatccctgcaatggtccacctcggggttcttttgagatggttttctgtcgataccaatcaggtggaggtacacgatcataccagttgagttcattgatggattgctttactctagaatgtttgccaatcaattcatcggttcttccttttcagctgggcctgaaaaatgatgtcctccgcatcgatagcggcaagcgcataaatctgatagtccaaggctcacatgactcatgacacatttgacacactgcaagctactttttgtatggcttaagtttacaagctctgtaaagtgttttcacctgtactgaagagtttctagcagatatacgagggtggaggcaagagaactcaactcagatcttgctcctagtgcaagatcaatcctcccccgtcatgacggctgcaagggcaaagtcgggttttgccgttcttgagagcagtgtgtcttggatgattggtgcagtgagtggctgtcgaccccaaatgagggtctcgtgtaacatatgaatgtatggtgattaattaattggattagcatgataggatgtaggcctgatcctcagtaaaggttatgcccttgtgttctttcaccaaagttgtgtatcctcactacacgaaagtgtgtacgacatccatcagatcacgaattttgttgtgtagccatatatgtcagtttcttaacatgtccaagttcatgagtttttttttcctcacgggaagcttttgagtaacctttgttcagatatcactttgttggatcgagtccaggatctcaatgatgggtgtgtttcaatgaatttgttcactttttatta

SEQ ID NO: 58599 - DNA, 2595 bp, Zea Mays
cccggcacgagcggcgcacaccgtcacatccgcgctccgttcgccttccagaaaatttaaaccccagcggagccggccacggccagtcagccgccacacggtctccgacgcgctgcccgctcgcctgccaaacccccaccccctcggcggcgatgctgacacgtcgccgtagcaaccacccgggctgctccttccccctcccgttcctcgtctgcggcctgctcctcgctgcggccgtcgcattttccccagctgcggccgccgaagcagctgacggcggcgctgggcacgagggccgcgcggggaaaccggaggtagaggccgaggcggaggcgcgcggggatggggttgccgtggcggaagccggcggcgaggtggtggctcagggcaatgccacggaggccaaggagggcagccttgccgacatgatcgaccgcgcgctggagaaggagttcccggagtccgagggcgagcagggcggtggagagaccgaccctggcagcttcaacaacacggtagctgagaagcagggagttcttgaaactgtagctagaagagtaacaaagaagaatgaaaccaaagataacaagtcatttccttttaaggaggttttcttggatcgaactgagcaagaggatgttcccacgttgatagatcggaaggataatgtttttatcatctcaaacccaaagtcaaaataccctgtgctgcagctggaccttaggttgatatcagatcttgttgttgttatcgtatccgctacatgtggtggaattgcctttgcttgccttgggcaaccggtgattacaggttatctacttgcaggatctataattgggcctggaggttttagctttgtcaatgaaatggtgcaagttgaaacggtagcccagtttggtgtgatatttctcctgtttgcattgggacttgagttttctactgcaaaacttcgagttgttcgtgctgttgctgttctcggaggattgctccaaattatgttgttcatgtttctttgtggtattttggctaccctatgtggaggcaaaactaaagaaggtgtttttgttggtgttcttctctccatgtcttcaacagctgtcgttttaaagtttctgatggaaagaaatagtatcaatgctcttcatggccaggttacagtcgggatacttatattgcaggattgtgctgttggcctgctgtttgcgcttcttccaattttgagtggtacatctggccttcttcacggagttgcatcaatgatgaagtcgctggtggtattgataacattcctgaccattctctctatcctctcccgtaccggcgttccttggtttcttaaactgatgataagtctgtcatcacagacaaatgaactatatcagctggcagcagttgcattctgcttgttatttgcttggtgtagtgataagttgggcctgagtctcgagttgggttcttttgcagctggagtaatgatatcaacaacagaccttgcacaacatactcttgaacaagcttgttctttctgcagatcgaacccatccgcaactttttcgctgctcttttccttgccagcattgggatgctaattaatgtccatttcttgtggaaccatgtggatatactccttgcagcagtaattttggtgatcaccgtaaagacctttattgttgctattgttgtaaaagggtttgggtatagcaacaaaacatctcttcttgtcggcatgtcacttgcacaaataggagagtttgcttttgttctcttaagccgtgcttcaagtattcatctaatcgagggcaagctatacctgcttcttcttggaaccactgcacttagtttggtgacaacccctctgctattcaaaatgatccctgcaatggtccacctcggggttcttttgagatggttttctgtcgataccaatcagctgggcctgaaaaatgatgtcctccgcatcgatagcggcaagcgcataaatctgatagtccaaggctcacatgactcatgacacatttgacacactgcaagctactttttgtatggcttaagtttacaagctctgtaaagtgttttcacctgtactgaagagtttctagcagatatacgagggtggaggcaagagaactcaactcagatcttgctcctagtgcaagatcaatcctcccccgtcatgacggctgcaagggcaaagtcgggttttgccgttcttgagagcagtgtgtcttggatgattggtgcagtgagtggctgtcgaccccaaatgagggtctcgtgtaacatatgaatgtatggtgattaattaattggattagcatgataggatgtaggcctgatcctcagtaaaggttatgcccttgtgttctttcaccaaagttgtgtatcctcactacacgaaagtgtgtacgacatccatcagatcacgaattttgttgtgtagccatatatgtcagtttcttaacatgtccaagttcatgagtttttttttcctcacgggaagcttttgagtaacctttgttcagatatcactttgttggatcgagtccaggatctcaatgatgggtgtgtttcaatgaatttgttcactttttatta

SEQ ID NO: 58600 - DNA, 2920 bp, Zea Mays
cggtctccgacgcgctgcccgctcgcctgccaaacccccaccccctcggcggcgatgctgacacgtcgccgtagcaaccacccgggctgctccttccccctcccgttcctcgtctgcggcctgctcctcgctgcggccgtcgcattttccccagctgcggccgccgaagcagctgacggcggcgctgggcacgagggccgcgcggggaaaccggaggtagaggccgaggcggaggcgcgcggggatggggttgccgtggcggaagccggcggcgaggtggtggctcagggcaatgccacggaggccaaggagggcagccttgccgacatgatcgaccgcgcgctggagaaggagttcccggagtccgagggcgagcagggcggtggagttgcttgtgctaatctgagctctggttttgcagagaccgaccctggcagcttcaacaacacggtagctgagaagcagggagttcttgaaactgtagctagaagagtaacaaagaagaatgaaaccaaagataacaagtcatttccttttaaggaggttttcttggatcgaactgagcaagaggatgttcccacgttgatagatcggaaggataatgtttttatcatctcaaacccaaagtcaaaataccctgtgctgcagctggaccttaggttgatatcagatcttgttgttgttatcgtatccgctacatgtggtggaattgcctttgcttgccttgggcaaccggtgattacaggttatctacttgcaggatctataattgggcctggaggttttagctttgtcaatgaaatggtgcaagttgaaacggtagcccagtttggtgtgatatttctcctgtttgcattgggacttgagttttctactgcaaaacttcgagttgttcgtgctgttgctgttctcggaggattgctccaaattatgttgttcatgtttctttgtggtattttggctaccctatgtggaggcaaaactaaagaaggtgtttttgttggtgttcttctctccatgtcttcaacagctgtcgttttaaagtttctgatggaaagaaatagtatcaatgctcttcatggccaggttacagtcgggatacttatattgcaggattgtgctgttggcctgctgtttgcgcttcttccaattttgagtggtacatctggccttcttcacggagttgcatcaatgatgaagtcgctggtggtattgataacattcctgaccattctctctatcctctcccgtaccggcgttccttggtttcttaaactgatgataagtctgtcatcacagacaaatgaactatatcagctggcagcagttgcattctgcttgttatttgcttggtgtagtgataagttgggcctgagtctcgagttgggttcttttgcagctggagtaatgatatcaacaacagaccttgcacaacatactcttgaacaagtaactttttacatgtaccttgcatgttttttctgtcccctttccaggaaaaggggggaattactatctactaccccctctttcaaaccacaggccactttagctttgttctaagtcaaacatctttgactttggccaaatattaaaaatacatcaacaaatgcacaaggcacgtttcatggataatttaatgaaatcaatttgatgttggagcattttctgtaaaccttgtgaaagttagagaagtttgacttatgagattgctgaattgatctataatttggaacggagaaagtctttagtttgatctttattttatgcttgagcaaactcatagctagactcttgtagttagtaattcattatattgttctcttatttcaggcttgttctttctgcagatcgaacccatccgcaactttttcgctgctcttttccttgccagcattgggatgctaattaatgtccatttcttgtggaaccatgtggatatactccttgcagcagtaattttggtgatcaccgtaaagacctttattgttgctattgttgtaaaagggtttgggtatagcaacaaaacatctcttcttgtcggcatgtcacttgcacaaataggagagtttgcttttgttctcttaagccgtgcttcaagtattcatctaatcgagggcaagctatacctgcttcttcttggaaccactgcacttagtttggtgacaacccctctgctattcaaaatgatccctgcaatggtccacctcggggttcttttgagatggttttctgtcgataccaatcaggtggagctgggcctgaaaaatgatgtcctccgcatcgatagcggcaagcgcataaatctgatagtccaaggctcacatgactcatgacacatttgacacactgcaagctactttttgtatggcttaagtttacaagctctgtaaagtgttttcacctgtactgaagagtttctagcagatatacgagggtggaggcaagagaactcaactcagatcttgctcctagtgcaagatcaatcctcccccgtcatgacggctgcaagggcaaagtcgggttttgccgttcttgagagcagtgtgtcttggatgattggtgcagtgagtggctgtcgaccccaaatgagggtctcgtgtaacatatgaatgtatggtgattaattaattggattagcatgataggatgtaggcctgatcctcagtaaaggttatgcccttgtgttctttcaccaaagttgtgtatcctcactacacgaaagtgtgtacgacatccatcagatcacgaattttgttgtgtagccatatatgtcagtttcttaacatgtccaagttcatgagtttttttttcctcacgggaagcttttgagtaacctttgttcagatatcactttgttggatcgagtccaggatctcaatgatgggtgtgtttcaatgaatttgttcactttttatta

SEQ ID NO: 58601 - DNA, 2530 bp, Zea Mays
cggtctccgacgcgctgcccgctcgcctgccaaacccccaccccctcggcggcgatgctgacacgtcgccgtagcaaccacccgggctgctccttccccctcccgttcctcgtctgcggcctgctcctcgctgcggccgtcgcattttccccagctgcggccgccgaagcagctgacggcggcgctgggcacgagggccgcgcggggaaaccggaggtagaggccgaggcggaggcgcgcggggatggggttgccgtggcggaagccggcggcgaggtggtggctcagggcaatgccacggaggccaaggagggcagccttgccgacatgatcgaccgcgcgctggagaaggagttcccggagtccgagggcgagcagggcggtggagttgcttgtgctaatctgagctctggttttgcagagaccgaccctggcagcttcaacaacacggtagctgagaagcagggagttcttgaaactgtagctagaagagtaacaaagaagaatgaaaccaaagataacaagtcatttccttttaaggaggttttcttggatcgaactgagcaagaggatgttcccacgttgatagatcggaaggataatgtttttatcatctcaaacccaaagtcaaaataccctgtgctgcagctggaccttaggttgatatcagatcttgttgttgttatcgtatccgctacatgtggtggaattgcctttgcttgccttgggcaaccggtgattacaggttatctacttgcaggatctataattgggcctggaggttttagctttgtcaatgaaatggtgcaagttgaaacggtagcccagtttggtgtgatatttctcctgtttgcattgggacttgagttttctactgcaaaacttcgagttgttcgtgctgttgctgttctcggaggattgctccaaattatgttgttcatgtttctttgtggtattttggctaccctatgtggaggcaaaactaaagaaggtgtttttgttggtgttcttctctccatgtcttcaacagctgtcgttttaaagtttctgatggaaagaaatagtatcaatgctcttcatggccaggttacagtcgggatacttatattgcaggattgtgctgttggcctgctgtttgcgcttcttccaattttgagtggtacatctggccttcttcacggagttgcatcaatgatgaagtcgctggtggtattgataacattcctgaccattctctctatcctctcccgtaccggcgttccttggtttcttaaactgatgataagtctgtcatcacagacaaatgaactatatcagctggcagcagttgcattctgcttgttatttgcttggtgtagtgataagttgggcctgagtctcgagttgggttcttttgcagctggagtaatgatatcaacaacagaccttgcacaacatactcttgaacaagcttgttctttctgcagatcgaacccatccgcaactttttcgctgctcttttccttgccagcattgggatgctaattaatgtccatttcttgtggaaccatgtggatatactccttgcagcagtaattttggtgatcaccgtaaagacctttattgttgctattgttgtaaaagggtttgggtatagcaacaaaacatctcttcttgtcggcatgtcacttgcacaaataggagagtttgcttttgttctcttaagccgtgcttcaagtattcatctaatcgagggcaagctatacctgcttcttcttggaaccactgcacttagtttggtgacaacccctctgctattcaaaatgatccctgcaatggtccacctcggggttcttttgagatggttttctgtcgataccaatcagctgggcctgaaaaatgatgtcctccgcatcgatagcggcaagcgcataaatctgatagtccaaggctcacatgactcatgacacatttgacacactgcaagctactttttgtatggcttaagtttacaagctctgtaaagtgttttcacctgtactgaagagtttctagcagatatacgagggtggaggcaagagaactcaactcagatcttgctcctagtgcaagatcaatcctcccccgtcatgacggctgcaagggcaaagtcgggttttgccgttcttgagagcagtgtgtcttggatgattggtgcagtgagtggctgtcgaccccaaatgagggtctcgtgtaacatatgaatgtatggtgattaattaattggattagcatgataggatgtaggcctgatcctcagtaaaggttatgcccttgtgttctttcaccaaagttgtgtatcctcactacacgaaagtgtgtacgacatccatcagatcacgaattttgttgtgtagccatatatgtcagtttcttaacatgtccaagttcatgagtttttttttcctcacgggaagcttttgagtaacctttgttcagatatcactttgttggatcgagtccaggatctcaatgatgggtgtgtttcaatgaatttgttcactttttatta

SEQ ID NO: 58602 - DNA, 2509 bp, Zea Mays
cggtctccgacgcgctgcccgctcgcctgccaaacccccaccccctcggcggcgatgctgacacgtcgccgtagcaaccacccgggctgctccttccccctcccgttcctcgtctgcggcctgctcctcgctgcggccgtcgcattttccccagctgcggccgccgaagcagctgacggcggcgctgggcacgagggccgcgcggggaaaccggaggtagaggccgaggcggaggcgcgcggggatggggttgccgtggcggaagccggcggcgaggtggtggctcagggcaatgccacggaggccaaggagggcagccttgccgacatgatcgaccgcgcgctggagaaggagttcccggagtccgagggcgagcagggcggtggagttgcttgtgctaatctgagctctggttttgcagagaccgaccctggcagcttcaacaacacggtagctgagaagcagggagttcttgaaactgtagctagaagagtaacaaagaagaatgaaaccaaagataacaagtcatttccttttaaggaggttttcttggatcgaactgagcaagaggatgttcccacgttgatagatcggaaggataatgtttttatcatctcaaacccaaagtcaaaataccctgtgctgcagctggaccttaggttgatatcagatcttgttgttgttatcgtatccgctacatgtggtggaattgcctttgcttgccttgggcaaccggtgattacaggttatctacttgcaggatctataattgggcctggaggttttagctttgtcaatgaaatggtgcaagttgaaacggtagcccagtttggtgtgatatttctcctgtttgcattgggacttgagttttctactgcaaaacttcgagttgttcgtgctgttgctgttctcggaggattgctccaaattatgttgttcatgtttctttgtggtattttggctaccctatgtggaggcaaaactaaagaaggtgtttttgttggtgttcttctctccatgtcttcaacagctgtcgttttaaagtttctgatggaaagaaatagtatcaatgctcttcatggccaggttacagtcgggatacttatattgcaggattgtgctgttggcctgctgtttgcgcttcttccaattttgagtggtacatctggccttcttcacggagttgcatcaatgatgaagtcgctggtggtattgataacattcctgaccattctctctatcctctcccgtaccggcgttccttggtttcttaaactgatgataagtctgtcatcacagacaaatgaactatatcagctggcagcagttgcattctgcttgttatttgcttggatcgaacccatccgcaactttttcgctgctcttttccttgccagcattgggatgctaattaatgtccatttcttgtggaaccatgtggatatactccttgcagcagtaattttggtgatcaccgtaaagacctttattgttgctattgttgtaaaagggtttgggtatagcaacaaaacatctcttcttgtcggcatgtcacttgcacaaataggagagtttgcttttgttctcttaagccgtgcttcaagtattcatctaatcgagggcaagctatacctgcttcttcttggaaccactgcacttagtttggtgacaacccctctgctattcaaaatgatccctgcaatggtccacctcggggttcttttgagatggttttctgtcgataccaatcaggtggaggtacacgatcataccagttgagttcattgatggattgctttactctagaatgtttgccaatcaattcatcggttcttccttttcagctgggcctgaaaaatgatgtcctccgcatcgatagcggcaagcgcataaatctgatagtccaaggctcacatgactcatgacacatttgacacactgcaagctactttttgtatggcttaagtttacaagctctgtaaagtgttttcacctgtactgaagagtttctagcagatatacgagggtggaggcaagagaactcaactcagatcttgctcctagtgcaagatcaatcctcccccgtcatgacggctgcaagggcaaagtcgggttttgccgttcttgagagcagtgtgtcttggatgattggtgcagtgagtggctgtcgaccccaaatgagggtctcgtgtaacatatgaatgtatggtgattaattaattggattagcatgataggatgtaggcctgatcctcagtaaaggttatgcccttgtgttctttcaccaaagttgtgtatcctcactacacgaaagtgtgtacgacatccatcagatcacgaattttgttgtgtagccatatatgtcagtttcttaacatgtccaagttcatgagtttttttttcctcacgggaagcttttgagtaacctttgttcagatatcactttgttggatcgagtccaggatctcaatgatgggtgtgtttcaatgaatttgttcactttttatta

SEQ ID NO: 58603 - DNA, 5222 bp, Zea Mays
cccgctcactccgagtctcactctcactccgtcctccctcttccttacagaaacacaactcatgcagctcgtacggcaccaccaccaccaccaccaactgccgcactgacacatgcatgcgcagaaagcagctagctagcggccggtggccttgagagccgctcgctagcttttaaaattagccaccaattcaatctctagctagcttgggggagctccgttcctagctacacgtacgggcggcgcggcaaccaccagccgtgtagccgacctagtacgttggagcgaagcatatatcggcggccgcatcacatggagagcgcgatggagaaggtgtgggagtcggggcggcggatgagccggagcatcgggcggggcatgggcatggaggcgtggggcgtcgacgacgccttcgtgccgcagcacggctcccggtcccggggcggcggcggcggcggcggcgacgacgacgaggaggcgctgcgctgggcggccatcgagcgcctgcccacctacagccgcgtgcgcaccgccatcctgtccaccgagaacgccgccgtggttgacgacgacgacgacaagacgcggcggccgccgccgccgcagcagcagcacttcaaggaggtggacgtgaggaagctcggcgtcggcgagcgccaggagttcatcgagcgcgtcttccgcgtcgccgaggaggacaaccagcggttcctccagaagctccgcaaccgcatcgacagggtgggcatcgagctgccgacggtggaggtgcggttcgagcggctgacggtggaggccaggtgccacgtgggcagccgcgcgctgccgacgctgctgaacacggcgcgcaacgtcgcggaggcggcgctgggcctgtgcggcgtgcggctggggggccggcaggccaggctgaccatcctcagggacgtgtccggcgccgtccgcccgtccaggatgacgctgctgcttggcccgccgtcgtccgggaagaccacgctgctgctggccctcgcgggcaagctggacccggcgctggtcgtcgccggcggcggcgaggtctcctacaacgggttccgcctcggcgagttcgtgccgcagaagacggcggcgtacatcagccagacggacgtgcacgtcggcgagatgacggtcaaggagacgctcgacttctccgcccggtgccagggcgtcggcaccaaatacgatcttatgacggagctggccaggagggagaagggggccggcatccggccggagcctgaagtcgacctcttcatgaaggcgacttcaatggaaggagtggagaacagcctccagacggattacactctcaggatactggggctggacatctgcgccgacaccatcgtcggcgaccagatgcagcgggggatctctggcggccagaagaagcgcgtcaccacaggggagatgatcgttggcccgaccaaggtgctgttcatggacgagatatcaactgggctggacagctccacgacgttccagatcgtcaaatgtctccagcagattgtgcacctgggcgaggccaccatcctcatgtccctcctccagccagcccccgagaccttcgacctgttcgatgacatcatcctgctgtcggaaggccagatcgtttaccagggacctcgtgaatacgtcctcgagttcttcgactcctgcgggttctgctgccccgagcgcaagggcactgcggacttccttcaggaggtaacatcaaggaaggaccaggagcagtactgggcggacaagcagatgccttacagatacgtttcggtgccagaatttgcgcagcggtttaaacggttccatgtcgggctccagcttgagaaccacctctcgctgccgtttgacaagagcaggtgccatcaggctgccctcgtattctcgaagcactcggtgtcgacaaccgaactcctcaaggcatcctttgacaaggagtggctcctcatcaagcgcaattcatttgtgtacatcttcaagaccatacagcttatcattgtagccctcatcgcgtcaacggtgtttctgagaactcacatgcatacgacgaatctagatgatggctttgtttacattggagcactgctctttactctgattgtgaatatgttcaatggttttgctgagctttccttgaccataacaaggttgccggttttctacaagcaccgggacctgctcttctatcctgcttgggtcttcacagtaccgaacgtcattctcagaatcccattctccattattgaatctatagtatgggttcttgtgacatattacaccatagggtttgctccagatgctgacaggtttttcaagcacttgctgctcgtgttcttgatccagcaaatggcaggtgggcttttcagagcaacagctggactttgcaggtccatgatcattgctcaaactggtggagcactatttcttcttatcttctttgttcttggaggctttgtcctgcctaaagttttcattcctaactggtggatctggggctactggatctcacccttgatgtatggatacaatgctctagctgttaatgaattctatgcccctcggtggatgaataagtttgtcctggaccaaaatggtgttcccaaaagactggggatagctatgcttgaaggtgccaacatctttgttgacaaaaactggtactggattggagcagcagggctcttgggtttcaccatcttcttcaatgtccttttcacactgtcgcttatgtacctgaaccctctcggcaagccacaagctgttatatcagaagaaactgcaaaggaagcggaaggcaacgggcattcaaaaggggcaataagaaatggaagcacaaaaccaaaggacggtagtcataacaaggaaatgaaggagatgaggttgagtgcacgtttgagcaactgttcatcaaatggggtttcacgactcatgtccattggcagcaatgaagctgctccaacaagaggaatggttcttccattcaaccctcttgctatgtcttttgataatgtgaactactatgttgacatgcctgcggaaatgaaacatcaaggagtgcaggatgacagactccaattgttgcgtgaggttacaggatcattcaggcctggagtgctgacagcacttatgggtgtcagtggagctggaaagactactcttatggatgttttggctggaagaaagactggggggtatattgaaggagacatcagaattgcaggctatcccaagaaccaagcaacattcgcaaggatttctggatactgcgagcaaaatgatatacattctcctcaggtcacagtaagggagtctttgatatactctgcctttttgcgccttcctggaaaaattggagatcaagaaataactgatgacataaagatgcaatttgtggatgaagttatggaactagtggagctcgacaatctgagggatgccttagttgggctaccaggaatcacagggctttcgacagagcaaagaaaaaggttgacaatagccgtggagctcgttgccaatccatcaatcatatttatggatgaaccaacatcagggcttgatgcaagagctgcagcaattgtcatgagaactgtgcggaacacagttgacactggacggacagttgtttgcacaatccatcagccaagcatcgacatctttgaatcttttgatgagttgctattgttgaaaagaggaggccaggtgatctactctgggaaattgggtcgcaactcccagaaaatggtggagtattttgaggcaattcctggagtgcctaaaataaaagataagtacaatcctgcaacgtggatgctcgaggtcagttcagttgcaactgaagtgcgactaaagatggattttgctaagtactatgaaacatcagatctgtataagcaaaacaaggtactggtgaaccagctgagtcaaccagagccaggaacatcagatctttatttccctacagagtactcgcaatccacaataggacagttcaaagcctgtctctggaagcaatggctgacttattggcgcagcccggattacaaccttgttagatattccttcactctgttagttgccttgcttctcggctccattttctggaggataggcaccaacatggaagatgcaaccactctcggtatggttattggagcaatgtacactgctgttatgtttatcggcatcaacaattgttcaactgtgcagccagttgtttcaattgaaagaacggtcttctacagagagagggctgctgggatgtactctgctatgccatatgccattgctcaggttgttatagagataccatatgtatttgtgcaaacaacgtactacaccctcattgtatacgccatgatgagcttccaatggacagctgtcaagttcttctggttcttcttcatttcctacttctccttcctctacttcacctactatggcatgatggctgtctcaatctccccaaaccatgaggttgcatccatcttcgcagcagctttcttttctctcttcaatctcttctcaggcttcttcattccgagaccgagaattcctggatggtggatctggtactactggatttgcccactggcatggacagtgtatgggctcatcgtgacacaatacggagacctggaagacctcatctcagtccctggagaaagtgagcagacgataagctactatgtaacacatcattttggataccacagggattttctgccggtcattgcgccggttctggtactctttgcagtattcttcgcgttcttgtacgcagtctgcatcaagaaactgaacttccagcaacgataagaacaagatatggcagcaaaagctcttgagagtttttttggaacattgccgtgtatatagggtattttgcacatcgcgttctcctttcattttttgagtccctttaatacattgtcgtgtatatagggtattctgcacatcgccaaatgtggtgaggtcttatacagatttctagccatttattgcaagagcaaaactatgatatttttccggatacacagaagagctacatattattatattaagaagagaggtctaacgtagacctgccacaagatataatcctctattggataagaggatataacactatcttcatctcctttacctatataaataggtctccttgtatcatgtaccacataatatctctttttcgtatc

SEQ ID NO: 58604 - DNA, 4870 bp, Zea Mays
cccgctcactccgagtctcactctcactccgtcctccctcttccttacagaaacacaactcatgcagctcgtacggcaccaccaccaccaccaccaactgccgcactgacacatgcatgcgcagaaagcagctagctagcggccggtggccttgagagccgctcgctagcttttaaaattagccaccaattcaatctctagctagcttgggggagctccgttcctagctacacgtacgggcggcgcggcaaccaccagccgtgtagccgacctagtacgttggagcgaagcatatatcggcggccgcatcacatggagagcgcgatggagaaggtgtgggagtcggggcggcggatgagccggagcatcgggcggggcatgggcatggaggcgtggggcgtcgacgacgccttcgtgccgcagcacggctcccggtcccggggcggcggcggcggcggcggcgacgacgacgaggaggcgctgcgctgggcggccatcgagcgcctgcccacctacagccgcgtgcgcaccgccatcctgtccaccgagaacgccgccgtggttgacgacgacgacgacaagacgcggcggccgccgccgccgcagcagcagcacttcaaggaggtggacgtgaggaagctcggcgtcggcgagcgccaggagttcatcgagcgcgtcttccgcgtcgccgaggaggacaaccagcggttcctccagaagctccgcaaccgcatcgacaggcgacttcaatggaaggagtggagaacagcctccagacggattacactctcaggatactggggctggacatctgcgccgacaccatcgtcggcgaccagatgcagcgggggatctctggcggccagaagaagcgcgtcaccacagctaacgacacagtcgagtgtcacatcctgcggttcgatcgtgcagcaaaaaaaaaaaaaagggcaccgtgcttttgtgctgtgcctctgaggtccacacacacaagggacaccgtgcctttgattgggacgcagcagttggtagcgtaccatctcgtggttcagggattccagggggagatgatcgttggcccgaccaaggtgctgttcatggacgagatatcaactgggctggacagctccacgacgttccagatcgtcaaatgtctccagcagattgtgcacctgggcgaggccaccatcctcatgtccctcctccagccagcccccgagaccttcgacctgttcgatgacatcatcctgctgtcggaaggccagatcgtttaccagggacctcgtgaatacgtcctcgagttcttcgactcctgcgggttctgctgccccgagcgcaagggcactgcggacttccttcaggaggtaacatcaaggaaggaccaggagcagtactgggcggacaagcagatgccttacagatacgtttcggtgccagaatttgcgcagcggtttaaacggttccatgtcgggctccagcttgagaaccacctctcgctgccgtttgacaagagcaggtgccatcaggctgccctcgtattctcgaagcactcggtgtcgacaaccgaactcctcaaggcatcctttgacaaggagtggctcctcatcaagcgcaattcatttgtgtacatcttcaagaccatacagcttatcattgtagccctcatcgcgtcaacggtgtttctgagaactcacatgcatacgacgaatctagatgatggctttgtttacattggagcactgctctttactctgattgtgaatatgttcaatggttttgctgagctttccttgaccataacaaggttgccggttttctacaagcaccgggacctgctcttctatcctgcttgggtcttcacagtaccgaacgtcattctcagaatcccattctccattattgaatctatagtatgggttcttgtgacatattacaccatagggtttgctccagatgctgacaggtttttcaagcacttgctgctcgtgttcttgatccagcaaatggcaggtgggcttttcagagcaacagctggactttgcaggtccatgatcattgctcaaactggtggagcactatttcttcttatcttctttgttcttggaggctttgtcctgcctaaagttttcattcctaactggtggatctggggctactggatctcacccttgatgtatggatacaatgctctagctgttaatgaattctatgcccctcggtggatgaataagtttgtcctggaccaaaatggtgttcccaaaagactggggatagctatgcttgaaggtgccaacatctttgttgacaaaaactggtactggattggagcagcagggctcttgggtttcaccatcttcttcaatgtccttttcacactgtcgcttatgtacctgaaccctctcggcaagccacaagctgttatatcagaagaaactgcaaaggaagcggaaggcaacgggcattcaaaaggggcaataagaaatggaagcacaaaaccaaaggacggtagtcataacagtttggttatttcagaggaaatgaaggagatgaggttgagtgcacgtttgagcaactgttcatcaaatggggtttcacgactcatgtccattggcagcaatgaagctgctccaacaagaggaatggttcttccattcaaccctcttgctatgtcttttgataatgtgaactactatgttgacatgcctgcggaaatgaaacatcaaggagtgcaggatgacagactccaattgttgcgtgaggttacaggatcattcaggcctggagtgctgacagcacttatgggtgtcagtggagctggaaagactactcttatggatgttttggctggaagaaagactggggggtatattgaaggagacatcagaattgcaggctatcccaagaaccaagcaacattcgcaaggatttctggatactgcgagcaaaatgatatacattctcctcaggtcacagtaagggagtctttgatatactctgcctttttgcgccttcctggaaaaattggagatcaagaaataactgatgacataaagatgcaatttgtggatgaagttatggaactagtggagctcgacaatctgagggatgccttagttgggctaccaggaatcacagggctttcgacagagcaaagaaaaaggttgacaatagccgtggagctcgttgccaatccatcaatcatatttatggatgaaccaacatcagggcttgatgcaagagctgcagcaattgtcatgagaactgtgcggaacacagttgacactggacggacagttgtttgcacaatccatcagccaagcatcgacatctttgaatcttttgatgagttgctattgttgaaaagaggaggccaggtgatctactctgggaaattgggtcgcaactcccagaaaatggtggagtattttgaggcaattcctggagtgcctaaaataaaagataagtacaatcctgcaacgtggatgctcgaggtcagttcagttgcaactgaagtgcgactaaagatggattttgctaagtactatgaaacatcagatctgtataagcaaaacaaggtactggtgaaccagctgagtcaaccagagccaggaacatcagatctttatttccctacagagtactcgcaatccacaataggacagttcaaagcctgtctctggaagcaatggctgacttattggcgcagcccggattacaaccttgttagatattccttcactctgttagttgccttgcttctcggctccattttctggaggataggcaccaacatggaagatgcaaccactctcggtatggttattggagcaatgtacactgctgttatgtttatcggcatcaacaattgttcaactgtgcagccagttgtttcaattgaaagaacggtcttctacagagagagggctgctgggatgtactctgctatgccatatgccattgctcaggttgttatagagataccatatgtatttgtgcaaacaacgtactacaccctcattgtatacgccatgatgagcttccaatggacagctgtcaagttcttctggttcttcttcatttcctacttctccttcctctacttcacctactatggcatgatggctgtctcaatctccccaaaccatgaggttgcatccatcttcgcagcagctttcttttctctcttcaatctcttctcaggcttcttcattccgagaccgagaattcctggatggtggatctggtactactggatttgcccactggcatggacagtgtatgggctcatcgtgacacaatacggagacctggaagacctcatctcagtccctggagaaagtgagcagacgataagctactatgtaacacatcattttggataccacagggattttctgccggtcattgcgccggttctggtactctttgcagtattcttcgcgttcttgtacgcagtctgcatcaagaaactgaacttccagcaacgataagaacaagatatggcagcaaaagctcttgagagtttttttggaacattgccgtgtatatagggtattttgcacatcgcgttctcctttcattttttgagtccctttaatacattgtcgtgtatatagggtattctgcacatcgccaaatgtggtgaggtcttatacagatttctagccatttattgcaagagcaaaactatgatatttttccggatacacagaagagctacatattattatattaagaagagaggtctaacgtagacctgccacaagatataatcctctattggataagaggatataacactatcttcatctcctttacctatataaataggtctccttgtatcatgtaccacataatatctctttttcgtatc

SEQ ID NO: 58605 - DNA, 4278 bp, Zea Mays
caccaagtccactgctttgacacacagcaccgattagttcaggctcagcctgagacgggataacttgagtacgtacgtacacgtactagtactacacagttttgtggcagtggtcaatgactcagtgggctggtttggccactcacccactcattcctctgctactacccgactcatctgaccgtacacccaactacccaagcaatcttcttcacctgcctgcgtgcctgccgcctgtgcccggtggggtcttgctgcagccaaacccggacgcaggggggttggtgcaacaacctgacctgaggccgatggcggcgccatcgctcgacaggatcgtcagccccacctttgcgcacgcccacgacgtgttcgtcgagatgccaagccgaagatactggggctggacatctgcgccgacaccatcgtcggcgaccagatgcagcgggggatctctggcggccagaagaagcgcgtcaccacaggggagatgatcgttggcccgaccaaggtgctgttcatggacgagatatcaactgggctggacagctccacgacgttccagatcgtcaaatgtctccagcagattgtgcacctgggcgaggccaccatcctcatgtccctcctccagccagcccccgagaccttcgacctgttcgatgacatcatcctgctgtcggaaggccagatcgtttaccagggacctcgtgaatacgtcctcgagttcttcgactcctgcgggttctgctgccccgagcgcaagggcactgcggacttccttcaggaggtaacatcaaggaaggaccaggagcagtactgggcggacaagcagatgccttacagatacgtttcggtgccagaatttgcgcagcggtttaaacggttccatgtcgggctccagcttgagaaccacctctcgctgccgtttgacaagagcaggtgccatcaggctgccctcgtattctcgaagcactcggtgtcgacaaccgaactcctcaaggcatcctttgacaaggagtggctcctcatcaagcgcaattcatttgtgtacatcttcaagaccatacagcttatcattgtagccctcatcgcgtcaacggtgtttctgagaactcacatgcatacgacgaatctagatgatggctttgtttacattggagcactgctctttactctgattgtgaatatgttcaatggttttgctgagctttccttgaccataacaaggttgccggttttctacaagcaccgggacctgctcttctatcctgcttgggtcttcacagtaccgaacgtcattctcagaatcccattctccattattgaatctatagtatgggttcttgtgacatattacaccatagggtttgctccagatgctgacaggtttttcaagcacttgctgctcgtgttcttgatccagcaaatggcaggtgggcttttcagagcaacagctggactttgcaggtccatgatcattgctcaaactggtggagcactatttcttcttatcttctttgttcttggaggctttgtcctgcctaaagttttcattcctaactggtggatctggggctactggatctcacccttgatgtatggatacaatgctctagctgttaatgaattctatgcccctcggtggatgaataagtttgtcctggaccaaaatggtgttcccaaaagactggggatagctatgcttgaaggtgccaacatctttgttgacaaaaactggtactggattggagcagcagggctcttgggtttcaccatcttcttcaatgtccttttcacactgtcgcttatgtacctgaaccctctcggcaagccacaagctgttatatcagaagaaactgcaaaggaagcggaaggcaacgggcattcaaaaggggcaataagaaatggaagcacaaaaccaaaggacggtagtcataacaaggaaatgaaggagatgaggttgagtgcacgtttgagcaactgttcatcaaatggggtttcacgactcatgtccattggcagcaatgaagctgctccaacaagaggaatggttcttccattcaaccctcttgctatgtcttttgataatgtgaactactatgttgacatgcctgcggaaatgaaacatcaaggagtgcaggatgacagactccaattgttgcgtgaggttacaggatcattcaggcctggagtgctgacagcacttatgggtgtcagtggagctggaaagactactcttatggatgttttggctggaagaaagactggggggtatattgaaggagacatcagaattgcaggctatcccaagaaccaagcaacattcgcaaggatttctggatactgcgagcaaaatgatatacattctcctcaggtcacagtaagggagtctttgatatactctgcctttttgcgccttcctggaaaaattggagatcaagaaataactgatgacataaagatgcaatttgtggatgaagttatggaactagtggagctcgacaatctgagggatgccttagttgggctaccaggaatcacagggctttcgacagagcaaagaaaaaggttgacaatagccgtggagctcgttgccaatccatcaatcatatttatggatgaaccaacatcagggcttgatgcaagagctgcagcaattgtcatgagaactgtgcggaacacagttgacactggacggacagttgtttgcacaatccatcagccaagcatcgacatctttgaatcttttgatgagttgctattgttgaaaagaggaggccaggtgatctactctgggaaattgggtcgcaactcccagaaaatggtggagtattttgaggcaattcctggagtgcctaaaataaaagataagtacaatcctgcaacgtggatgctcgaggtcagttcagttgcaactgaagtgcgactaaagatggattttgctaagtactatgaaacatcagatctgtataagcaaaacaaggtactggtgaaccagctgagtcaaccagagccaggaacatcagatctttatttccctacagagtactcgcaatccacaataggacagttcaaagcctgtctctggaagcaatggctgacttattggcgcagcccggattacaaccttgttagatattccttcactctgttagttgccttgcttctcggctccattttctggaggataggcaccaacatggaagatgcaaccactctcggtatggttattggagcaatgtacactgctgttatgtttatcggcatcaacaattgttcaactgtgcagccagttgtttcaattgaaagaacggtcttctacagagagagggctgctgggatgtactctgctatgccatatgccattgctcaggttgttatagagataccatatgtatttgtgcaaacaacgtactacaccctcattgtatacgccatgatgagcttccaatggacagctgtcaagttcttctggttcttcttcatttcctacttctccttcctctacttcacctactatggcatgatggctgtctcaatctccccaaaccatgaggttgcatccatcttcgcagcagctttcttttctctcttcaatctcttctcaggcttcttcattccgagaccgagaattcctggatggtggatctggtactactggatttgcccactggcatggacagtgtatgggctcatcgtgacacaatacggagacctggaagacctcatctcagtccctggagaaagtgagcagacgataagctactatgtaacacatcattttggataccacagggattttctgccggtcattgcgccggttctggtactctttgcagtattcttcgcgttcttgtacgcagtctgcatcaagaaactgaacttccagcaacgataagaacaagatatggcagcaaaagctcttgagagtttttttggaacattgccgtgtatatagggtattttgcacatcgcgttctcctttcattttttgagtccctttaatacattgtcgtgtatatagggtattctgcacatcgccaaatgtggtgaggtcttatacagatttctagccatttattgcaagagcaaaactatgatatttttccggatacacagaagagctacatattattatattaagaagagaggtctaacgtagacctgccacaagatataatcctctattggataagaggatataacactatcttcatctcctttacctatataaataggtctccttgtatcatgtaccacataatatctctttttcgtatc

SEQ ID NO: 58606 - DNA, 4250 bp, Zea Mays
caatcttcttcacctgcctgcgtgcctgccgcctgtgcccggtggggtcttgctgcagccaaacccggacgcaggggggttggtgcaacaacctgacctgaggccgatggcggcgccatcgctcgacaggatcgtcagccccacctttgcgcacgcccacgacgtgttcgtcgagatgccaagccgaagatactggggctggacatctgcgccgacaccatcgtcggcgaccagatgcagcgggggatctctggcggccagaagaagcgcgtcaccacagctaacgacacagtcgagtgtcacatcctgcggttcgatcgtgcagcaaaaaaaaaaaaaagggcaccgtgcttttgtgctgtgcctctgaggtccacacacacaagggacaccgtgcctttgattgggacgcagcagttggtagcgtaccatctcgtggttcagggattccagggggagatgatcgttggcccgaccaaggtgctgttcatggacgagatatcaactgggctggacagctccacgacgttccagatcgtcaaatgtctccagcagattgtgcacctgggcgaggccaccatcctcatgtccctcctccagccagcccccgagaccttcgacctgttcgatgacatcatcctgctgtcggaaggccagatcgtttaccagggacctcgtgaatacgtcctcgagttcttcgactcctgcgggttctgctgccccgagcgcaagggcactgcggacttccttcaggaggtaacatcaaggaaggaccaggagcagtactgggcggacaagcagatgccttacagatacgtttcggtgccagaatttgcgcagcggtttaaacggttccatgtcgggctccagcttgagaaccacctctcgctgccgtttgacaagagcaggtgccatcaggctgccctcgtattctcgaagcactcggtgtcgacaaccgaactcctcaaggcatcctttgacaaggagtggctcctcatcaagcgcaattcatttgtgtacatcttcaagaccatacagcttatcattgtagccctcatcgcgtcaacggtgtttctgagaactcacatgcatacgacgaatctagatgatggctttgtttacattggagcactgctctttactctgattgtgaatatgttcaatggttttgctgagctttccttgaccataacaaggttgccggttttctacaagcaccgggacctgctcttctatcctgcttgggtcttcacagtaccgaacgtcattctcagaatcccattctccattattgaatctatagtatgggttcttgtgacatattacaccatagggtttgctccagatgctgacaggtttttcaagcacttgctgctcgtgttcttgatccagcaaatggcaggtgggcttttcagagcaacagctggactttgcaggtccatgatcattgctcaaactggtggagcactatttcttcttatcttctttgttcttggaggctttgtcctgcctaaagttttcattcctaactggtggatctggggctactggatctcacccttgatgtatggatacaatgctctagctgttaatgaattctatgcccctcggtggatgaataagtttgtcctggaccaaaatggtgttcccaaaagactggggatagctatgcttgaaggtgccaacatctttgttgacaaaaactggtactggattggagcagcagggctcttgggtttcaccatcttcttcaatgtccttttcacactgtcgcttatgtacctgaaccctctcggcaagccacaagctgttatatcagaagaaactgcaaaggaagcggaaggcaacgggcattcaaaaggggcaataagaaatggaagcacaaaaccaaaggacggtagtcataacaaggaaatgaaggagatgaggttgagtgcacgtttgagcaactgttcatcaaatggggtttcacgactcatgtccattggcagcaatgaagctgctccaacaagaggaatggttcttccattcaaccctcttgctatgtcttttgataatgtgaactactatgttgacatgcctgcggaaatgaaacatcaaggagtgcaggatgacagactccaattgttgcgtgaggttacaggatcattcaggcctggagtgctgacagcacttatgggtgtcagtggagctggaaagactactcttatggatgttttggctggaagaaagactggggggtatattgaaggagacatcagaattgcaggctatcccaagaaccaagcaacattcgcaaggatttctggatactgcgagcaaaatgatatacattctcctcaggtcacagtaagggagtctttgatatactctgcctttttgcgccttcctggaaaaattggagatcaagaaataactgatgacataaagatgcaatttgtggatgaagttatggaactagtggagctcgacaatctgagggatgccttagttgggctaccaggaatcacagggctttcgacagagcaaagaaaaaggttgacaatagccgtggagctcgttgccaatccatcaatcatatttatggatgaaccaacatcagggcttgatgcaagagctgcagcaattgtcatgagaactgtgcggaacacagttgacactggacggacagttgtttgcacaatccatcagccaagcatcgacatctttgaatcttttgatgagttgctattgttgaaaagaggaggccaggtgatctactctgggaaattgggtcgcaactcccagaaaatggtggagtattttgaggcaattcctggagtgcctaaaataaaagataagtacaatcctgcaacgtggatgctcgaggtcagttcagttgcaactgaagtgcgactaaagatggattttgctaagtactatgaaacatcagatctgtataagcaaaacaaggtactggtgaaccagctgagtcaaccagagccaggaacatcagatctttatttccctacagagtactcgcaatccacaataggacagttcaaagcctgtctctggaagcaatggctgacttattggcgcagcccggattacaaccttgttagatattccttcactctgttagttgccttgcttctcggctccattttctggaggataggcaccaacatggaagatgcaaccactctcggtatggttattggagcaatgtacactgctgttatgtttatcggcatcaacaattgttcaactgtgcagccagttgtttcaattgaaagaacggtcttctacagagagagggctgctgggatgtactctgctatgccatatgccattgctcaggttgttatagagataccatatgtatttgtgcaaacaacgtactacaccctcattgtatacgccatgatgagcttccaatggacagctgtcaagttcttctggttcttcttcatttcctacttctccttcctctacttcacctactatggcatgatggctgtctcaatctccccaaaccatgaggttgcatccatcttcgcagcagctttcttttctctcttcaatctcttctcaggcttcttcattccgagaccgagaattcctggatggtggatctggtactactggatttgcccactggcatggacagtgtatgggctcatcgtgacacaatacggagacctggaagacctcatctcagtccctggagaaagtgagcagacgataagctactatgtaacacatcattttggataccacagggattttctgccggtcattgcgccggttctggtactctttgcagtattcttcgcgttcttgtacgcagtctgcatcaagaaactgaacttccagcaacgataagaacaagatatggcagcaaaagctcttgagagtttttttggaacattgccgtgtatatagggtattttgcacatcgcgttctcctttcattttttgagtccctttaatacattgtcgtgtatatagggtattctgcacatcgccaaatgtggtgaggtcttatacagatttctagccatttattgcaagagcaaaactatgatatttttccggatacacagaagagctacatattattatattaagaagagaggtctaacgtagacctgccacaagatataatcctctattggataagaggatataacactatcttcatctcctttacctatataaataggtctccttgtatcatgtaccacataatatctctttttcgtatc

SEQ ID NO: 58607 - DNA, 4235 bp, Zea Mays
ccccacctttgcgcacgcccacgacgtgttcgtcgagatgccaagccgaaggcgttggtctgtgtggtgtgcagatactggggctggacatctgcgccgacaccatcgtcggcgaccagatgcagcgggggatctctggcggccagaagaagcgcgtcaccacagctaacgacacagtcgagtgtcacatcctgcggttcgatcgtgcagcaaaaaaaaaaaaaagggcaccgtgcttttgtgctgtgcctctgaggtccacacacacaagggacaccgtgcctttgattgggacgcagcagttggtagcgtaccatctcgtggttcagggattccagggggagatgatcgttggcccgaccaaggtgctgttcatggacgagatatcaactgggctggacagctccacgacgttccagatcgtcaaatgtctccagcagattgtgcacctgggcgaggccaccatcctcatgtccctcctccagccagcccccgagaccttcgacctgttcgatgacatcatcctgctgtcggaaggccagatcgtttaccagggacctcgtgaatacgtcctcgagttcttcgactcctgcgggttctgctgccccgagcgcaagggcactgcggacttccttcaggaggtaacatcaaggaaggaccaggagcagtactgggcggacaagcagatgccttacagatacgtttcggtgccagaatttgcgcagcggtttaaacggttccatgtcgggctccagcttgagaaccacctctcgctgccgtttgacaagagcaggtgccatcaggctgccctcgtattctcgaagcactcggtgtcgacaaccgaactcctcaaggcatcctttgacaaggagtggctcctcatcaagcgcaattcatttgtgtacatcttcaagaccatacaggtaaaacacattgtttttgggagtctctcccatgaaactttccaagactcccagtgctaattgactgaccttattgttgtctgtcctgtgaactctgaagcttatcattgtagccctcatcgcgtcaacggtgtttctgagaactcacatgcatacgacgaatctagatgatggctttgtttacattggagcactgctctttactctgattgtgaatatgttcaatggttttgctgagctttccttgaccataacaaggttgccggttttctacaagcaccgggacctgctcttctatcctgcttgggtcttcacagtaccgaacgtcattctcagaatcccattctccattattgaatctatagtatgggttcttgtgacatattacaccatagggtttgctccagatgctgacaggtttttcaagcacttgctgctcgtgttcttgatccagcaaatggcaggtgggcttttcagagcaacagctggactttgcaggtccatgatcattgctcaaactggtggagcactatttcttcttatcttctttgttcttggaggctttgtcctgcctaaagttttcattcctaactggtggatctggggctactggatctcacccttgatgtatggatacaatgctctagctgttaatgaattctatgcccctcggtggatgaataagtttgtcctggaccaaaatggtgttcccaaaagactggggatagctatgcttgaaggtgccaacatctttgttgacaaaaactggtactggattggagcagcagggctcttgggtttcaccatcttcttcaatgtccttttcacactgtcgcttatgtacctgaaccctctcggcaagccacaagctgttatatcagaagaaactgcaaaggaagcggaaggcaacgggcattcaaaaggggcaataagaaatggaagcacaaaaccaaaggacggtagtcataacaaggaaatgaaggagatgaggttgagtgcacgtttgagcaactgttcatcaaatggggtttcacgactcatgtccattggcagcaatgaagctgctccaacaagaggaatggttcttccattcaaccctcttgctatgtcttttgataatgtgaactactatgttgacatgcctgcggaaatgaaacatcaaggagtgcaggatgacagactccaattgttgcgtgaggttacaggatcattcaggcctggagtgctgacagcacttatgggtgtcagtggagctggaaagactactcttatggatgttttggctggaagaaagactggggggtatattgaaggagacatcagaattgcaggctatcccaagaaccaagcaacattcgcaaggatttctggatactgcgagcaaaatgatatacattctcctcaggtcacagtaagggagtctttgatatactctgcctttttgcgccttcctggaaaaattggagatcaagaaataactgatgacataaagatgcaatttgtggatgaagttatggaactagtggagctcgacaatctgagggatgccttagttgggctaccaggaatcacagggctttcgacagagcaaagaaaaaggttgacaatagccgtggagctcgttgccaatccatcaatcatatttatggatgaaccaacatcagggcttgatgcaagagctgcagcaattgtcatgagaactgtgcggaacacagttgacactggacggacagttgtttgcacaatccatcagccaagcatcgacatctttgaatcttttgatgagttgctattgttgaaaagaggaggccaggtgatctactctgggaaattgggtcgcaactcccagaaaatggtggagtattttgaggcaattcctggagtgcctaaaataaaagataagtacaatcctgcaacgtggatgctcgaggtcagttcagttgcaactgaagtgcgactaaagatggattttgctaagtactatgaaacatcagatctgtataagcaaaacaaggtactggtgaaccagctgagtcaaccagagccaggaacatcagatctttatttccctacagagtactcgcaatccacaataggacagttcaaagcctgtctctggaagcaatggctgacttattggcgcagcccggattacaaccttgttagatattccttcactctgttagttgccttgcttctcggctccattttctggaggataggcaccaacatggaagatgcaaccactctcggtatggttattggagcaatgtacactgctgttatgtttatcggcatcaacaattgttcaactgtgcagccagttgtttcaattgaaagaacggtcttctacagagagagggctgctgggatgtactctgctatgccatatgccattgctcaggttgttatagagataccatatgtatttgtgcaaacaacgtactacaccctcattgtatacgccatgatgagcttccaatggacagctgtcaagttcttctggttcttcttcatttcctacttctccttcctctacttcacctactatggcatgatggctgtctcaatctccccaaaccatgaggttgcatccatcttcgcagcagctttcttttctctcttcaatctcttctcaggcttcttcattccgagaccgagaattcctggatggtggatctggtactactggatttgcccactggcatggacagtgtatgggctcatcgtgacacaatacggagacctggaagacctcatctcagtccctggagaaagtgagcagacgataagctactatgtaacacatcattttggataccacagggattttctgccggtcattgcgccggttctggtactctttgcagtattcttcgcgttcttgtacgcagtctgcatcaagaaactgaacttccagcaacgataagaacaagatatggcagcaaaagctcttgagagtttttttggaacattgccgtgtatatagggtattttgcacatcgcgttctcctttcattttttgagtccctttaatacattgtcgtgtatatagggtattctgcacatcgccaaatgtggtgaggtcttatacagatttctagccatttattgcaagagcaaaactatgatatttttccggatacacagaagagctacatattattatattaagaagagaggtctaacgtagacctgccacaagatataatcctctattggataagaggatataacactatcttcatctcctttacctatataaataggtctccttgtatcatgtaccacataatatctctttttcgtatc

SEQ ID NO: 58608 - DNA, 4014 bp, Zea Mays
acatcaaacagggttaacaaactcggtagacaaaacaaaggagtttctaagcctactgtggtctatcctgtagaaaccaccgtattgtaggttaaatgagtgaatcttgattgatagttccaaattgattaatagtgcaggggacaaaatgtaactcttgcactagctgtatggaactcgggttacataaaatgctaacgatggggagatgatcgttggcccgaccaaggtgctgttcatggacgagatatcaactgggctggacagctccacgacgttccagatcgtcaaatgtctccagcagattgtgcacctgggcgaggccaccatcctcatgtccctcctccagccagcccccgagaccttcgacctgttcgatgacatcatcctgctgtcggaaggccagatcgtttaccagggacctcgtgaatacgtcctcgagttcttcgactcctgcgggttctgctgccccgagcgcaagggcactgcggacttccttcaggaggtaacatcaaggaaggaccaggagcagtactgggcggacaagcagatgccttacagatacgtttcggtgccagaatttgcgcagcggtttaaacggttccatgtcgggctccagcttgagaaccacctctcgctgccgtttgacaagagcaggtgccatcaggctgccctcgtattctcgaagcactcggtgtcgacaaccgaactcctcaaggcatcctttgacaaggagtggctcctcatcaagcgcaattcatttgtgtacatcttcaagaccatacagcttatcattgtagccctcatcgcgtcaacggtgtttctgagaactcacatgcatacgacgaatctagatgatggctttgtttacattggagcactgctctttactctgattgtgaatatgttcaatggttttgctgagctttccttgaccataacaaggttgccggttttctacaagcaccgggacctgctcttctatcctgcttgggtcttcacagtaccgaacgtcattctcagaatcccattctccattattgaatctatagtatgggttcttgtgacatattacaccatagggtttgctccagatgctgacaggtttttcaagcacttgctgctcgtgttcttgatccagcaaatggcaggtgggcttttcagagcaacagctggactttgcaggtccatgatcattgctcaaactggtggagcactatttcttcttatcttctttgttcttggaggctttgtcctgcctaaagttttcattcctaactggtggatctggggctactggatctcacccttgatgtatggatacaatgctctagctgttaatgaattctatgcccctcggtggatgaataagtttgtcctggaccaaaatggtgttcccaaaagactggggatagctatgcttgaaggtgccaacatctttgttgacaaaaactggtactggattggagcagcagggctcttgggtttcaccatcttcttcaatgtccttttcacactgtcgcttatgtacctgaaccctctcggcaagccacaagctgttatatcagaagaaactgcaaaggaagcggaaggcaacgggcattcaaaaggggcaataagaaatggaagcacaaaaccaaaggacggtagtcataacagtttggttatttcagaggaaatgaaggagatgaggttgagtgcacgtttgagcaactgttcatcaaatggggtttcacgactcatgtccattggcagcaatgaagctgctccaacaagaggaatggttcttccattcaaccctcttgctatgtcttttgataatgtgaactactatgttgacatgcctgcggaaatgaaacatcaaggagtgcaggatgacagactccaattgttgcgtgaggttacaggatcattcaggcctggagtgctgacagcacttatgggtgtcagtggagctggaaagactactcttatggatgttttggctggaagaaagactggggggtatattgaaggagacatcagaattgcaggctatcccaagaaccaagcaacattcgcaaggatttctggatactgcgagcaaaatgatatacattctcctcaggtcacagtaagggagtctttgatatactctgcctttttgcgccttcctggaaaaattggagatcaagaaataactgatgacataaagatgcaatttgtggatgaagttatggaactagtggagctcgacaatctgagggatgccttagttgggctaccaggaatcacagggctttcgacagagcaaagaaaaaggttgacaatagccgtggagctcgttgccaatccatcaatcatatttatggatgaaccaacatcagggcttgatgcaagagctgcagcaattgtcatgagaactgtgcggaacacagttgacactggacggacagttgtttgcacaatccatcagccaagcatcgacatctttgaatcttttgatgagttgctattgttgaaaagaggaggccaggtgatctactctgggaaattgggtcgcaactcccagaaaatggtggagtattttgaggcaattcctggagtgcctaaaataaaagataagtacaatcctgcaacgtggatgctcgaggtcagttcagttgcaactgaagtgcgactaaagatggattttgctaagtactatgaaacatcagatctgtataagcaaaacaaggtactggtgaaccagctgagtcaaccagagccaggaacatcagatctttatttccctacagagtactcgcaatccacaataggacagttcaaagcctgtctctggaagcaatggctgacttattggcgcagcccggattacaaccttgttagatattccttcactctgttagttgccttgcttctcggctccattttctggaggataggcaccaacatggaagatgcaaccactctcggtatggttattggagcaatgtacactgctgttatgtttatcggcatcaacaattgttcaactgtgcagccagttgtttcaattgaaagaacggtcttctacagagagagggctgctgggatgtactctgctatgccatatgccattgctcaggttgttatagagataccatatgtatttgtgcaaacaacgtactacaccctcattgtatacgccatgatgagcttccaatggacagctgtcaagttcttctggttcttcttcatttcctacttctccttcctctacttcacctactatggcatgatggctgtctcaatctccccaaaccatgaggttgcatccatcttcgcagcagctttcttttctctcttcaatctcttctcaggcttcttcattccgagaccgagaattcctggatggtggatctggtactactggatttgcccactggcatggacagtgtatgggctcatcgtgacacaatacggagacctggaagacctcatctcagtccctggagaaagtgagcagacgataagctactatgtaacacatcattttggataccacagggattttctgccggtcattgcgccggttctggtactctttgcagtattcttcgcgttcttgtacgcagtctgcatcaagaaactgaacttccagcaacgataagaacaagatatggcagcaaaagctcttgagagtttttttggaacattgccgtgtatatagggtattttgcacatcgcgttctcctttcattttttgagtccctttaatacattgtcgtgtatatagggtattctgcacatcgccaaatgtggtgaggtcttatacagatttctagccatttattgcaagagcaaaactatgatatttttccggatacacagaagagctacatattattatattaagaagagaggtctaacgtagacctgccacaagatataatcctctattggataagaggatataacactatcttcatctcctttacctatataaataggtctccttgtatcatgtaccacataatatctctttttcgtatc

SEQ ID NO: 58609 - DNA, 2588 bp, Zea Mays
atggcgcttgggctcggtagaggcaaaggcaggagacagggagtcgtagcagcacatcaacagggcaccaccttcccgcggcacccgcacgtcgcccactcgcccacgtcgccctcggtctttcccatccgcgcccgcccattcctgctccacgtcagccgcctcccggttgcaaactacgcctccgtctccgatcccggcacggcggcacagttcgaagctcccaacagcccggagcggcgatcagatgcggttgcgtggctacggtcgttgttggcgggctctggcctgcctctgcccccgccgcacgtgtccgacgacgacctacggtcctttctcgccgatggcgtgatcctcggcgcagcgctacgcaggctcggatgtgcttctacgtccaaccagggcggagcctcagcggcggcggcggcggggagtgatgtcgagaggttcgtcgcggcaatggagcgcctgggccttcccagctttgccgcctctgaccatgacaggggcccaatgttagctgtcatagtctgtcttcttgcactgaggggtctgtttggttccaatgttggggaaggcttgcattgtagccttgaagcaaaaagtaggatgcacaacatggagtttcccataagggtgaacggctgctgtactcaaaattgtcagtctagagaaaagggtgaagggagcataccaaaggtctccagaagtccagctacgtcagagccatcatctccgatatcaatgcctgaactatcttctatttcaaggcacactcgacataattttcatgaagtcttccatctgagacaaggaatttactctgacatgcctatttctaaagttttggagataatgaaatccaccaacttggataatgcccctactcagtcacttttgagttttgtgaatgccatccttgatcggatcattgaaaatgagaatggagaaattccttatgtaggctactcaaaagcaatacaaatatcgcttgcttgttgagaaaggtaataatggagattgaacgccgcatttctactcaagcagaacacataagaaatcaaaatagccttatcagagcacgtgaagagaaatataaatcaaggataagagtactagaggcacttgcaagtgggacaggtggacaaatgcaaataaattcaagtgcggcaaatggaaaaataaatattgctgaagatcatgtgctccagatgatgataaacaaaagcaaaattggagaaagaagattagttgataaagatatgtcaagcttgatggctcagaaggaagatgtagctagattgacaaaggataaggaagatatggttaggctgctgaaagataaggaagatataattagattgatgaaagagaaggaagaaatggttttgctgattaaggagaaagatgatatggttacctcgaggaaggagaagattgatggaagagatcaatcagccaatgcatatgcgaataaatcaactacatataatgatgaaaccattaggatgataaaggaaaaagaagacagtaatattacaattatgaaactaaagagcaaattggaagctgtaaaatcattatttgaagagagccacaaccagttagaatctgcaaaggaggaggttcttaagcttcaaaaggacaaggaaaatagtgccaatataatatcaaaactcaggcaagagctttcgttagcacatgaatcttataagacacatattcaagaactggagagtagtgctttgcaggcaagcaaattctttgaacatagaataaaagaagtagatctcatgctcgaagattctataaagaaaagaacagatctagaggaagtattaaaatctagaatggatacttggaagaagaaggaaatcatggtgaatcaagttttacgtctacaaatacagagcatccaggatttgaggttatcttctgtttccattaggcatgaaatccaaaactgccagcgaagatggtctgaagaacttaatggccttggacaaagtctcaacatactgataaatgattctgaaaattatcatgctgctttagaagaaaatagaaaattatacaacgagattcaggaactaaaaggaaatataagagtctactgccggataaggccttttattcctggggaggatcagaaatctactacaattaaatatgttggtgataatggggatctgataattgcaaatcccacacgccatggaaaagaggggagcaagtcgttcaaattcaacaaagtttttggccccactacttctcaagatgacgtattcaaggacattgaaccacttattagatcagttcttgatggttataatgtttgcatttttgcgtatggtcaaactggatcagggaaaacatacacaatgactggacctgaaaatgcaacagagaatgaatggggtgtcaattacagagctctgaatgatctgttccatatttcacataatcgtggggataccatcatgtatgaaataaatgttcaaatgattgagatatacaatgaacaaatccgtgatcttctttgcagcaatggttcagagaagaaatatccttttccccttcatttattt

SEQ ID NO: 58610 - DNA, 2290 bp, Zea Mays
atggcgcttgggctcggtagaggcaaaggcaggagacagggagtcgtagcagcacatcaacagggcaccaccttcccgcggcacccgcacgtcgcccactcgcccacgtcgccctcggtctttcccatccgcgcccgcccattcctgctccacgtcagccgcctcccggttgcaaactacgcctccgtctccgatcccggcacggcggcacagttcgaagctcccaacagcccggagcggcgatcagatgcggttgcgtggctacggtcgttgttggcgggctctggcctgcctctgcccccgccgcacgtgtccgacgacgacctacggtcctttctcgccgatggcgtgatcctcggcgcagcgctacgcaggctcggatgtgcttctacgtccaaccagggcggagcctcagcggcggcggcggcggggagtgatgtcgagaggttcgtcgcggcaatggagcgcctgggccttcccagctttgccgcctctgaccatgacaggggcccaatgttagctgtcatagtctgtcttcttgcactgaggggtctgtttggttccaatgttggggaaggcttgcattgtagccttgaagcaaaaagtaggatgcacaacatggagtttcccataagggtgaacggctgctgtactcaaaattgtcagtctagagaaaagggtgaagggagcataccaaaggtctccagaagtccagctacgtcagaatatcgcttgcttgttgagaaaggtaataatggagattgaacgccgcatttctactcaagcagaacacataagaaatcaaaatagccttatcagagcacgtgaagagaaatataaatcaaggataagagtactagaggcacttgcaagtgggacaggtggacaaatgcaaataaattcaagtgcggcaaatggaaaaataaatattgctgaagatcatgtgctccagatgatgataaacaaaagcaaaattggagaaagaagattagttgataaagatatgtcaagcttgatggctcagaaggaagatgtagctagattgacaaaggataaggaagatatggttaggctgctgaaagataaggaagatataattagattgatgaaagagaaggaagaaatggttttgctgattaaggagaaagatgatatggttacctcgaggaaggagaagattgatggaagagatcaatcagccaatgcatatgcgaataaatcaactacatataatgatgaaaccattaggatgataaaggaaaaagaagacagtaatattacaattatgaaactaaagagcaaattggaagctgtaaaatcattatttgaagagagccacaaccagttagaatctgcaaaggaggaggttcttaagcttcaaaaggacaaggaaaatagtgccaatataatatcaaaactcaggcaagagctttcgttagcacatgaatcttataagacacatattcaagaactggagagtagtgctttgcaggcaagcaaattctttgaacatagaataaaagaagtagatctcatgctcgaagattctataaagaaaagaacagatctagaggaagtattaaaatctagaatggatacttggaagaagaaggaaatcatggatttgaggttatcttctgtttccattaggcatgaaatccaaaactgccagcgaagatggtctgaagaacttaatggccttggacaaagtctcaacatactgataaatgattctgaaaattatcatgctgctttagaagaaaatagaaaattatacaacgagattcaggaactaaaaggaaatataagagtctactgccggataaggccttttattcctggggaggatcagaaatctactacaattaaatatgttggtgataatggggatctgataattgcaaatcccacacgccatggaaaagaggggagcaagtcgttcaaattcaacaaagtttttggccccactacttctcaagatgacgtattcaaggacattgaaccacttattagatcagttcttgatggttataatgtttgcatttttgcgtatggtcaaactggatcagggaaaacatacacaatgactggacctgaaaatgcaacagagaatgaatggggtgtcaattacagagctctgaatgatctgttccatatttcacataatcgtggggataccatcatgtatgaaataaatgttcaaatgattgagatatacaatgaacaaatccgtgatcttctttgcagcaatggttcagagaagaaatatccttttccccttcatttattt

SEQ ID NO: 58611 - DNA, 2575 bp, Zea Mays
atggcgcttgggctcggtagaggcaaaggcaggagacagggagtcgtagcagcacatcaacagggcaccaccttcccgcggcacccgcacgtcgcccactcgcccacgtcgccctcggtctttcccatccgcgcccgcccattcctgctccacgtcagccgcctcccggttgcaaactacgcctccgtctccgatcccggcacggcggcacagttcgaagctcccaacagcccggagcggcgatcagatgcggttgcgtggctacggtcgttgttggcgggctctggcctgcctctgcccccgccgcacgtgtccgacgacgacctacggtcctttctcgccgatggcgtgatcctcggcgcagcgctacgcaggctcggatgtgcttctacgtccaaccagggcggagcctcagcggcggcggcggcggggagtgatgtcgagaggttcgtcgcggcaatggagcgcctgggccttcccagctttgccgcctctgaccatgacaggggcccaatgttagctgtcatagtctgtcttcttgcactgaggggtctgtttggttccaatgttggggaaggcttgcattgtagccttgaagcaaaaagtaggatgcacaacatggagtttcccataagggtgaacggctgctgtactcaaaattgtcagtctagagaaaagggtgaagggagcataccaaaggtctccagaagtccagctacgtcagagccatcatctccgatatcaatgcctgaactatcttctatttcaaggcacactcgacataattttcatgaagtcttccatctgagacaaggaatttactctgacatgcctatttctaaagttttggagataatgaaatccaccaacttggataatatcgcttgcttgttgagaaaggtaataatggagattgaacgccgcatttctactcaagcagaacacataagaaatcaaaatagccttatcagagcacgtgaagagaaatataaatcaaggataagagtactagaggcacttgcaagtgggacaggtggacaaatgcaaataaattcaagtgcggcaaatggaaaaataaatattgctgaagatcatgtgctccagatgatgataaacaaaagcaaaattggagaaagaagattagttgataaagatatgtcaagcttgatggctcagaaggaagatgtagctagattgacaaaggataaggaagatatggttaggctgctgaaagataaggaagatataattagattgatgaaagagaaggaagaaatggttttgctgattaaggagaaagatgatatggttacctcgaggaaggagaagattgatggaagagatcaatcagccaatgcatatgcgaataaatcaactacatataatgatgaaaccattaggatgataaaggaaaaagaagacagtaatattacaattatgaaactaaagagcaaattggaagctgtaaaatcattatttgaagagagccacaaccagttagaatctgcaaaggaggaggttcttaagcttcaaaaggacaaggaaaatagtgccaatataatatcaaaactcaggcaagagctttcgttagcacatgaatcttataagacacatattcaagaactggagagtagtgctttgcaggcaagcaaattctttgaacatagaataaaagaagtagatctcatgctcgaagattctataaagaaaagaacagatctagaggaagtattaaaatctagaatggatacttggaagaagaaggaaatcatggatttgaggttatcttctgtttccattaggcatgaaatccaaaactgccagcgaagatggtctgaagaacttaatggccttggacaaagtctcaacatactgataaatgattctgaaaattatcatgctgctttagaagaaaatagaaaattatacaacgagattcaggaactaaaaggaaatataagagtctactgccggataaggccttttattcctggggaggatcagaaatctactacaattaaatatgttggtgataatggggatctgataattgcaaatcccacacgccatggaaaagaggggagcaagtcgttcaaattcaacaaagtttttggccccactacttctcaaggtaggaacgaatttgacatatgcaatatccctatgcttttgatattgatagcttcattgtatctagtaaggatcgtatatctgtaatgctagcgcaccacatttcccttgcccttccctttcctcttttgtagatgacgtattcaaggacattgaaccacttattagatcagttcttgatggttataatgtttgcatttttgcgtatggtcaaactggatcagggaaaacatacacaatgactggacctgaaaatgcaacagagaatgaatggggtgtcaattacagagctctgaatgatctgttccatatttcacataatcgtggggataccatcatgtatgaaataaatgttcaaatgattgagatatacaatgaacaaatccgtgatcttctttgcagcaatggttcagagaagaaatatccttttccccttcatttattt

SEQ ID NO: 58612 - DNA, 2503 bp, Zea Mays
atggcgcttgggctcggtagaggcaaaggcaggagacagggagtcgtagcagcacatcaacagggcaccaccttcccgcggcacccgcacgtcgcccactcgcccacgtcgccctcggtctttcccatccgcgcccgcccattcctgctccacgtcagccgcctcccggttgcaaactacgcctccgtctccgatcccggcacggcggcacagttcgaagctcccaacagcccggagcggcgatcagatgcggttgcgtggctacggtcgttgttggcgggctctggcctgcctctgcccccgccgcacgtgtccgacgacgacctacggtcctttctcgccgatggcgtgatcctcggcgcagcgctacgcaggctcggatgtgcttctacgtccaaccagggcggagcctcagcggcggcggcggcggggagtgatgtcgagaggttcgtcgcggcaatggagcgcctgggccttcccagctttgccgcctctgaccatgacaggggcccaatgttagctgtcatagtctgtcttcttgcactgaggggtctgtttggttccaatgttggggaaggcttgcattgtagccttgaagcaaaaagtaggatgcacaacatggagtttcccataagggtgaacggctgctgtactcaaaattgtcagtctagagaaaagggtgaagggagcataccaaaggtctccagaagtccagctacgtcaggcacactcgacataattttcatgaagtcttccatctgagacaaggaatttactctgacatgcctatttctaaagttttggagataatgaaatccaccaacttggataatgcccctactcagtcacttttgagttttgtgaatgccatccttgatcggatcattgaaaatgagaatggagaaattccttatgtaggctactcaaaagcaatacaaatatcgcttgcttgttgagaaaggtaataatggagattgaacgccgcatttctactcaagcagaacacataagaaatcaaaatagccttatcagagcacgtgaagagaaatataaatcaaggataagagtactagaggcacttgcaagtgggacaggtggacaaatgcaaataaattcaagtgcggcaaatggaaaaataaatattgctgaagatcatgtgctccagatgatgataaacaaaagcaaaattggagaaagaagattagttgataaagatatgtcaagcttgatggctcagaaggaagatgtagctagattgacaaaggataaggaagatatggttaggctgctgaaagataaggaagatataattagattgatgaaagagaaggaagaaatggttttgctgattaaggagaaagatgatatggttacctcgaggaaggagaagattgatggaagagatcaatcagccaatgcatatgcgaataaatcaactacatataatgatgaaaccattaggatgataaaggaaaaagaagacagtaatattacaattatgaaactaaagagcaaattggaagctgtaaaatcattatttgaagagagccacaaccagttagaatctgcaaaggaggaggttcttaagcttcaaaaggacaaggaaaatagtgccaatataatatcaaaactcaggcaagagctttcgttagcacatgaatcttataagacacatattcaagaactggagagtagtgctttgcaggcaagcaaattctttgaacatagaataaaagaagtagatctcatgctcgaagattctataaagaaaagaacagatctagaggaagtattaaaatctagaatggatacttggaagaagaaggaaatcatggatttgaggttatcttctgtttccattaggcatgaaatccaaaactgccagcgaagatggtctgaagaacttaatggccttggacaaagtctcaacatactgataaatgattctgaaaattatcatgctgctttagaagaaaatagaaaattatacaacgagattcaggaactaaaaggaaatataagagtctactgccggataaggccttttattcctggggaggatcagaaatctactacaattaaatatgttggtgataatggggatctgataattgcaaatcccacacgccatggaaaagaggggagcaagtcgttcaaattcaacaaagtttttggccccactacttctcaagatgacgtattcaaggacattgaaccacttattagatcagttcttgatggttataatgtttgcatttttgcgtatggtcaaactggatcagggaaaacatacacaatgactggacctgaaaatgcaacagagaatgaatggggtgtcaattacagagctctgaatgatctgttccatatttcacataatcgtggggataccatcatgtatgaaataaatgttcaaatgattgagatatacaatgaacaaatccgtgatcttctttgcagcaatggttcagagaagaaatatccttttccccttcatttattt

SEQ ID NO: 58613 - DNA, 1996 bp, Zea Mays
atggcgcttgggctcggtagaggcaaaggcaggagacagggagtcgtagcagcacatcaacagggcaccaccttcccgcggcacccgcacgtcgcccactcgcccacgtcgccctcggtctttcccatccgcgcccgcccattcctgctccacgtcagccgcctcccggttgcaaactacgcctccgtctccgatcccggcacggcggcacagttcgaagctcccaacagcccggagcggcgatcagatgcggttgcgtggctacggtcgttgttggcgggctctggcctgcctctgcccccgccgcacgtgtccgacgacgacctacggtcctttctcgccgatggcgtgatcctcggcgcagcgctacgcaggctcggatgtgcttctacgtccaaccagggcggagcctcagcggcggcggcggcggggagtgatgtcgagaggttcgtcgcggcaatggagcgcctgggccttcccagctttgccgcctctgaccatgacaggggcccaatgttagctgtcatagtctgtcttcttgcactgaggggtctgtttggttccaatgttggggaaggcttgcattgtagccttgaagcaaaaagtaggatgcacaacatggagtttcccataagggtgaacggctgctgtactcaaaattgtcagtctagagaaaagggtgaagggagcataccaaaggtctccagaagtccagctacgtcagagccatcatctccgatatcaatgcctgaactatcttctatttcaaggcacactcgacataattttcatgaagtcttccatctgagacaaggaatttactctgacatgcctatttctaaagttttggagataatgaaatccaccaacttggataatgcccctactcagtcacttttgagttttgtgaatgccatccttgatcggatcattgaaaatgagaatggagaaattccttataatatcgcttgcttgttgagaaaggtaataatggagattgaacgccgcatttctactcaagcagaacacataagaaatcaaaatagccttatcagagcacgtgaagagaaatataaatcaaggataagagtactagaggcacttgcaagtgggacaggtggacaaatgcaaataaattcaagtgcggcaaatggaaaaataaatattgctgaagatcatgtgctccagatgatggatttgaggttatcttctgtttccattaggcatgaaatccaaaactgccagcgaagatggtctgaagaacttaatggccttggacaaagtctcaacatactgataaatgattctgaaaattatcatgctgctttagaagaaaatagaaaattatacaacgagattcaggaactaaaaggaaatataagagtctactgccggataaggccttttattcctggggaggatcagaaatctactacaattaaatatgttggtgataatggggatctgataattgcaaatcccacacgccatggaaaagaggggagcaagtcgttcaaattcaacaaagtttttggccccactacttctcaaggtaggaacgaatttgacatatgcaatatccctatgcttttgatattgatagcttcattgtatctagtaaggatcgtatatctgtaatgctagcgcaccacatttcccttgcccttccctttcctcttttgtagatgacgtattcaaggacattgaaccacttattagatcagttcttgatggttataatgtttgcatttttgcgtatggtcaaactggatcagggaaaacatacacaatgactggacctgaaaatgcaacagagaatgaatggggtgtcaattacagagctctgaatgatctgttccatatttcacataatcgtggggataccatcatgtatgaaataaatgttcaaatgattgagatatacaatgaacaaatccgtgatcttctttgcagcaatggttcagagaagaaatatccttttccccttcatttattt

SEQ ID NO: 58614 - DNA, 2176 bp, Zea Mays
ttccatccccatgtccgccaccaccaccgagtccccggagagcccggagcggcgatcagatgcggttgcgtggctacggtcgttgttggcgggctctggcctgcctctgcccccgccgcacgtgtccgacgacgacctacggtcctttctcgccgatggcgtgatcctcggcgcagcgctacgcaggctcggatgtgcttctacgtccaaccagggcggagcctcagcggcggcggcggcggggagtgatgtcgagaggttcgtcgcggcaatggagcgcctgggccttcccagctttgccgcctctgaccatgacaggggcccaatgttagctgtcatagtctgtcttcttgcactgaggggtctgtttggttccaatgttggggaaggcttgcattgtagccttgaagcaaaaagtaggatgcacaacatggagtttcccataagggtgaacggctgctgtactcaaaattgtcagtctagagaaaagggtgaagggagcataccaaaggtctccagaagtccagctacgtcagagccatcatctccgatatcaatgcctgaactatcttctatttcaaggcacactcgacataattttcatgaagtcttccatctgagacaaggaatttactctgacatgcctatttctaaagttttggagataatgaaatccaccaacttggatcaaaatagccttatcagagcacgtgaagagaaatataaatcaaggataagagtactagaggcacttgcaagtgggacaggtggacaaatgcaaataaattcaagtgcggcaaatggaaaaataaatattgctgaagatcatgtgctccagatgatgataaacaaaagcaaaattggagaaagaagattagttgataaagatatgtcaagcttgatggctcagaaggaagatgtagctagattgacaaaggataaggaagatatggttaggctgctgaaagataaggaagatataattagattgatgaaagagaaggaagaaatggttttgctgattaaggagaaagatgatatggttacctcgaggaaggagaagattgatggaagagatcaatcagccaatgcatatgcgaataaatcaactacatataatgatgaaaccattaggatgataaaggaaaaagaagacagtaatattacaattatgaaactaaagagcaaattggaagctgtaaaatcattatttgaagagagccacaaccagttagaatctgcaaaggaggaggttcttaagcttcaaaaggacaaggaaaatagtgccaatataatatcaaaactcaggcaagagctttcgttagcacatgaatcttataagacacatattcaagaactggagagtagtgctttgcaggcaagcaaattctttgaacatagaataaaagaagtagatctcatgctcgaagattctataaagaaaagaacagatctagaggaagtattaaaatctagaatggatacttggaagaagaaggaaatcatggatttgaggttatcttctgtttccattaggcatgaaatccaaaactgccagcgaagatggtctgaagaacttaatggccttggacaaagtctcaacatactgataaatgattctgaaaattatcatgctgctttagaagaaaatagaaaattatacaacgagattcaggaactaaaaggaaatataagagtctactgccggataaggccttttattcctggggaggatcagaaatctactacaattaaatatgttggtgataatggggatctgataattgcaaatcccacacgccatggaaaagaggggagcaagtcgttcaaattcaacaaagtttttggccccactacttctcaagatgacgtattcaaggacattgaaccacttattagatcagttcttgatggttataatgtttgcatttttgcgtatggtcaaactggatcagggaaaacatacacaatgactggacctgaaaatgcaacagagaatgaatggggtgtcaattacagagctctgaatgatctgttccatatttcacataatcgtggggataccatcatgtatgaaataaatgttcaaatgattgagatatacaatgaacaaatccgtgatcttctttgcagcaatggttcagagaagaaatatccttttccccttcatttattt

SEQ ID NO: 58615 - DNA, 2372 bp, Zea Mays
tccccatgtccgccaccaccaccgagtccccggagagcccggagcggcgatcagatgcggttgcgtggctacggtcgttgttggcgggctctggcctgcctctgcccccgccgcacgtgtccgacgacgacctacggtcctttctcgccgatggcgtgatcctcggcgcagcgctacgcaggctcggatgtgcttctacgtccaaccagggcggagcctcagcggcggcggcggcggggagtgatgtcgagaggttcgtcgcggcaatggagcgcctgggccttcccagctttgccgcctctgaccatgacaggggcccaatgttagctgtcatagtctgtcttcttgcactgaggggtctgtttggttccaatgttggggaaggcttgcattgtagccttgaagcaaaaagtaggatgcacaacatggagtttcccataagggtgaacggctgctgtactcaaaattgtcagtctagagaaaagggtgaagggagcataccaaaggtctccagaagtccagctacgtcagagccatcatctccgatatcaatgcctgaactatcttctatttcaaggcacactcgacataattttcatgaagtcttccatctgagacaaggaatttactctgacatgcctatttctaaagttttggagataatgaaatccaccaacttggataatgcccctactcagtcacttttgagttttgtgaatgccatccttgatcggatcattgaaaatgagaatggagaaattccttataatatcgcttgcttgttgagaaaggtaataatggagattgaacgccgcatttctactcaagcagaacacataagaaatcaaaatagccttatcagagcacgtgaagagaaatataaatcaaggataagagtactagaggcacttgcaagtgggacaggtggacaaatgcaaataaattcaagtgcggcaaatggaaaaataaatattgctgaagatcatgtgctccagatgatgataaacaaaagcaaaattggagaaagaagattagttgataaagatatgtcaagcttgatggctcagaaggaagatgtagctagattgacaaaggataaggaagatatggttaggctgctgaaagataaggaagatataattagattgatgaaagagaaggaagaaatggttttgctgattaaggagaaagatgatatggttacctcgaggaaggagaagattgatggaagagatcaatcagccaatgcatatgcgaataaatcaactacatataatgatgaaaccattaggatgataaaggaaaaagaagacagtaatattacaattatgaaactaaagagcaaattggaagctgtaaaatcattatttgaagagagccacaaccagttagaatctgcaaaggaggaggttcttaagcttcaaaaggacaaggaaaatagtgccaatataatatcaaaactcaggcaagagctttcgttagcacatgaatcttataagacacatattcaagaactggagagtagtgctttgcaggcaagcaaattctttgaacatagaataaaagaagtagatctcatgctcgaagattctataaagaaaagaacagatctagaggaagtattaaaatctagaatggatacttggaagaagaaggaaatcatggtgaatcaagttttacgtctacaaatacagagcatccaggatttgaggttatcttctgtttccattaggcatgaaatccaaaactgccagcgaagatggtctgaagaacttaatggccttggacaaagtctcaacatactgataaatgattctgaaaattatcatgctgctttagaagaaaatagaaaattatacaacgagattcaggaactaaaaggaaatataagagtctactgccggataaggccttttattcctggggaggatcagaaatctactacaattaaatatgttggtgataatggggatctgataattgcaaatcccacacgccatggaaaagaggggagcaagtcgttcaaattcaacaaagtttttggccccactacttctcaagatgacgtattcaaggacattgaaccacttattagatcagttcttgatggttataatgtttgcatttttgcgtatggtcaaactggatcagggaaaacatacacaatgactggacctgaaaatgcaacagagaatgaatggggtgtcaattacagagctctgaatgatctgttccatatttcacataatcgtggggataccatcatgtatgaaataaatgttcaaatgattgagatatacaatgaacaaatccgtgatcttctttgcagcaatggttcagagaagaaatatccttttccccttcatttattt

SEQ ID NO: 58616 - DNA, 2261 bp, Zea Mays
ctgccttccggccgccgtggatgttgcccctcatccccttccatcctcgctcggatgtgctcgaccttaaatccccgtgaatgccatcgtcgtgatgctcaggtgaggcggcggtgctgcccacgcgccactgccacatgagaggaggagcacaagggcgtcactatgctgagcgcggaggccctaggcccctttcacctcacctccacaacaattgtggccctgagttgcgccggcgctgcctctctgtcctccagtgcatccgctgcgggctttctcctactccagtcctctcctcaccctgaccctgcctcaaatccaatctcactcccatctcgtggtccacatcctcctcgcttctccacgatgacggcggccctgcccagtgtcacggcacgcagcatcgagacgagcgcagaggccctaggccctttccacctcacctccatggcgacgatggccttgagcttcgtggcgcccggtgcctcgcactccggctaggcctgctctaccacgacctggcattatcccgcgtgcatgacaaccagggagaggtcaagattggcgacatcgttctcactctcaccgccatcctccacaagtcccacaccgtccactgcgtaggtataccggagtttatggcaccagagctgtacgaggagtacaactagctggtggacatctacttctttggaatgtgcgtgctcgagatggtgacgtttgagtacccgcacaatgagtgtacacaccagatacatatctacaagaaagtgatctctgtaagaagatccttggacccgatgagccatttcacaacaattgtgattcaggttgaagtttgaaatgattttcctgatttctgaaaaatatagtacccatggattacaccgttgcagcgggcctgaaaattgatcttgcatttacagacgatcatacagccgacttaatttaatcgcatttgattaacaacttatacataacaatgttttattatatattacaggtttttagtgcacccttctcttccatagatgtactattttttacaaagttttgtagttgaagcgtcaattcaactcatctgtcactaagtgaaaaacaaccttgtcagggtgccttcggtttatagccgaactgatacaggctgttacaacattttttgcactttcttgatggatatatgctgcatcgattcttactaaattttgttagctgcatttaagttttaacatgtgaagtatcctagctgtatatatatgtatctttgaataacactattgatatagggccatttatgagtatatagttctttgcttggcactttcatgttccttgtgttgtttactaaatttaggtggacaaacaaactgcaaactagactttttgatgtttgtctcctccctgtttggcagcttagatggtagtgctagcttatattgttggatatgccctgagagagcaaagaacgaagtttgtctttcattaatcttcagtcaatgcactacaatctgcagcccttgagatagtttgattacagagtaatacgtgctattttagcaattcgcttggtttatcgaatgctccttatctaaagtcaattgatatcatgcatgtatttcatttatccaaccactgataactgattagtttatttactttgtccatgaataacatagtatttttgtttgaacttactggtatcaacatattgtttttatcctgtgtaagcataaagagtagtcttgcagcttatgcatccattcctctttgtagggcgcaatgcttttggcccttttgataggctaccaagcactgattggctatgattaataagacatggagccactttacccaagcaggtcaccaggaatagtccgaccctgccgagtggaagaagctacagggagtggacatggaggttcatccgggaagacatgtatgcaaggaaatttgatggttggaagagtgttttgatggaaactgaagttgccactgccactaactcttgcatgagccaaaggatatagattgagtcggtcagacatgcacttatgtgctataaactctcatggttggttggagcaagttactagcttgattgatctgacaagcttggacgatgggtttgcactaatggtggcattgggtaattttcatacatgtatgtatattggtattctagaatctaaataacatgacaaaacactaataattttacccagtccattaacctacgaactgaactgattacaaaaagtaga

SEQ ID NO: 58617 - DNA, 729 bp, Zea Mays
ccgccatcctccacaagtcccacaccgtccactgcgtataccggagtttatggcaccagagctgtacgaggagtacaactagctggtggacatctacttctttggaatgtgcgtgctcgagatggtgacgtttgagtacccgcacaatgagtgtacacaccagatacatatctacaagaaagtgatctctgtaagaagatccttggacccgatgagccatttcacaacaattgtgattcagggcgcaatgcttttggcccttttgataggctaccaagcactgattggctatgattaataagacatggagccactttacccaagcaggtcaccaggaatagtccgaccctgccgagtggaagaagctacagggagtggacatggaggttcatccgggaagacatgtatgcaaggaaatttgatggttggaagagtgttttgatggaaactgaagttgccactgccactaactcttgcatgagccaaaggatatagattgagtcggtcagacatgcacttatgtgctataaactctcatggttggttggagcaagttactagcttgattgatctgacaagcttggacgatgggtttgcactaatggtggcattgggtaattttcatacatgtatgtatattggtattctagaatctaaataacatgacaaaacactaataattttacccagtccattaacctacgaactgaactgattacaaaaagtaga

SEQ ID NO: 58618 - DNA, 512 bp, Zea Mays
aagaaagtgatctctgtaagaagatccttggacccgatgagccatttcacaacaattgtgattcagattggctatgattaataagacatggagccactttacccaagcaggtcaccaggaatagtccgaccctgccgagtggaagaagctacagggagtggacatggaggttcatccgggaagacatgtatgcaaggaaatttgatggttggaagagtgttttgatggaaactgaagttgccactgccactaactcttgcatgagccaaaggatatagattgagtcggtcagacatgcacttatgtgctataaactctcatggttggttggagcaagttactagcttgattgatctgacaagcttggacgatgggtttgcactaatggtggcattgggtaattttcatacatgtatgtatattggtattctagaatctaaataacatgacaaaacactaataattttacccagtccattaacctacgaactgaactgattacaaaaagtaga

SEQ ID NO: 58619 - DNA, 2002 bp, Zea Mays
aaatcacgagcgccagatccagtgctggccagcgccaacccaaaatcaacacgcgatagaggcgccgccgccggagaaaaatacagtaaaggcaaagtgaagcgaagtgccgaactactacgagcaaagagagagagagagggggttggggggtgagggagagagagaaaaaaacagcgtccccgcacgacgctaacacgtcccagatctaacaggaaaaaaaaaccaccccaccacgtcgccaccaactaacccatcatccatcaacgcaggtcctccccggtcacgcggcagtcacccccactctgctttgctctgccgccccgccccgcccgcactgcatcgcgtcctccggcgccctcgctgtcggcgccattggcgggctcgccttcaactgccccgtccgctggaaccaaccaggtctaaacatgcttcatcgttcaaatagccggaaccaaaggaacaggggatcaagaatcaaaacactactccaagctaccttgcttataggtgttattttttggctcctatatcaggggaggaaagaaaaggcagatcaccattcagatacttttaattataatgagaagactggagaaactgtgttcgataaagacagtactaacttgaatgaagatgacaagagaaacactgagaggtcagaagcggaaggacaagtcaacagtgcagatggtaatacagaagttaataataataacaatgaagatgaaactaccggtcatgcagaagaaggcaagcatgatactgaatccaactctgctgctgagagtaaaagtgaagtcaattcaactggagatgatatgtcccgaaacaattatgcacaagaggaaaacactggggaggcaagtggaacgtctcatgaagtggtgcaaggtgaacaatcgaccagtgcaagtggaagcgggaatggatcggatggagatggtgagaaaaatgaggcagttgatattaaaagtggttctgaatcccttcctgatgatgccaaggctgaagcaactgatgaccgtgctactgtcagtcttcctgatgaaaccgggaatataccatcagttcatactgataattcgcaaaatgatgccagtgaaaaccaaggtgatgcaacttacactacctcggattcgtctgagcatggcattgttgaggctgtccatattgaaactggattggaagatgaaagtgcaacagcatcatctgggactggatctggtgatgacaacggtaactcatctgatagcgcctctgcagaagaaaatactgagactgtatctggtgatgatgagaagggcatgggaacaggtacaaccactgaagcgtcatattccatacaacagaactctgagaacagcagtgtctcagctgaggcagagaactcccaaggggattcttccagcggagtgaatggttcttcagaagagacatctaacaagggtgatggagctacagaaacgtataacaagggtgagcaggtggatcccaagattgaaactagcacatccaccaatgccgagcataatgaatctcaaggggctgatggcagctctggatcaaatggtaacggccctgaacaaaccggtaaatctgaaagccagtgatttccaccatcgagagttcgagacacgaatttagtatacaggtttgttttctggagattgaagaggggatagtgcacatagaaaaactgttcactgtggtttatcgagattttagtcgatactgccgaagtataattgtgcagatcgcaagattggttgtctgctatgcttattgcttatggcatgatttctcgtcaagttgtacttgagtcaatatttctgtacggttattaatctcgacatggtactctgttcattgttggatattatgacagtcttacaatattctgcagtgtggccgaaatgccctttgcccgttttgatcactgcgggtacctgtgggtttatacgctcatgtttctcatttacggtcattttttttagagcct

SEQ ID NO: 58620 - DNA, 1095 bp, Zea Mays
ctacagtctacatagtaagaggagtcacccctttacgtacgacgtagtacgtgtttaatttgctccattatggctccaagcagagaggcgtgtgcggtcgccatggcggtcatggcggggccgttccttgcgatggcgagcaacgccgccgtcagcgccagcgccaacagcacgggcaacggtgaggtcaagcggcggcgccggacctcgtccaccaacgccctccagcgcaccgcgtccgacgtctccgcctacgagctccaccaccaccaccacggcgtggtgacgaacaaggacgagaaggcggaggccgagcagcagcagcccgccgtgcctgaggcgtcgccggtactgcagcacgccaagtgcgagtgctgcggcatgtcgcaggagtgcacgcccgagtacatccgcggcgtgcgcgccaggttcgcggggcgctgggtctgcggcctgtgcgcggaggcggtgacggaggaggccgataagaagaagggcgggccgctggaggaggcgctcaaggcgcacatgggcgtgtgcaagcggttcaacggcttcggacggacgcacccggtgctgttccaggccgaggccatgcgcgagatcctccggcgccgggccacggccacgctcggccccaggtccaggtccagcatcaaccccagggaggtcaacagggaagtcgccaaggccgccggcaccgggatctcacgcagctccagctgcatgaccttcatcgccgaccacgacttcaaccaccgggcgtcgtcgtcgatcaacaaaaactgattctcgatcacgacgagtttttagtagcatggcaagcttcgcacttgtttaataattaaccttcaattctttggaggctagaaagctaaggtgcattattaattagttcgcttcatgcgttattaattagctttctttttaggccggctagactagagagtgcatgcatggttctgtttacaaatgccattacgcgctgtttctttttgccgcacttctagctagctttgagctgatgtataggccagtggaatgcattatgaatgcatcgatcgccacctccggcagggttcaggtcgtggctca

SEQ ID NO: 58621 - DNA, 2662 bp, Zea Mays
caaagggactgcaacatgatcaaagaggaaaaagtggaagccgccatcatctccatcaggtcgttctcgcttccgtcggtccatccaaggccatgctatcgacacctccgcagtcttcccatcctccagtacattttttcaactgcccgcgcggtagggaaggcaaagggtgggcatgtcgtcctctcctctgcaccacgtcatccacgacgatggtggaggagactgcttcagtcgccattcgttagtctccgttgctcctccacacgcttggtcgtcgtctctacggttggcccagctttgaataaagctaatttccctgcagcttttgaaaaagagttgctgaaaaaaaatcaggtgaatcgcacattctgtaagttctattcgaaagaggtattttctatacaataaacaccatgaccacaccctgtgtatccacttatgtatctaagcaaattacatatatgtatatatgtacttcgaataagtgctcaattacataggattgataacgatgttatacatgaataaatatatgcatagagatcctacaatataaatgcacatgtatacacatatgttattgagtactcggatggtatttgatcttttcaaaaacaaaaacgggtgaaggttgttgtgctttaatagtctagatgtgcttttaaccctctttttatacaattgtggcattgctgatctaagtttgttacttcatccttatggcttagattctaattatccaacaatatcaatttatatgatctgaattccatactgatgtttgccataaataaactacttacattccaaaatataggttgtttttagttttttttagaaatgtatatcgtgtataataaaggattaacatgtatcaagatgcatatagcagccaacagacttctacatctgatactgaagaacatagatccaaatgtaatgctaaagaagaaatcacaaaggaccaaacaactagcactaggcaactcaaagcaaaagataatatgccttcgtttgaatctcctccaaaaagagtctttcatgtgatttgaacgctgcgccaacagaaacttggcttctaaatggagctggttgttgaaatgagaggacaaatgaggaatggactgaagtggttgcaacgtaggaaatcaggttgctttatgttacacatgttgtttggtggcaaaaatcagtggtccatcagtgcttcctatggccttcgtttcaaggaccgattcttcttcagtggatgctgacagctagacatcccgaaagtcatctggagagtatagctcggcacatgtagcctcctggagtcgttgacaactcagtgccatctgaatcataggacaactgaagcaaagcgagatagtaatggaagaagaattgaaaagatcaggctgcttgccatcatatatatatacatgggaggaggaggaatagtaagtacatcactccgcttttctgttttttggtgctctgctggatgaacaagaactgagctggaacaggagaagctggctacgtgagagcactggctgcctcgtccgaatccctcgtctgttgtttttttagtcgtatacacagacagaaacagactagacttgcttgaggttacactaggcacaacagccatggtggcggcccgccatgagcaagttgcttctagtgaggctggtggatgacgcggcgcgcggcgcccctggcgtagtgcgtcggcctatccgcgtgcctctactgctgggcgcgcgacgacaacgacggcgtggcggcggcccggggggagctgaagctcagcgccctgagcatctcgagccgatgcctacatgcctccggtgtgagcccgatgacgagtctgggcagtagtgtagtcattcaaccttgcgttttgtaggtcttccctcaagtggagaaggagagaaaagtgcttcccttgctgtgaggacttgcggctcgacatcattctcactttcttcccacaatctcatggggtggatgatcgccatagccttctctccgacttccaggttctgtactcctaccaaggggcaacgtgaggtgtccacaggggcgaggccgtgcctccgtcccgccgcccccgacaatgatccccaccggcactttgtacgaaagcacaatattaggacttttttatgatcttttatcttttttatttgaaggcacaataggatccaaagaggtaggttcctttttgtcactgatttcatatacttgaataacatgtgttcggtttgaaagagcacataattgcattcctatttttagtccttacatgattactacatagttgtttaccggtttgaggtctgcagatctcaagctcgctcgcactgcagataccttgtagtttatttttttactgcattgcgactaggccttccaatttgacaaacacaattaagtagcttagttgtcactgacagttgatagtatcgttgtttcagattattacttcaatgcaaataaattatttctaatatatttttgagctcttagaatgcacatgattcaacctatactgcagcaaaattttggtactggtaccacaactttctgagagttaagtcattgtttctagcatttggcatgcaacctattgacttagttgacaagttgaagtctgtatagagaaattaat

SEQ ID NO: 58622 - DNA, 2314 bp, Zea Mays
gggactgcaacatgatcaaagaggaaaaagtggaagccgccatcatctccatcaggtcgttctcgcttccgtcggtccatccaaggccatgctatcgacacctccgcagtcttcccatcctccagtacattttttcaactgcccgcgcggtagggaaggcaaagggtgggcatgtcgtcctctcctctgcaccacgtcatccacgacgatggtggaggagactgcttcagtcgccattcgttagtctccgttgctcctccacacgcttggtcgtcgtctctacggttggcccaggtatgaatacccttttcccatcaaatcttccccagatctgtgtgttattcgtgttagggtttgcatccgctcctccacatcgtgcgctctcactccatagcttcacattaggaatggaggtcgtcaattcaggtcgagtaggagcactctacggctccgcattgctactggtggtccaataatcacaccttcatgatttagtggatttccctcatccatatctccactaacattagaatattccttatcccatcgtcatgaggtcttcctacttttggtctctaaattgtgtatgccttttggagtaatttgctttgtttcgatgcctacatgttagctttgaataaagctaatttccctgcagcttttgaaaaagagttgctgaaaaaaaatcaggtgatccattatacactcatctttgttgtattattacactactattttgcttccaccatgaaattttaatatcttattggagtttgaataaaattttatatttgaatgtctttattttagctatctcacatgtggtggtcctgtaaattgtccattttttttaaaataaaaacaaaatggaaccctaaattaggatggttagcttccttctatgtatacccttttcactttttctttttcttttggaaaaagtaactaagtgttcgagctgcttgctttgtactgatgtcagtttccattaggcaatcacaacaattccacaaggaagcaggtcataagctggagtctaccttgctcctctttttatttgttttctttgcacccatgtccttcctctctgttttcaaaattcttttgttagaagagccatttaacagatgcaatattgtttatttgcggaatgtcaagtgatgggaaatactaagattataacattgtagatattatcatttggtaggttaccatagcccattacctatcttgaaaggattgaatactcaataatcacggcgaaacaggcggtgtcgatatactcaatttttatattctcataaacaagataaactttatcctccctgtatagcttaacatgatgtccctccatacgtacttatgtatcaatgcattgttggtttactattgttcacattcttaatcagcttataggttacgaatctcatttgttttcccttgcattttcccatgtttactgttgttcacattcttgaacaatttatagatcacgaatctcatttgttttctgttgcattttcgcatgttgaacaactaatttgaatcgtcaacaactcatttgaacaacctacgacttacgttgggaacatgtatgtttttcccaacaagcaatatgttatctatttattttccacactcatgacaaccacatatatcattttacttgctattttcggcatggtcacctgctattttctaatcggagcaaggtgaatcgcacattctgtaagttctattcgaaagagcagccaacagacttctacatctgatactgaagaacatagatccaaatgtaatgctaaagaagaaatcacaaaggaccaaacaactagcactaggcaactcaaagcaaaagataatatgccttcgtttgaatctcctccaaaaagagtctttcatgtgatttgaacgctgcgccaacagaaacttggcttctaaatggagctggttgttgaaatgagaggacaaatgaggaatggactgaagtggttgcaacgtaggaaatcaggttgctttatgttacacatgttgtttggtggcaaaaatcagtggtccatcagtgcttcctatggccttcgtttcaaggaccgattcttcttcagtggatgctgacagctagacatcccgaaagtcatctggagagtatagctcggcacatgtagcctcctggagtcgttgacaactcagtgccatctgaatcataggacaactgaagcaaagcgagatagtaatggaagaagaattgaaaagatcaggctgcttgccatcatatatatatacatgggaggaggaggaatagcttcccttgctg

SEQ ID NO: 58623 - DNA, 4658 bp, Zea Mays
gggactgcaacatgatcaaagaggaaaaagtggaagccgccatcatctccatcaggtcgttctcgcttccgtcggtccatccaaggccatgctatcgacacctccgcagtcttcccatcctccagtacattttttcaactgcccgcgcggtagggaaggcaaagggtgggcatgtcgtcctctcctctgcaccacgtcatccacgacgatggtggaggagactgcttcagtcgccattcgttagtctccgttgctcctccacacgcttggtcgtcgtctctacggttggcccagctttgaataaagctaatttccctgcagcttttgaaaaagagttgctgaaaaaaaatcaggtgatccattatacactcatctttgttgtattattacactactattttgcttccaccatgaaattttaatatcttattggagtttgaataaaattttatatttgaatgtctttattttagctatctcacatgtggtggtcctgtaaattgtccattttttttaaaataaaaacaaaatggaaccctaaattaggatggttagcttccttctatgtatacccttttcactttttctttttcttttggaaaaagtaactaagtgttcgagctgcttgctttgtactgatgtcagtttccattaggcaatcacaacaattccacaaggaagcaggtcataagctggagtctaccttgctcctctttttatttgttttctttgcacccatgtccttcctctctgttttcaaaattcttttgttagaagagccatttaacagatgcaatattgtttatttgcggaatgtcaagtgatgggaaatactaagattataacattgtagatattatcatttggtaggttaccatagcccattacctatcttgaaaggattgaatactcaataatcacggcgaaacaggcggtgtcgatatactcaatttttatattctcataaacaagataaactttatcctccctgtatagcttaacatgatgtccctccatacgtacttatgtatcaatgcattgttggtttactattgttcacattcttaatcagcttataggttacgaatctcatttgttttcccttgcattttcccatgtttactgttgttcacattcttgaacaatttatagatcacgaatctcatttgttttctgttgcattttcgcatgttgaacaactaatttgaatcgtcaacaactcatttgaacaacctacgacttacgttgggaacatgtatgtttttcccaacaagcaatatgttatctatttattttccacactcatgacaaccacatatatcattttacttgctattttcggcatggtcacctgctattttctaatcggagcaaggtgaatcgcacattctgtaagttctattcgaaagaggtattttctatacaataaacaccatgaccacaccctgtgtatccacttatgtatctaagcaaattacatatatgtatatatgtacttcgaataagtgctcaattacataggattgataacgatgttatacatgaataaatatatgcatagagatcctacaatataaatgcacatgtatacacatatgttattgagtactcggatggtatttgatcttttcaaaaacaaaaacgggtgaaggttgttgtgctttaatagtctagatgtgcttttaaccctctttttatacaattgtggcattgctgatctaagtttgttacttcatccttatggcttagattctaattatccaacaatatcaatttatatgatctgaattccatactgatgtttgccataaataaactacttacattccaaaatataggttgtttttagttttttttagaaatgtatatcgtgtataataaaggattaacatgtatcaagatgcatatagcagccaacagacttctacatctgatactgaagaacatagatccaaatgtaatgctaaagaagaaatcacaaaggaccaaacaactagcactaggcaactcaaagcaaaagataatatgccttcgtttgaatctcctccaaaaagagtctttcatgtgatttgaacgctgcgccaacagaaacttggcttctaaatggagctggttgttgaaatgagaggacaaatgaggaatggactgaagtggttgcaacgtaggaaatcaggttgctttatgttacacatgttgtttggtggcaaaaatcagtggtccatcagtgcttcctatggccttcgtttcaaggaccgattcttcttcagtggatgctgacagctagacatcccgaaagtcatctggagagtatagctcggcacatgtagcctcctggagtcgttgacaactcagtgccatctgaatcataggacaactgaagcaaagcgagatagtaatggaagaagaattgaaaagatcaggctgcttgccatcatatatatatacatgggaggaggaggaatagtaagtacatcactccgcttttctgttttttggtgctctgctggatgaacaagaactgagctggaacaggagaagctggctacgtgagagcactggctgcctcgtccgaatccctcgtctgttgtttttttagtcgtatacacagacagaaacagactagacttgcttgaggttacactaggcacaacagccatggtggcggcccgccatgagcaagttgcttctagtgaggctggtggatgacgcggcgcgcggcgcccctggcgtagtgcgtcggcctatccgcgtgcctctactgctgggcgcgcgacgacaacgacggcgtggcggcggcccggggggagctgaagctcagcgccctgagcatctcgaggttgtttcgttaatgatatatagttgaaattcctcgggatatcatagcattatgtttgctaggtatcggtggttttagttttgtatatccatgtatattagagtgatgtatcaagcatcttataaatgaattatgtctacaatcggccaacttttattttgattgaggtaaattccatggaagcatcttgggtctgctgcttgatctttatagttcacactttggatggttctggagccataatagaccagattcaatggatggatttttttggctaaaggctattgtcgtcctgagtcctgacggtgctgttcctttttatagttcacatagatgtgaattttaaatgttcaattataattttatacgctatagtaatttttttctacaatctggtcatttaagctcagcttttccttcggggtgaattctgagtgaagttccaaaaataataaaaattctttctcatccctgctctgaccatttagacacacattatgatcactactgagtactgagactgacatttctagatatgatatgctgatgaggaatattccctcgtgatgacatttctagatttgttttagttctaaatacaaaaggtgagcaagagtatggattttgacatataattttttttttaaaatttcaatcatgttgggatatgctagaattaggcataccttcttattaactggctaactttactgtaaaagtgcaattagatacttatgtataccaaacattctagaagagttttatggtggtacgacccagtcgttatcatcctgcccgattgattgagccatgtactgatttttttatctttatgcatattatcagattgttaggtgccacacaagatcggcctaggtctgttatatgcaatgtctatggtgcctacatgccttttgtatttgctaaaaacagtaaaatcaatatttacaatttaaatagttgtgctcttgttctcagccgatgcctacatgcctccggtgtgagcccgatgacgagtctgggcagtagtgtagtcattcaaccttgcgttttgtaggtcttccctcaagtggagaaggagagaaaagtgcttcccttgctgtgaggacttgcggctcgacatcattctcactttcttcccacaatctcatggggtggatgatcgccatagccttctctccgacttccaggttctgtactcctaccaaggggcaacgtgaggtgtccacaggggcgaggccgtgcctccgtcccgccgcccccgacaatgatccccaccggcactttgtacgaaagcacaatattaggacttttttatgatcttttatcttttttatttgaaggcacaataggatccaaagaggtaggttcctttttgtcactgatttcatatacttgaataacatgtgttcggtttgaaagagcacataattgcattcctatttttagtccttacatgattactacatagttgtttaccggtttgaggtctgcagatctcaagctcgctcgcactgcagataccttgtagtttatttttttactgcattgcgactaggccttccaatttgacaaacacaattaagtagcttagttgtcactgacagttgatagtatcgttgtttcagattattacttcaatgcaaataaattatttctaatatatttttgagctcttagaatgcacatgattcaacctatactgcagcaaaattttggtactggtaccacaactttctgagagttaagtcattgtttctagcatttggcatgcaacctattgacttagttgacaagttgaagtctgtatagagaaattaat

SEQ ID NO: 58624 - DNA, 3906 bp, Zea Mays
gggactgcaacatgatcaaagaggaaaaagtggaagccgccatcatctccatcaggtcgttctcgcttccgtcggtccatccaaggccatgctatcgacacctccgcagtcttcccatcctccagtacattttttcaactgcccgcgcggtagggaaggcaaagggtgggcatgtcgtcctctcctctgcaccacgtcatccacgacgatggtggaggagactgcttcagtcgccattcgttagtctccgttgctcctccacacgcttggtcgtcgtctctacggttggcccaggaatggaggtcgtcaattcaggtcgagtaggagcactctacggctccgcattgctactggtggtccaataatcacaccttcatgatttagtggatttccctcatccatatctccactaacattagaatattccttatcccatcgtcatgaggtcttcctacttttggtctctaaattgtgtatgccttttggagtaatttgctttgtttcgatgcctacatgttagctttgaataaagctaatttccctgcagcttttgaaaaagagttgctgaaaaaaaatcaggtgatccattatacactcatctttgttgtattattacactactattttgcttccaccatgaaattttaatatcttattggagtttgaataaaattttatatttgaatgtctttattttagctatctcacatgtggtggtcctgtaaattgtccattttttttaaaataaaaacaaaatggaaccctaaattaggatggttagcttccttctatgtatacccttttcactttttctttttcttttggaaaaagtaactaagtgttcgagctgcttgctttgtactgatgtcagtttccattaggcaatcacaacaattccacaaggaagcaggtcataagctggagtctaccttgctcctctttttatttgttttctttgcacccatgtccttcctctctgttttcaaaattcttttgttagaagagccatttaacagatgcaatattgtttatttgcggaatgtcaagtgatgggaaatactaagattataacattgtagatattatcatttggtaggttaccatagcccattacctatcttgaaaggattgaatactcaataatcacggcgaaacaggcggtgtcgatatactcaatttttatattctcataaacaagataaactttatcctccctgtatagcttaacatgatgtccctccatacgtacttatgtatcaatgcattgttggtttactattgttcacattcttaatcagcttataggttacgaatctcatttgttttcccttgcattttcccatgtttactgttgttcacattcttgaacaatttatagatcacgaatctcatttgttttctgttgcattttcgcatgttgaacaactaatttgaatcgtcaacaactcatttgaacaacctacgacttacgttgggaacatgtatgtttttcccaacaagcaatatgttatctatttattttccacactcatgacaaccacatatatcattttacttgctattttcggcatggtcacctgctattttctaatcggagcaaggtgaatcgcacattctgtaagttctattcgaaagaggtattttctatacaataaacaccatgaccacaccctgtgtatccacttatgtatctaagcaaattacatatatgtatatatgtacttcgaataagtgctcaattacataggattgataacgatgttatacatgaataaatatatgcatagagatcctacaatataaatgcacatgtatacacatatgttattgagtactcggatggtatttgatcttttcaaaaacaaaaacgggtgaaggttgttgtgctttaatagtctagatgtgcttttaaccctctttttatacaattgtggcattgctgatctaagtttgttacttcatccttatggcttagattctaattatccaacaatatcaatttatatgatctgaattccatactgatgtttgccataaataaactacttacattccaaaatataggttgtttttagttttttttagaaatgtatatcgtgtataataaaggattaacatgtatcaagatgcatatagcagccaacagacttctacatctgatactgaagaacatagatccaaatgtaatgctaaagaagaaatcacaaaggaccaaacaactagcactaggcaactcaaagcaaaagataatatgccttcgtttgaatctcctccaaaaagagtctttcatgtgatttgaacgctgcgccaacagaaacttggcttctaaatggagctggttgttgaaatgagaggacaaatgaggaatggactgaagtggttgcaacgtaggaaatcaggttgctttatgttacacatgttgtttggtggcaaaaatcagtggtccatcagtgcttcctatggccttcgtttcaaggaccgattcttcttcagtggatgctgacagctagacatcccgaaagtcatctggagagtatagctcggcacatgtagcctcctggagtcgttgacaactcagtgccatctgaatcataggacaactgaagcaaagcgagatagtaatggaagaagaattgaaaagatcaggctgcttgccatcatatatatatacatgggaggaggaggaatagtaagtacatcactccgcttttctgttttttggtgctctgctggatgaacaagaactgagctggaacaggagaagctggctacgtgagagcactggctgcctcgtccgaatccctcgtctgttgtttttttagtcgtatacacagacagaaacagactagacttgcttgaggttacactaggcacaacagccatggtggcggcccgccatgagcaagttgcttctagtgaggctggtggatgacgcggcgcgcggcgcccctggcgtagtgcgtcggcctatccgcgtgcctctactgctgggcgcgcgacgacaacgacggcgtggcggcggcccggggggagctgaagctcagcgccctgagcatctcgagccgatgcctacatgcctccggtgtgagcccgatgacgagtctgggcagtagtgtagtcattcaaccttgcgttttgtaggtcttccctcaagtggagaaggagagaaaagtgcttcccttgctgtgaggacttgcggctcgacatcattctcactttcttcccacaatctcatggggtggatgatcgccatagccttctctccgacttccaggttctgtactcctaccaaggggcaacgtgaggtgtccacaggggcgaggccgtgcctccgtcccgccgcccccgacaatgatccccaccggcactttgtacgaaagcacaatattaggacttttttatgatcttttatcttttttatttgaaggcacaataggatccaaagaggtaggttcctttttgtcactgatttcatatacttgaataacatgtgttcggtttgaaagagcacataattgcattcctatttttagtccttacatgattactacatagttgtttaccggtttgaggtctgcagatctcaagctcgctcgcactgcagataccttgtagtttatttttttactgcattgcgactaggccttccaatttgacaaacacaattaagtagcttagttgtcactgacagttgatagtatcgttgtttcagattattacttcaatgcaaataaattatttctaatatatttttgagctcttagaatgcacatgattcaacctatactgcagcaaaattttggtactggtaccacaactttctgagagttaagtcattgtttctagcatttggcatgcaacctattgacttagttgacaagttgaagtctgtatagagaaattaat

SEQ ID NO: 58625 - DNA, 2900 bp, Zea Mays
gggactgcaacatgatcaaagaggaaaaagtggaagccgccatcatctccatcaggtcgttctcgcttccgtcggtccatccaaggccatgctatcgacacctccgcagtcttcccatcctccagtacattttttcaactgcccgcgcggtagggaaggcaaagggtgggcatgtcgtcctctcctctgcaccacgtcatccacgacgatggtggaggagactgcttcagtcgccattcgttagtctccgttgctcctccacacgcttggtcgtcgtctctacggttggcccaggaatggaggtcgtcaattcaggtcgagtaggagcactctacggctccgcattgctactggtggtccaataatcacaccttcatgatttagtggatttccctcatccatatctccactaacattagaatattccttatcccatcgtcatgaggtcttcctacttttggtctctaaattgtgtatgccttttggagtaatttgctttgtttcgatgcctacatgttagctttgaataaagctaatttccctgcagcttttgaaaaagagttgctgaaaaaaaatcaggtgatccattatacactcatctttgttgtattattacactactattttgcttccaccatgaaattttaatatcttattggagtttgaataaaattttatatttgaatgtctttattttagctatctcacatgtggtggtcctgtaaattgtccattttttttaaaataaaaacaaaatggaaccctaaattaggatggttagcttccttctatgtatacccttttcactttttctttttcttttggaaaaagtaactaagtgttcgagctgcttgctttgtactgatgtcagtttccattaggcaatcacaacaattccacaaggaagcaggtcataagctggagtctaccttgctcctctttttatttgttttctttgcacccatgtccttcctctctgttttcaaaattcttttgttagaagagccatttaacagatgcaatattgtttatttgcggaatgtcaagtgatgggaaatactaagattataacattgtagatattatcatttggtaggttaccatagcccattacctatcttgaaaggattgaatactcaataatcacggcgaaacaggcggtgtcgatatactcaatttttatattctcataaacaagataaactttatcctccctgtatagcttaacatgatgtccctccatacgtacttatgtatcaatgcattgttggtttactattgttcacattcttaatcagcttataggttacgaatctcatttgttttcccttgcattttcccatgtttactgttgttcacattcttgaacaatttatagatcacgaatctcatttgttttctgttgcattttcgcatgttgaacaactaatttgaatcgtcaacaactcatttgaacaacctacgacttacgttgggaacatgtatgtttttcccaacaagcaatatgttatctatttattttccacactcatgacaaccacatatatcattttacttgctattttcggcatggtcacctgctattttctaatcggagcaaggtgaatcgcacattctccaacagacttctacatctgatactgaagaacatagatccaaatgtaatgctaaagaagaaatcacaaaggaccaaacaactagcactaggcaactcaaagcaaaagataatatgccttcgtttgaatctcctccaaaaagagtctttcatgtgatttgaacgctgcgccaacagaaacttggcttctaaatggagctggttgttgaaatgagaggacaaatgaggaatggactgaagtggttgcaacgtaggaaatcaggttgctttatgttacacatgttgtttggtggcaaaaatcagtggtccatcagtgcttcctatggccttcgtttcaaggaccgattcttcttcagtggatgctgacagctagacatcccgaaagtcatctggagagtatagctcggcacatgtagcctcctggagtcgttgacaactcagtgccatctgaatcataggacaactgaagcaaagcgagatagtaatggaagaagaattgaaaagatcaggctgcttgccatcatatatatatacatgggaggaggaggaatagcttcccttgctgtgaggacttgcggctcgacatcattctcactttcttcccacaatctcatggggtggatgatcgccatagccttctctccgacttccaggttctgtactcctaccaaggggcaacgtgaggtgtccacaggggcgaggccgtgcctccgtcccgccgcccccgacaatgatccccaccggcactttgtacgaaagcacaatattaggacttttttatgatcttttatcttttttatttgaaggcacaataggatccaaagaggtaggttcctttttgtcactgatttcatatacttgaataacatgtgttcggtttgaaagagcacataattgcattcctatttttagtccttacatgattactacatagttgtttaccggtttgaggtctgcagatctcaagctcgctcgcactgcagataccttgtagtttatttttttactgcattgcgactaggccttccaatttgacaaacacaattaagtagcttagttgtcactgacagttgatagtatcgttgtttcagattattacttcaatgcaaataaattatttctaatatatttttgagctcttagaatgcacatgattcaacctatactgcagcaaaattttggtactggtaccacaactttctgagagttaagtcattgtttctagcatttggcatgcaacctattgacttagttgacaagttgaagtctgtatagagaaattaat

SEQ ID NO: 58626 - DNA, 3272 bp, Zea Mays
gggactgcaacatgatcaaagaggaaaaagtggaagccgccatcatctccatcaggtcgttctcgcttccgtcggtccatccaaggccatgctatcgacacctccgcagtcttcccatcctccagtacattttttcaactgcccgcgcggtagggaaggcaaagggtgggcatgtcgtcctctcctctgcaccacgtcatccacgacgatggtggaggagactgcttcagtcgccattcgttagtctccgttgctcctccacacgcttggtcgtcgtctctacggttggcccagcttttgaaaaagagttgctgaaaaaaaatcaggtgatccattatacactcatctttgttgtattattacactactattttgcttccaccatgaaattttaatatcttattggagtttgaataaaattttatatttgaatgtctttattttagctatctcacatgtggtggtcctgtaaattgtccattttttttaaaataaaaacaaaatggaaccctaaattaggatggttagcttccttctatgtatacccttttcactttttctttttcttttggaaaaagtaactaagtgttcgagctgcttgctttgtactgatgtcagtttccattaggcaatcacaacaattccacaaggaagcaggtcataagctggagtctaccttgctcctctttttatttgttttctttgcacccatgtccttcctctctgttttcaaaattcttttgttagaagagccatttaacagatgcaatattgtttatttgcggaatgtcaagtgatgggaaatactaagattataacattgtagatattatcatttggtaggttaccatagcccattacctatcttgaaaggattgaatactcaataatcacggcgaaacaggcggtgtcgatatactcaatttttatattctcataaacaagataaactttatcctccctgtatagcttaacatgatgtccctccatacgtacttatgtatcaatgcattgttggtttactattgttcacattcttaatcagcttataggttacgaatctcatttgttttcccttgcattttcccatgtttactgttgttcacattcttgaacaatttatagatcacgaatctcatttgttttctgttgcattttcgcatgttgaacaactaatttgaatcgtcaacaactcatttgaacaacctacgacttacgttgggaacatgtatgtttttcccaacaagcaatatgttatctatttattttccacactcatgacaaccacatatatcattttacttgctattttcggcatggtcacctgctattttctaatcggagcaaggtgaatcgcacattctgtaagttctattcgaaagaggtattttctatacaataaacaccatgaccacaccctgtgtatccacttatgtatctaagcaaattacatatatgtatatatgtacttcgaataagtgctcaattacataggattgataacgatgttatacatgaataaatatatgcatagagatcctacaatataaatgcacatgtatacacatatgttattgagtactcggatggtatttgatcttttcaaaaacaaaaacgggtgaaggttgttgtgctttaatagtctagatgtgcttttaaccctctttttatacaattgtggcattgctgatctaagtttgttacttcatccttatggcttagattctaattatccaacaatatcaatttatatgatctgaattccatactgatgtttgccataaataaactacttacattccaaaatataggttgtttttagttttttttagaaatgtatatcgtgtataataaaggattaacatgtatcaagatgcatatagcagccaacagacttctacatctgatactgaagaacatagatccaaatgtaatgctaaagaagaaatcacaaaggtacagttcctccaccttattccaaaaactaatgaccagaaaggtagaaatgcatcaacaaaatgagcacataaaaaagcccactacatttttccttctgcaggaccaaacaactagcactaggcaactcaaagcaaaagataatatgccttcgtttgaatctcctccaaaaagagtctttcatgtgatttgaacgctgcgccaacagaaacttggcttctaaatggagctggttgttgaaatgagaggacaaatgaggaatggactgaagtggttgcaacgtaggaaatcaggttgctttatgttacacatgttgtttggtggcaaaaatcagtggtccatcagtgcttcctatggccttcgtttcaaggaccgattcttcttcagtggatgctgacagctagacatcccgaaagtcatctggagagtatagctcggcacatgtagcctcctggagtcgttgacaactcagtgccatctgaatcataggacaactgaagcaaagcgagatagtaatggaagaagaattgaaaagatcaggctgcttgccatcatatatatatacatgggaggaggaggaatagcttcccttgctgtgaggacttgcggctcgacatcattctcactttcttcccacaatctcatggggtggatgatcgccatagccttctctccgacttccaggttctgtactcctaccaaggggcaacgtgaggtgtccacaggggcgaggccgtgcctccgtcccgccgcccccgacaatgatccccaccggcactttgtacgaaagcacaatattaggacttttttatgatcttttatcttttttatttgaaggcacaataggatccaaagaggtaggttcctttttgtcactgatttcatatacttgaataacatgtgttcggtttgaaagagcacataattgcattcctatttttagtccttacatgattactacatagttgtttaccggtttgaggtctgcagatctcaagctcgctcgcactgcagataccttgtagtttatttttttactgcattgcgactaggccttccaatttgacaaacacaattaagtagcttagttgtcactgacagttgatagtatcgttgtttcagattattacttcaatgcaaataaattatttctaatatatttttgagctcttagaatgcacatgattcaacctatactgcagcaaaattttggtactggtaccacaactttctgagagttaagtcattgtttctagcatttggcatgcaacctattgacttagttgacaagttgaagtctgtatagagaaattaat

SEQ ID NO: 58627 - DNA, 3196 bp, Zea Mays
gggactgcaacatgatcaaagaggaaaaagtggaagccgccatcatctccatcaggtcgttctcgcttccgtcggtccatccaaggccatgctatcgacacctccgcagtcttcccatcctccagtacattttttcaactgcccgcgcggtagggaaggcaaagggtgggcatgtcgtcctctcctctgcaccacgtcatccacgacgatggtggaggagactgcttcagtcgccattcgttagtctccgttgctcctccacacgcttggtcgtcgtctctacggttggcccagctttgaataaagctaatttccctgcagcttttgaaaaagagttgctgaaaaaaaatcaggtgatccattatacactcatctttgttgtattattacactactattttgcttccaccatgaaattttaatatcttattggagtttgaataaaattttatatttgaatgtctttattttagctatctcacatgtggtggtcctgtaaattgtccattttttttaaaataaaaacaaaatggaaccctaaattaggatggttagcttccttctatgtatacccttttcactttttctttttcttttggaaaaagtaactaagtgttcgagctgcttgctttgtactgatgtcagtttccattaggcaatcacaacaattccacaaggaagcaggtcataagctggagtctaccttgctcctctttttatttgttttctttgcacccatgtccttcctctctgttttcaaaattcttttgttagaagagccatttaacagatgcaatattgtttatttgcggaatgtcaagtgatgggaaatactaagattataacattgtagatattatcatttggtaggttaccatagcccattacctatcttgaaaggattgaatactcaataatcacggcgaaacaggcggtgtcgatatactcaatttttatattctcataaacaagataaactttatcctccctgtatagcttaacatgatgtccctccatacgtacttatgtatcaatgcattgttggtttactattgttcacattcttaatcagcttataggttacgaatctcatttgttttcccttgcattttcccatgtttactgttgttcacattcttgaacaatttatagatcacgaatctcatttgttttctgttgcattttcgcatgttgaacaactaatttgaatcgtcaacaactcatttgaacaacctacgacttacgttgggaacatgtatgtttttcccaacaagcaatatgttatctatttattttccacactcatgacaaccacatatatcattttacttgctattttcggcatggtcacctgctattttctaatcggagcaaggtgaatcgcacattctgtaagttctattcgaaagaggtattttctatacaataaacaccatgaccacaccctgtgtatccacttatgtatctaagcaaattacatatatgtatatatgtacttcgaataagtgctcaattacataggattgataacgatgttatacatgaataaatatatgcatagagatcctacaatataaatgcacatgtatacacatatgttattgagtactcggatggtatttgatcttttcaaaaacaaaaacgggtgaaggttgttgtgctttaatagtctagatgtgcttttaaccctctttttatacaattgtggcattgctgatctaagtttgttacttcatccttatggcttagattctaattatccaacaatatcaatttatatgatctgaattccatactgatgtttgccataaataaactacttacattccaaaatataggttgtttttagttttttttagaaatgtatatcgtgtataataaaggattaacatgtatcaagatgcatatagcagccaacagacttctacatctgatactgaagaacatagatccaaatgtaatgctaaagaagaaatcacaaaggaccaaacaactagcactaggcaactcaaagcaaaagataatatgccttcgtttgaatctcctccaaaaagagtctttcatgtgatttgaacgctgcgccaacagaaacttggcttctaaatggagctggttgttgaaatgagaggacaaatgaggaatggactgaagtggttgcaacgtaggaaatcaggttgctttatgttacacatgttgtttggtggcaaaaatcagtggtccatcagtgcttcctatggccttcgtttcaaggaccgattcttcttcagtggatgctgacagctagacatcccgaaagtcatctggagagtatagctcggcacatgtagcctcctggagtcgttgacaactcagtgccatctgaatcataggacaactgaagcaaagcgagatagtaatggaagaagaattgaaaagatcaggctgcttgccatcatatatatatacatgggaggaggaggaatagcttcccttgctgtgaggacttgcggctcgacatcattctcactttcttcccacaatctcatggggtggatgatcgccatagccttctctccgacttccaggttctgtactcctaccaaggggcaacgtgaggtgtccacaggggcgaggccgtgcctccgtcccgccgcccccgacaatgatccccaccggcactttgtacgaaagcacaatattaggacttttttatgatcttttatcttttttatttgaaggcacaataggatccaaagaggtaggttcctttttgtcactgatttcatatacttgaataacatgtgttcggtttgaaagagcacataattgcattcctatttttagtccttacatgattactacatagttgtttaccggtttgaggtctgcagatctcaagctcgctcgcactgcagataccttgtagtttatttttttactgcattgcgactaggccttccaatttgacaaacacaattaagtagcttagttgtcactgacagttgatagtatcgttgtttcagattattacttcaatgcaaataaattatttctaatatatttttgagctcttagaatgcacatgattcaacctatactgcagcaaaattttggtactggtaccacaactttctgagagttaagtcattgtttctagcatttggcatgcaacctattgacttagttgacaagttgaagtctgtatagagaaattaat

SEQ ID NO: 58628 - DNA, 3569 bp, Zea Mays
gggactgcaacatgatcaaagaggaaaaagtggaagccgccatcatctccatcaggtcgttctcgcttccgtcggtccatccaaggccatgctatcgacacctccgcagtcttcccatcctccagtacattttttcaactgcccgcgcggtagggaaggcaaagggtgggcatgtcgtcctctcctctgcaccacgtcatccacgacgatggtggaggagactgcttcagtcgccattcgttagtctccgttgctcctccacacgcttggtcgtcgtctctacggttggcccagctttgaataaagctaatttccctgcagcttttgaaaaagagttgctgaaaaaaaatcaggtgatccattatacactcatctttgttgtattattacactactattttgcttccaccatgaaattttaatatcttattggagtttgaataaaattttatatttgaatgtctttattttagctatctcacatgtggtggtcctgtaaattgtccattttttttaaaataaaaacaaaatggaaccctaaattaggatggttagcttccttctatgtatacccttttcactttttctttttcttttggaaaaagtaactaagtgttcgagctgcttgctttgtactgatgtcagtttccattaggcaatcacaacaattccacaaggaagcaggtcataagctggagtctaccttgctcctctttttatttgttttctttgcacccatgtccttcctctctgttttcaaaattcttttgttagaagagccatttaacagatgcaatattgtttatttgcggaatgtcaagtgatgggaaatactaagattataacattgtagatattatcatttggtaggttaccatagcccattacctatcttgaaaggattgaatactcaataatcacggcgaaacaggcggtgtcgatatactcaatttttatattctcataaacaagataaactttatcctccctgtatagcttaacatgatgtccctccatacgtacttatgtatcaatgcattgttggtttactattgttcacattcttaatcagcttataggttacgaatctcatttgttttcccttgcattttcccatgtttactgttgttcacattcttgaacaatttatagatcacgaatctcatttgttttctgttgcattttcgcatgttgaacaactaatttgaatcgtcaacaactcatttgaacaacctacgacttacgttgggaacatgtatgtttttcccaacaagcaatatgttatctatttattttccacactcatgacaaccacatatatcattttacttgctattttcggcatggtcacctgctattttctaatcggagcaaggtgaatcgcacattctgtaagttctattcgaaagaggtattttctatacaataaacaccatgaccacaccctgtgtatccacttatgtatctaagcaaattacatatatgtatatatgtacttcgaataagtgctcaattacataggattgataacgatgttatacatgaataaatatatgcatagagatcctacaatataaatgcacatgtatacacatatgttattgagtactcggatggtatttgatcttttcaaaaacaaaaacgggtgaaggttgttgtgctttaatagtctagatgtgcttttaaccctctttttatacaattgtggcattgctgatctaagtttgttacttcatccttatggcttagattctaattatccaacaatatcaatttatatgatctgaattccatactgatgtttgccataaataaactacttacattccaaaatataggttgtttttagttttttttagaaatgtatatcgtgtataataaaggattaacatgtatcaagatgcatatagcagccaacagacttctacatctgatactgaagaacatagatccaaatgtaatgctaaagaagaaatcacaaaggaccaaacaactagcactaggcaactcaaagcaaaagataatatgccttcgtttgaatctcctccaaaaagagtctttcatgtgatttgaacgctgcgccaacagaaacttggcttctaaatggagctggttgttgaaatgagaggacaaatgaggaatggactgaagtggttgcaacgtaggaaatcaggttgctttatgttacacatgttgtttggtggcaaaaatcagtggtccatcagtgcttcctatggccttcgtttcaaggaccgattcttcttcagtggatgctgacagctagacatcccgaaagtcatctggagagtatagctcggcacatgtagcctcctggagtcgttgacaactcagtgccatctgaatcataggacaactgaagcaaagcgagatagtaatggaagaagaattgaaaagatcaggctgcttgccatcatatatatatacatgggaggaggaggaatagtaagtacatcactccgcttttctgttttttggtgctctgctggatgaacaagaactgagctggaacaggagaagctggctacgtgagagcactggctgcctcgtccgaatccctcgtctgttgtttttttagtcgtatacacagacagaaacagactagacttgcttgaggttacactaggcacaacagccatggtggcggcccgccatgagcaagttgcttctagtgaggctggtggatgacgcggcgcgcggcgcccctggcgtagtgcgtcggcctatccgcgtgcctctactgctgggcgcgcgacgacaacgacggcgtggcggcggcccggggggagctgaagctcagcgccctgagcatctcgaggcttcccttgctgtgaggacttgcggctcgacatcattctcactttcttcccacaatctcatggggtggatgatcgccatagccttctctccgacttccaggttctgtactcctaccaaggggcaacgtgaggtgtccacaggggcgaggccgtgcctccgtcccgccgcccccgacaatgatccccaccggcactttgtacgaaagcacaatattaggacttttttatgatcttttatcttttttatttgaaggcacaataggatccaaagaggtaggttcctttttgtcactgatttcatatacttgaataacatgtgttcggtttgaaagagcacataattgcattcctatttttagtccttacatgattactacatagttgtttaccggtttgaggtctgcagatctcaagctcgctcgcactgcagataccttgtagtttatttttttactgcattgcgactaggccttccaatttgacaaacacaattaagtagcttagttgtcactgacagttgatagtatcgttgtttcagattattacttcaatgcaaataaattatttctaatatatttttgagctcttagaatgcacatgattcaacctatactgcagcaaaattttggtactggtaccacaactttctgagagttaagtcattgtttctagcatttggcatgcaacctattgacttagttgacaagttgaagtctgtatagagaaattaat

SEQ ID NO: 58629 - DNA, 3533 bp, Zea Mays
gggactgcaacatgatcaaagaggaaaaagtggaagccgccatcatctccatcaggtcgttctcgcttccgtcggtccatccaaggccatgctatcgacacctccgcagtcttcccatcctccagtacattttttcaactgcccgcgcggtagggaaggcaaagggtgggcatgtcgtcctctcctctgcaccacgtcatccacgacgatggtggaggagactgcttcagtcgccattcgttagtctccgttgctcctccacacgcttggtcgtcgtctctacggttggcccaggtatgaatacccttttcccatcaaatcttccccagatctgtgtgttattcgtgttagggtttgcatccgctcctccacatcgtgcgctctcactccatagcttcacattaggaatggaggtcgtcaattcaggtcgagtaggagcactctacggctccgcattgctactggtggtccaataatcacaccttcatgatttagtggatttccctcatccatatctccactaacattagaatattccttatcccatcgtcatgaggtcttcctacttttggtctctaaattgtgtatgccttttggagtaatttgctttgtttcgatgcctacatgttagctttgaataaagctaatttccctgcagcttttgaaaaagagttgctgaaaaaaaatcaggtgatccattatacactcatctttgttgtattattacactactattttgcttccaccatgaaattttaatatcttattggagtttgaataaaattttatatttgaatgtctttattttagctatctcacatgtggtggtcctgtaaattgtccattttttttaaaataaaaacaaaatggaaccctaaattaggatggttagcttccttctatgtatacccttttcactttttctttttcttttggaaaaagtaactaagtgttcgagctgcttgctttgtactgatgtcagtttccattaggcaatcacaacaattccacaaggaagcaggtcataagctggagtctaccttgctcctctttttatttgttttctttgcacccatgtccttcctctctgttttcaaaattcttttgttagaagagccatttaacagatgcaatattgtttatttgcggaatgtcaagtgatgggaaatactaagattataacattgtagatattatcatttggtaggttaccatagcccattacctatcttgaaaggattgaatactcaataatcacggcgaaacaggcggtgtcgatatactcaatttttatattctcataaacaagataaactttatcctccctgtatagcttaacatgatgtccctccatacgtacttatgtatcaatgcattgttggtttactattgttcacattcttaatcagcttataggttacgaatctcatttgttttcccttgcattttcccatgtttactgttgttcacattcttgaacaatttatagatcacgaatctcatttgttttctgttgcattttcgcatgttgaacaactaatttgaatcgtcaacaactcatttgaacaacctacgacttacgttgggaacatgtatgtttttcccaacaagcaatatgttatctatttattttccacactcatgacaaccacatatatcattttacttgctattttcggcatggtcacctgctattttctaatcggagcaaggtgaatcgcacattctgtaagttctattcgaaagaggtattttctatacaataaacaccatgaccacaccctgtgtatccacttatgtatctaagcaaattacatatatgtatatatgtacttcgaataagtgctcaattacataggattgataacgatgttatacatgaataaatatatgcatagagatcctacaatataaatgcacatgtatacacatatgttattgagtactcggatggtatttgatcttttcaaaaacaaaaacgggtgaaggttgttgtgctttaatagtctagatgtgcttttaaccctctttttatacaattgtggcattgctgatctaagtttgttacttcatccttatggcttagattctaattatccaacaatatcaatttatatgatctgaattccatactgatgtttgccataaataaactacttacattccaaaatataggttgtttttagttttttttagaaatgtatatcgtgtataataaaggattaacatgtatcaagatgcatatagcagccaacagacttctacatctgatactgaagaacatagatccaaatgtaatgctaaagaagaaatcacaaaggaccaaacaactagcactaggcaactcaaagcaaaagataatatgccttcgtttgaatctcctccaaaaagagtctttcatgtgatttgaacgctgcgccaacagaaacttggcttctaaatggagctggttgttgaaatgagaggacaaatgaggaatggactgaagtggttgcaacgtaggaaatcaggttgctttatgttacacatgttgtttggtggcaaaaatcagtggtccatcagtgcttcctatggccttcgtttcaaggaccgattcttcttcagtggatgctgacagctagacatcccgaaagtcatctggagagtatagctcggcacatgtagcctcctggagtcgttgacaactcagtgccatctgaatcataggacaactgaagcaaagcgagatagtaatggaagaagaattgaaaagatcaggctgcttgccatcatatatatatacatgggaggaggaggaatagcttcccttgctgtgaggacttgcggctcgacatcattctcactttcttcccacaatctcatggggtggatgatcgccatagccttctctccgacttccaggttctgtactcctaccaaggggcaacgtgaggtgtccacaggggcgaggccgtgcctccgtcccgccgcccccgacaatgatccccaccggcactttgtacgaaagcacaatattaggacttttttatgatcttttatcttttttatttgaaggcacaataggatccaaagaggtaggttcctttttgtcactgatttcatatacttgaataacatgtgttcggtttgaaagagcacataattgcattcctatttttagtccttacatgattactacatagttgtttaccggtttgaggtctgcagatctcaagctcgctcgcactgcagataccttgtagtttatttttttactgcattgcgactaggccttccaatttgacaaacacaattaagtagcttagttgtcactgacagttgatagtatcgttgtttcagattattacttcaatgcaaataaattatttctaatatatttttgagctcttagaatgcacatgattcaacctatactgcagcaaaattttggtactggtaccacaactttctgagagttaagtcattgtttctagcatttggcatgcaacctattgacttagttgacaagttgaagtctgtatagagaaattaat

SEQ ID NO: 58630 - DNA, 3597 bp, Zea Mays
gggactgcaacatgatcaaagaggaaaaagtggaagccgccatcatctccatcaggtcgttctcgcttccgtcggtccatccaaggccatgctatcgacacctccgcagtcttcccatcctccagtacattttttcaactgcccgcgcggtagggaaggcaaagggtgggcatgtcgtcctctcctctgcaccacgtcatccacgacgatggtggaggagactgcttcagtcgccattcgttagtctccgttgctcctccacacgcttggtcgtcgtctctacggttggcccaggaatggaggtcgtcaattcaggtcgagtaggagcactctacggctccgcattgctactggtggtccaataatcacaccttcatgatttagtggatttccctcatccatatctccactaacattagaatattccttatcccatcgtcatgaggtcttcctacttttggtctctaaattgtgtatgccttttggagtaatttgctttgtttcgatgcctacatgttagctttgaataaagctaatttccctgcagcttttgaaaaagagttgctgaaaaaaaatcaggtgatccattatacactcatctttgttgtattattacactactattttgcttccaccatgaaattttaatatcttattggagtttgaataaaattttatatttgaatgtctttattttagctatctcacatgtggtggtcctgtaaattgtccattttttttaaaataaaaacaaaatggaaccctaaattaggatggttagcttccttctatgtatacccttttcactttttctttttcttttggaaaaagtaactaagtgttcgagctgcttgctttgtactgatgtcagtttccattaggcaatcacaacaattccacaaggaagcaggtcataagctggagtctaccttgctcctctttttatttgttttctttgcacccatgtccttcctctctgttttcaaaattcttttgttagaagagccatttaacagatgcaatattgtttatttgcggaatgtcaagtgatgggaaatactaagattataacattgtagatattatcatttggtaggttaccatagcccattacctatcttgaaaggattgaatactcaataatcacggcgaaacaggcggtgtcgatatactcaatttttatattctcataaacaagataaactttatcctccctgtatagcttaacatgatgtccctccatacgtacttatgtatcaatgcattgttggtttactattgttcacattcttaatcagcttataggttacgaatctcatttgttttcccttgcattttcccatgtttactgttgttcacattcttgaacaatttatagatcacgaatctcatttgttttctgttgcattttcgcatgttgaacaactaatttgaatcgtcaacaactcatttgaacaacctacgacttacgttgggaacatgtatgtttttcccaacaagcaatatgttatctatttattttccacactcatgacaaccacatatatcattttacttgctattttcggcatggtcacctgctattttctaatcggagcaaggtgaatcgcacattctgtaagttctattcgaaagaggtattttctatacaataaacaccatgaccacaccctgtgtatccacttatgtatctaagcaaattacatatatgtatatatgtacttcgaataagtgctcaattacataggattgataacgatgttatacatgaataaatatatgcatagagatcctacaatataaatgcacatgtatacacatatgttattgagtactcggatggtatttgatcttttcaaaaacaaaaacgggtgaaggttgttgtgctttaatagtctagatgtgcttttaaccctctttttatacaattgtggcattgctgatctaagtttgttacttcatccttatggcttagattctaattatccaacaatatcaatttatatgatctgaattccatactgatgtttgccataaataaactacttacattccaaaatataggttgtttttagttttttttagaaatgtatatcgtgtataataaaggattaacatgtatcaagatgcatatagcagccaacagacttctacatctgatactgaagaacatagatccaaatgtaatgctaaagaagaaatcacaaaggtacagttcctccaccttattccaaaaactaatgaccagaaaggtagaaatgcatcaacaaaatgagcacataaaaaagcccactacatttttccttctgcaggaccaaacaactagcactaggcaactcaaagcaaaagataatatgccttcgtttgaatctcctccaaaaagagtctttcatgtgatttgaacgctgcgccaacagaaacttggcttctaaatggagctggttgttgaaatgagaggacaaatgaggaatggactgaagtggttgcaacgtaggaaatcaggttgctttatgttacacatgttgtttggtggcaaaaatcagtggtccatcagtgcttcctatggccttcgtttcaaggaccgattcttcttcagtggatgctgacagctagacatcccgaaagtcatctggagagtatagctcggcacatgtagcctcctggagtcgttgacaactcagtgccatctgaatcataggacaactgaagcaaagcgagatagtaatggaagaagaattgaaaagatcaggctgcttgccatcatatatatatacatgggaggaggaggaataatatgatatgctgatgaggaatattccctcgtgatgacatttctagatttgttttagttctaaatacaaaaggcttcccttgctgtgaggacttgcggctcgacatcattctcactttcttcccacaatctcatggggtggatgatcgccatagccttctctccgacttccaggttctgtactcctaccaaggggcaacgtgaggtgtccacaggggcgaggccgtgcctccgtcccgccgcccccgacaatgatccccaccggcactttgtacgaaagcacaatattaggacttttttatgatcttttatcttttttatttgaaggcacaataggatccaaagaggtaggttcctttttgtcactgatttcatatacttgaataacatgtgttcggtttgaaagagcacataattgcattcctatttttagtccttacatgattactacatagttgtttaccggtttgaggtctgcagatctcaagctcgctcgcactgcagataccttgtagtttatttttttactgcattgcgactaggccttccaatttgacaaacacaattaagtagcttagttgtcactgacagttgatagtatcgttgtttcagattattacttcaatgcaaataaattatttctaatatatttttgagctcttagaatgcacatgattcaacctatactgcagcaaaattttggtactggtaccacaactttctgagagttaagtcattgtttctagcatttggcatgcaacctattgacttagttgacaagttgaagtctgtatagagaaattaat

SEQ ID NO: 58631 - DNA, 3215 bp, Zea Mays
gggactgcaacatgatcaaagaggaaaaagtggaagccgccatcatctccatcaggtcgttctcgcttccgtcggtccatccaaggccatgctatcgacacctccgcagtcttcccatcctccagtacattttttcaactgcccgcgcggtagggaaggcaaagggtgggcatgtcgtcctctcctctgcaccacgtcatccacgacgatggtggaggagactgcttcagtcgccattcgttagtctccgttgctcctccacacgcttggtcgtcgtctctacggttggcccaggaatggaggtcgtcaattcaggtcgagtaggagcactctacggctccgcattgctactggtggtccaataatcacaccttcatgatttagtggatttccctcatccatatctccactaacattagaatattccttatcccatcgtcatgaggtcttcctacttttggtctctaaattgtgtatgccttttggagtaatttgctttgtttcgatgcctacatgttagctttgaataaagctaatttccctgcagcttttgaaaaagagttgctgaaaaaaaatcaggtgatccattatacactcatctttgttgtattattacactactattttgcttccaccatgaaattttaatatcttattggagtttgaataaaattttatatttgaatgtctttattttagctatctcacatgtggtggtcctgtaaattgtccattttttttaaaataaaaacaaaatggaaccctaaattaggatggttagcttccttctatgtatacccttttcactttttctttttcttttggaaaaagtaactaagtgttcgagctgcttgctttgtactgatgtcagtttccattaggcaatcacaacaattccacaaggaagcaggtcataagctggagtctaccttgctcctctttttatttgttttctttgcacccatgtccttcctctctgttttcaaaattcttttgttagaagagccatttaacagatgcaatattgtttatttgcggaatgtcaagtgatgggaaatactaagattataacattgtagatattatcatttggtaggttaccatagcccattacctatcttgaaaggattgaatactcaataatcacggcgaaacaggcggtgtcgatatactcaatttttatattctcataaacaagataaactttatcctccctgtatagcttaacatgatgtccctccatacgtacttatgtatcaatgcattgttggtttactattgttcacattcttaatcagcttataggttacgaatctcatttgttttcccttgcattttcccatgtttactgttgttcacattcttgaacaatttatagatcacgaatctcatttgttttctgttgcattttcgcatgttgaacaactaatttgaatcgtcaacaactcatttgaacaacctacgacttacgttgggaacatgtgaatcgcacattctgtaagttctattcgaaagagccaacagacttctacatctgatactgaagaacatagatccaaatgtaatgctaaagaagaaatcacaaaggaccaaacaactagcactaggcaactcaaagcaaaagataatatgccttcgtttgaatctcctccaaaaagagtctttcatgtgatttgaacgctgcgccaacagaaacttggcttctaaatggagctggttgttgaaatgagaggacaaatgaggaatggactgaagtggttgcaacgtaggaaatcaggttgctttatgttacacatgttgtttggtggcaaaaatcagtggtccatcagtgcttcctatggccttcgtttcaaggaccgattcttcttcagtggatgctgacagctagacatcccgaaagtcatctggagagtatagctcggcacatgtagcctcctggagtcgttgacaactcagtgccatctgaatcataggacaactgaagcaaagcgagatagtaatggaagaagaattgaaaagatcaggctgcttgccatcatatatatatacatgggaggaggaggaatagagaagctggctacgtgagagcactggctgcctcgtccgaatccctcgtctgttgtttttttagtcgtatacacagacagaaacagactagacttgcttgaggttacactaggcacaacagccatggtggcggcccgccatgagcaagttgcttctagtgaggctggtggatgacgcggcgcgcggcgcccctggcgtagtgcgtcggcctatccgcgtgcctctactgctgggcgcgcgacgacaacgacggcgtggcggcggcccggggggagctgaagctcagcgccctgagcatctcgagccgatgcctacatgcctccggtgtgagcccgatgacgagtctgggcagtagtgtagtcattcaaccttgcgttttgtaggtcttccctcaagtggagaaggagagaaaagtgcttcccttgctgtgaggacttgcggctcgacatcattctcactttcttcccacaatctcatggggtggatgatcgccatagccttctctccgacttccaggttctgtactcctaccaaggggcaacgtgaggtgtccacaggggcgaggccgtgcctccgtcccgccgcccccgacaatgatccccaccggcactttgtacgaaagcacaatattaggacttttttatgatcttttatcttttttatttgaaggcacaataggatccaaagaggtaggttcctttttgtcactgatttcatatacttgaataacatgtgttcggtttgaaagagcacataattgcattcctatttttagtccttacatgattactacatagttgtttaccggtttgaggtctgcagatctcaagctcgctcgcactgcagataccttgtagtttatttttttactgcattgcgactaggccttccaatttgacaaacacaattaagtagcttagttgtcactgacagttgatagtatcgttgtttcagattattacttcaatgcaaataaattatttctaatatatttttgagctcttagaatgcacatgattcaacctatactgcagcaaaattttggtactggtaccacaactttctgagagttaagtcattgtttctagcatttggcatgcaacctattgacttagttgacaagttgaagtctgtatagagaaattaat

SEQ ID NO: 58632 - DNA, 1672 bp, Zea Mays
gggactgcaacatgatcaaagaggaaaaagtggaagccgccatcatctccatcaggtcgttctcgcttccgtcggtccatccaaggccatgctatcgacacctccgcagtcttcccatcctccagtacattttttcaactgcccgcgcggtagggaaggcaaagggtgggcatgtcgtcctctcctctgcaccacgtcatccacgacgatggtggaggagactgcttcagtcgccattcgttagtctccgttgctcctccacacgcttggtcgtcgtctctacggttggcccagctttgaataaagctaatttccctgcagcttttgaaaaagagttgctgaaaaaaaatcaggtgaatcgcacattctgtaagttctattcgaaagagccaacagacttctacatctgatactgaagaacatagatccaaatgtaatgctaaagaagaaatcacaaaggaccaaacaactagcactaggcaactcaaagcaaaagataatatgccttcgtttgaatctcctccaaaaagagtctttcatgtgatttgaacgctgcgccaacagaaacttggcttctaaatggagctggttgttgaaatgagaggacaaatgaggaatggactgaagtggttgcaacgtaggaaatcaggttgctttatgttacacatgttgtttggtggcaaaaatcagtggtccatcagtgcttcctatggccttcgtttcaaggaccgattcttcttcagtggatgctgacagctagacatcccgaaagtcatctggagagtatagctcggcacatgtagcctcctggagtcgttgacaactcagtgccatctgaatcataggacaactgaagcaaagcgagatagtaatggaagaagaattgaaaagatcaggctgcttgccatcatatatatatacatgggaggaggaggaatagcttcccttgctgtgaggacttgcggctcgacatcattctcactttcttcccacaatctcatggggtggatgatcgccatagccttctctccgacttccaggttctgtactcctaccaaggggcaacgtgaggtgtccacaggggcgaggccgtgcctccgtcccgccgcccccgacaatgatccccaccggcactttgtacgaaagcacaatattaggacttttttatgatcttttatcttttttatttgaaggcacaataggatccaaagaggtaggttcctttttgtcactgatttcatatacttgaataacatgtgttcggtttgaaagagcacataattgcattcctatttttagtccttacatgattactacatagttgtttaccggtttgaggtctgcagatctcaagctcgctcgcactgcagataccttgtagtttatttttttactgcattgcgactaggccttccaatttgacaaacacaattaagtagcttagttgtcactgacagttgatagtatcgttgtttcagattattacttcaatgcaaataaattatttctaatatatttttgagctcttagaatgcacatgattcaacctatactgcagcaaaattttggtactggtaccacaactttctgagagttaagtcattgtttctagcatttggcatgcaacctattgacttagttgacaagttgaagtctgtatagagaaattaat

SEQ ID NO: 58633 - DNA, 1312 bp, Zea Mays
cttttgtcaacttcaatataatctctactactaattatgtgagtaacataggcgtccacacctatggttctgccgttctgccacgcgcagcccacatcccgcccgcgaccgcaccccaacccgcatcccgccggcagccccgcatcccgccctcccgccggaccgcttccagtctttcatgtgatttgaacgctgcgccaacagaaacttggcttctaaatggagctggttgttgaaatgagaggacaaatgaggaatggactgaagtggttgcaacgtaggaaatcaggttgctttatgttacacatgttgtttggtggcaaaaatcagtggtccatcagtgcttcctatggccttcgtttcaaggaccgattcttcttcagtggatgctgacagctagacatcccgaaagtcatctggagagtatagctcggcacatgtagcctcctggagtcgttgacaactcagtgccatctgaatcataggacaactgaagcaaagcgagatagtaatggaagaagaattgaaaagatcaggctgcttgccatcatatatatatacatgggaggaggaggaatagcttcccttgctgtgaggacttgcggctcgacatcattctcactttcttcccacaatctcatggggtggatgatcgccatagccttctctccgacttccaggttctgtactcctaccaaggggcaacgtgaggtgtccacaggggcgaggccgtgcctccgtcccgccgcccccgacaatgatccccaccggcactttgtacgaaagcacaatattaggacttttttatgatcttttatcttttttatttgaaggcacaataggatccaaagaggtaggttcctttttgtcactgatttcatatacttgaataacatgtgttcggtttgaaagagcacataattgcattcctatttttagtccttacatgattactacatagttgtttaccggtttgaggtctgcagatctcaagctcgctcgcactgcagataccttgtagtttatttttttactgcattgcgactaggccttccaatttgacaaacacaattaagtagcttagttgtcactgacagttgatagtatcgttgtttcagattattacttcaatgcaaataaattatttctaatatatttttgagctcttagaatgcacatgattcaacctatactgcagcaaaattttggtactggtaccacaactttctgagagttaagtcattgtttctagcatttggcatgcaacctattgacttagttgacaagttgaagtctgtatagagaaattaat

SEQ ID NO: 58634 - DNA, 557 bp, Zea Mays
aaagtacccatctcattcagacccatcagatacgaccagaatctccgttcctggagagccaggcttcgctcgttccgtcctctcgcagctctgtcctcgcgtggagctcacgctagggttgccaccgcctcgcctggagctcgcctcgccgcctcgcctggagctcgcgctagggccagggtcctctcacagcagcctctgtcctcgcctagagctcgcgctagggttcctctcgcagtcgtcgctgttgaccgtcctcgcctggagcttgcgctagggttcctctcgcagtcgtcgctgttgagaactgaaaacagaatgagtggctgcaatggacgctggtaaactgctaatgcatacttgtaaactacaattttgtaaagtgttcttgtgcctcagtatcaatattataattgtaatttataattttgtaaaggatatgtaaaggataagttattgtaatttataattgtataaatttggttttgtgtaatttatggcgttgtaatttatggcattgtaattttagaaatgtagctgagtcgtgcaacttagag

SEQ ID NO: 58635 - DNA, 1156 bp, Zea Mays
aaagtacccatctcattcagacccatcagatacgaccagaatctccgttcctggagagccaggcttcgctcgttccgtcctctcgcagctctgtcctcgcgtggagctcacgctagggttgccaccgcctcgcctggagctcgcctcgccgcctcgcctggagctcgcgctagggccagggtcctctcacagcagcctctgtcctcgcctagagctcgcgctagggttcctctcgcagtcgtcgctgttgaccgtcctcgcctggagcttgcgctagggttcctctcgcagtcgtcgctgttgaggtcagactctgccttctcctctcgccctctagctctctctctcccatctcctctcgccctccagctctccctctcccgtctcctctcctcgctccgaacactggctcatcccgtcccgatctgcccgtgctggcgctgccgcctcatgcctggttcgctttctggttagagacgtcgcggcgtgatgtttggaggaagggcgggattcggcggcggggcatttagttttgggtggtctgatttggctataacgtgtgattgtcttcttcagagctcattgttatgggctgggtactggttatggatctgaatgggctcatagatccaagcgaattaggaatgcccaattcttgcctagcaggatgcgtcgattggctcacatttgaggctcgggatccgctgattggttcacttttgagctcgaaaccagatgaggaggtgccatacaattgtcgtaggatcatactgcagtctgcagcctatcacatacatttctttgtattagacttccgtgtggggcaaacctttgggaaagagaagagctagatcatgcagaagaggagaagcattgatcaaattgttcagaaaagagtactccgaactgaaaacagaatgagtggctgcaatggacgctggtaaactgctaatgcatacttgtaaactacaattttgtaaagtgttcttgtgcctcagtatcaatattataattgtaatttataattttgtaaaggatatgtaaaggataagttattgtaatttataattgtataaatttggttttgtgtaatttatggcgttgtaatttatggcattgtaattttagaaatgtagctgagtcgtgcaacttagag

SEQ ID NO: 58636 - DNA, 1522 bp, Zea Mays
atggccgacctctcctttgagcctgggcgtcctggggaatcaacaattgagcttggtcgagttattgaccgtggcctcagggagagtcgagctgttgacatggagttcttgtgtgttgttgctgggaagcatgtctggtctgtgcgtgtggaccttcacatcttggataacggagggaatctcattgatgcagctaatatcgttgcattggcagctttatctactttctggaggcctgaatgcacggttggtggggacgatggtcagcaagttacagtgcatgatcctgaggttagggatctacttcctcttacgatacaccatatgcccatagttgtaacatttgcatattttggtgaaggtaacatcgtggttcttgatcccacatacaaggaagaagcagtaatgggagggaggatgactgctatagttaactcaaatggggatgtttgtgccattcagaaagctggtggagagggtcccgtgtcaagtgttaccatgcagtgtttaagaattgcttcggtaaaggctgctgttataacaagcaaaataaagaaagcgaaatttaagtttgccttccttatttttgacattctttttagtggaaataacattaaaataatgaatcttggaggagatggtcaaggtgcaagtggtgtaattacagatgttctacgaaacactgatgatgatgctgttgatccccatctagagcgcattaagaatcaggctggggatgaagaaagcgatgaagaggatgaagattttgttgcggataaggatgatagtggatctcctactgatgactcaggtgatgaggaatgcactgatgttttgagctaattgtggtgttacaggatgctgcgtttgctaatcgtacgaaatcattttcggtcaaactccctttctattattactagccatccaagatttgctatatagttgtttatcacttcatgagcaggtttcattcatcgctgttgcctgttggtcttctattcaatttatgtagtctcccttctccatttggtgaagggtgaaggattattttgtttctccctgttgatgttgcatgcatagtgtgtgtttaggagggctcctcgggtctatgtgttatcttacaatggtaataataggtatggtgtagtaagaatgtaagtcataatgtgttattttctgtcattaataaaatgtagtgatttatgttggatttgttatttgcacgatatgctgctcgtaacatatcttggcaatggaatggaattgtaatttacatatccttttgaaagggactaaatggcgagccattatcataatgccacatagatgccgagccattatcatagataggcttgttccattgacaattgacatatgcttttgaaatattatgcagttctattttgactgggaaaatgtgtcttccaattgcaaccaccacaacctttaataatattgtttagttaaatatatagcttaattgagaaaatatacatgcacatcctatcctttataacagcga

SEQ ID NO: 58637 - DNA, 565 bp, Zea Mays
ctcggcaggttcagccaaatcattcgcccgtggatccaggaggatccgtcacccacccgtagcatttcagcttgatggatccaagtaggcattcaatggcagccaacaactctgcaaagccgtcgtggctgggtgccagaatctcgcggcgcatgcaacggggctcgagtgccggtgcccggcgccatcgatccagcagcgcctctatataagccccgcgcgcgcccgcaggtgcagtgtcccagtgctacactcgcatgaactagcatcggccgctgctcctctctttctcctccaatcgtcggtggtctttttcgggcctgaaacatacgggagctagcagaggagagagctagcaaaggaagagatcgatcgagagaggtagtaggcaagatgagcggcaaggctctcctagttgtcgccgtcgtcctcttggtgggcgtagcctctcggtgctcgggcagcaggggcctgcatcagcagggcgatcacgttgctgaacagaagtcttgctgctggtgagctaataatcttgtgccgtacgtacgtgctgtctattattttg

SEQ ID NO: 58638 - DNA, 5750 bp, Zea Mays
cgcacaacctctcgcccacgtgaaagttgcgtgacgtcgattccaaaaggatcacaatttcgatgccacctcgatctcacatatttattttgtgaaatgtcgagtcttgtgtctgtttaaaattcatggattaagcgaatacgaatttggaattcaaccatttcacaaaagctcaagttcggtgtagtattcatctccataatttaaacaattaaaaaggtttcatgaactttggggttacctaatctcatttgctggtgaaatttgtgttgttcaaattacgcgtgcaaatgaatatgaaaatcagaaaatgtcggatttaatgtaaaatttggagcccacatgttgtccgagaaaaacaacgcgccagctcagtaatcgaattattctttagtcaaatgaccgatggcagatgagactcataaaaatttgactggattaaagatagtctaaactaccaaagtcgatctcgtttgattcggtccgtatgtttctcatcagttctaaatctttggatataaataactggtaaaagtttatctgactccggagtattccctagatcaaatcttgttcaaatattgccgtcgatcttgttttagtctgacccatttatacatccgtcaaaccctgattttttttagaaccgggaaatgtatttaatcttttccaaaaaaagagagaagtggaaaaatccattttttcttatcttccacacgtccctttcttctagtatcttcataccaccgcagcccaggctctcagccttatccccttcgtacaacactatcaccaggaattcccttgcctttgctcgttctcatggccgagcacaagtcttcctcaagcgtcgcctgctgtaccagtgtcgagctccccacgctcgccgctactcctagcccctctcctccctggatttggcccagtctccatctctctttccagccatggacggcgacctctcctgcctacagcagggcgccgggatgctgcttcctatacatcgtgcgcctccctggtgcttgctctcgccctagtccatggagcagcagcagccacgacactccttcgtgtcgcgccctcgacgtgttcgatgaaatactgcagcgagctccaactcgatctgcacagcccctgcgcgacgtcacaaactccgctcgttgtcgatgtcgtgcttcgggcatcgagtgttcgacgaaaatcccaagtccatggacagcacatacacaactcaaatccgatcggccaggtacgttaattgctcacgtgctgtagaggacgagagttggattaatctcagagtaatgctgatggatgaacctaaggatgggtgatctgatcgagtgccaggatattgaagctcacccaccggacgtctctaacaacactaacgtagtgttatcccaggcaagccccggtgcatttgccacctccttgttgttataaaacttttatcacttatatgttgcattaggtgataggagttgagtgatgaaacaactgatgcattaccattccttggaatttgattactattccttgattcctgtttataaaagagaactaaagatgcttagccctgcttagataattaaaagttgttctttttaaaaagatgacgtgttacacgggatatgggaaattgtcgtgaaaaagaaattgggatggtgaatccatatggccatgatggattcaacatccagaaaaagtacctctgtcaggtaccaaagattgggaaatggtttaaataaaatgagaccagacgttgagcaggaaaggtcgcccatctgtgtcgcttaaggaccgttccgattgttggcctgctgatctaggaccctttaactggccacatgcctcgtcatgggtaagcttagcctcggtcggaccaataccagaaaggccggcccgcaatgggagtggagagatggcgagagtatcgtgtatccacctggcaagaggctggatggtggggtactgagctctcggttggcggggacccgttctggtcttgagaaaatcgtgggcgagttgacatatgcaagggttaagtgctacatatgtcgtgtggttggagatccccagctgggtattaatcgattcggatcgccgaacttctcggatatgaagactggatcttcgaccttcagcgtagataacaagtgaaactaaagatgctaaaataaagctagtataggacaagtgaatgctctagattaggcaaatctagattcaggaaaagtacttaatttgtgaagtaaaattttggcataaggatccactactagtaagctcttctgcaaaatgagtctttgaaatttgataagctttaccttgattcccaataaaccagcatacccttgagagtcttttctttagtcgggtaagtcttgctgagtaattgcgtactcagggttttattccctgttgtttttcaggttataagtttgttctgttgtggatggtgctaagtgccggtgggctcggccttcttatataagtatatcccatctttagcttctttattgaggactgtcacttaagctagcatgtattttaaaacttataaatgttttatacattcaaattgtaatgtttttgaatcaaattctcttataatcactccgatgatatattgtaatatggttataacttgtaaatgttgtaacttgtaatcattttgtaataaagaatttatttccgctgcaagtgtttgtatgtgagttgtatttacttaatcctgcgatcttggcggtaagtcgtttatccggggtcctcgtggcactcggacagatcctgttaagttgtttggtgcacacgcatagctgtctgaggtctttgagacaaggacaattgcatgtgggcccgataacttgggaggttctgcgacagctggtatcggagctgaattaagtataatatgatcacatacatatttttaaaacaaagttttggtttcgaaaaaaaaaaattattttcaactaaacacattgtttggttttgaaaaacagatttgaaaaactataatgctagcgacatcctctgttaatataagccctaaattaaggactatcaggtggcttagatcaaaatactaacccacaatctgggaagggtaatgcatacatgtgtaatgttatttttgaggccattcaattttgaatggatcgacgctcaaggtaaggtgagatgtgagagcgtgactggacaaacgtcggtctaggggagagtttaataaaagcgcttgattatatacatgttttacatatgtatatatgaaggctgcgatgtggagtatttacttttctgggaatattgaaaagtgtaatgtaccataatgagctgccctatggttaaagtgtggcagcggcgcctatgcgtggctcggcgcttaatgaggagctggcctccatatagaaatatatggagtataaactaagataaactgtcatgtgtgaattgcatcattgggaactgggctgtgatgtaattttctgcaggtacactaacttcgaactcgtatgtgtagctgacgactagcaacatatcgagagagaacgtagatatgccaccgatatagaacgctattgccaccttatgttggcgaaatttgtgaggacgaataggacgagcatgtatcctaattgttgcattgtgtttgttgtttgcgcacaaaaatgcttccctcacctttattctaataattggtggttgtaaacgaatatgcttttctcatctttattccgataataaataattggaaaatgtttgaagcatgattgtcctataagcaaatttctagttttgtttgttgtgtcctttagacatgtatttatgaggcatgtggttcttcgtcaattgaccgctagtgcaacttgggtttgttttcgtgcttgtgtgcgggtagaatgtaggtagtttgtttgcataaacccaaagctaggtcatgtcctcatttagtgaaccataacccaaatcgtcatcaatcctccaaaaatttatccaaatctccaagaagggatgaattcgagtttctcgttactactccatgaccgcttagataagctttttattggatgtaaaatgcacgcagacttaaaataaggatctcaagtacatgttctcgtcgtttaatacgtgactcttttgtagtcatttttccatccaaaatcatgcctttgctcgcttggtgcaagctgatgtttctattccactctgtatcttcttggggaccatgtcgttattttatcaacctaacccgggaaagccatgtccaatcattttcttgaactggatgtctttgggttcctcatatctcttgaaggcataccaatttaatcttctgatcatttttcctctgaacctaatcagacactaatccttgactttgtaatctctgcgatgggcatagaaatatgcttggggctgaagtaagagtctcccatcgtactcattcattaataagtttaggttatggccatctcttgttcatttcatcggccatgatctatttggctctctgtttgtaatccttcttaaaggtggagtctcttttgtatcttgtcatccttgcttggtctatgtgtgccgcataaggtttttcattggttgagcttggtaatggcgttatgactaaaactgacggtgccacgacgaaaccgagggcctcctgtgggtatacacacatggttgtgttgctcggtacgcgctggtatcacggttagtagttgtaatccattaggaagctatatcaatgtgttatctaggcacaatctttttacgctatgtgagattcattattggtgccagttcggtgatggtgtcatgaataaggacttatggtgccgcagcgaaactgagagccccttgtgaatgtacacgcaaggttatgctgcttggcgcatgctggtatcgaggtatctagtcatgatccattatggaactacattaatatattatctttcgtggacttttcccttgaaacgatttttatgttctttgctgaaacaatcaaacaacatatgccatcactattggatcaaaataatatataactctaatgtattccttgagtaaagttcttaccaattctgaagtcttcgtaaaaaaatcaaaacctatctgtatctagtcgtgtggtaaaatcacccttttcatgtggggactcctttctcttgatctcagtggcaactgcacacatggaaccttatgtgttcttttgtcagttatagcttgtttgttgacatctctagttaaactaaagtggtatgtgctatacccactagagaagcaacattttgagatgcttgtctttgcttggaattagcttatgctatcactattatggacagggttatacgcttctctactcttagaagtctttcgttctgaatctcgggacgagattcttttaagggggaaggttgtaacaccccaggtgtttatcgtctactcgaccacgagtgcggacgataacacgtgatagctgtgaatgtaaaggtcactaaattttaatcatcctcgtttatcacgattttgatatcgtgtctgtctccatctgtttaaattgtcctaatttattttgcaaaattcagactttggtaattttcggaacatcgaatccagtatcgtttggattaagccatcgacgtcttgcccaaactttaattctagaaattagatctggtttcttaaacttcatttgaaattctttcacgcttgcgttgcacgtgtctctctgtggcctggcatcg

SEQ ID NO: 58639 - DNA, 1205 bp, Zea Mays
cggtccgtatgtttctcatcagttctaaatctttggatataaataactggtaaaagtttatctgactccggagtattccctagatcaaatcttgttcaaatattgccgtcgatcttgttttagtctgacccatttatacatccgtcaaaccctgattttttttagaaccgggaaatgtatttatcttttccaaaaaagagagaagtggaaaaatccattttttcttatcttccacacgtccctttcttctagtatcttcataccaccgcagcccaggctctcagccttatccccttcgtacaacactatcaccaggaattcccttgcctttgctcgttctcatggccgagcacaagtcttcctcaagcgtcgcctgctgtaccagtgtcgagctccccacgctcgccgctactcctagcccctctcctccctggatttggcccagtctccatctctctttccagccatggacggcgacctctcctgcctacagcaggtcagcgccccatctcctcaacatctcggctccctgtcccatctctctctcacgagccactcttctcgttctccatggcgtcgacatggggctcgcccctgcaacctcgcctcgctgggtctcctcagggcgccgggatgctgcttcctatacatcgtgcgcctccctggtgcttgctctcgccctagtccatggagcagcagcagccacgacactccttcgtgtcgcgccctcgacgtgttcgatgaaatactgcagcgagctccaactcgatctgcacagcccctgcgcgacgtcacaaactccgctcgttgtcgatgtcgtgcttcgggcatcgagtgttcgacgaaaatcccaagtccatggacagcacatacacaactcaaatccgatcggccaggtacgttaattgctcacgtgctgtagaggacgagagttggattaatctcagagtaatgctgatggatgaacctaaggatgggtgatctgatcgagtgccaggatattgaagctcacccaccggacgtctctaacaacactaacgtagtgttatcccaggcaagccccggtgcatttgccacctccttgttgttataaaacttttatcacttatatgttgcattaggtgataggagttgagtgatgaaacaactgatgcattaccattccttggaatttgattactattccttgattcctgtttataaaa

SEQ ID NO: 58640 - DNA, 894 bp, Zea Mays
ggaacactgcactgcacgtcgcggtcgcgtcaccaccatcgccagcagcagcagagcacctgcaagcacaaggccaggaccaggagtggcacggcccacggtgaacaaaagcagcgcatggcacgccgggagagagagagagagcgagagagcgagcggtacgcaccttcctccgcttccggcgccgccgccgtcgtgggcgccggccggcggccggggactgcgcaagcagcatggcctcggggcgcagcagcaggggcgaccagagcccgctgcggccgtagtcgaagtcgaaggcgctggtgtccgcgaacttgccgaggagcccgtccgagacgtccctcggcaccagctgcaccaacaagtcgtcgtcgtcgtcgccggcggtcatcatcgttgctgtaggcgaccacggatcctcctccagggcggagcagctcaggatgttgggcgacgacgacgacgacgacgcgggcatgcaagttccaaatacgaacttgcaccggcggcggcggcgggtgggctgttgcggtggcggtatagtatagcagcaggataatgtgtctagtgtctctctccttttccgctgggaaagcatggagaggatttgcggcagatcgcgcggtggttggaagggaaaaggaccggcaggccggctgaggctcctccattcgatcccggctgcctctgctctgcatctatgcaacgcatcacatgattgattgatcggtgtcgctcatggtgtgcggggccactcagagccgagctcttgctttctttattgctgtctcacgtttgagtgtcctctctctcacctcgtgcggcggccgatcccttccttccttcatctctctctctctctctcacgctccatcgaccaaccatccaccgccg

SEQ ID NO: 58641 - DNA, 8537 bp, Zea Mays
gtactcccccccacgatctgatcgaacaatctttatcttcaaatcgtgttgattctctacttcagccttgaactgtttaaacttgtctaaagcttctgatctttccttaattggataaatataaccgtagcgagagtagtcatctgtgaaggttatgaacgagttaaacccatctactgtcctaactggaaaaggaccacagatatctgtatgaataatttctaacactctcgtactatgcttagcatctttcttaatctgcttcgcgaatttacccttaatgcaatctctgcattgctctaagtctgtgaaatctaggggatggagaatctgttccttaacaagactttctattctccccctcgaaatatggcccaaacgatagtgccataatttcgacgaggtttctccatcacttcgttttcttttcctgccactgttggctggatcattttctggtatatctaatacattaacaacatcactttgcgaaagtaaataaagcatatctcgtcggatggcgagaccaacatctttattatcaaactgaatgacacattgtctatcaccaaaatgacaatgaatgtgctgatcatctaatctagaaaccgaaataaggttccttcgcaaggaaggtacataaagtacgtctctcaacaacagtacaaaaccattaactaatttaagatgtatatctccaatggcctcgactgctgcttcaactccatttgccactctaattgttctttggccctttgggagcctttggcttgtacggagtccctgtagagagtttgcaacatgaacagttgcacctgagtcaatccaccaagaataactgggatattctaagtataaagactcatttacaaaagtaacttggtccttaccactctctagtagatactgcaggaattcagggcactttctcttgtaatgacctgtcttcttgcaatagaggcaggtatcagggggaactgagaaactgcctccttgtcttggctgattattattgctcgaggaagcctggttattctgtttaccttgcttcttgaactttttctttgagttcttgttctgtctggggacattgcctttgatgagattgacagagtctccagtctgctttaacctctcttcctcctggacacactgtgccaagagttggtctatattccacttatcagtgacactagtgttgtactgtatgtgaaaagtctcaaactccttgggcagagacttcattatcataaatactacaaattcctcgtgtaaaggagacccgaggtatttgtttatcttagctacgatggatatcattttctgaatgaatggtctgacaccatttccatcgtattttgcattgacaaattctgtcattagagagcaagcataagccttagaagacccttggtgatgagaggctaccctctcaaggtattctttggcagtctcgcactctggtatggaactcttaagaggctccttgatgctcctcttaagaataatcatacatttgtcatttgatctctcccacttgaccttgtcgatgctgtattgcatccacctgtggtcatagttgggagtgcccactgtgggctcaactggtttatcaaacctcagtgcgtaatctatctcacccactgtggttatcatgtctatatcctcccgccaagaatggtaattactaccatctagcggtttcatctgagcaatctggctaatcagcatggcggtatgagcacctttgcaaaattaaaacagaaaatatttaggacatctgaaataaatactgaatactgaatcatagaacatgcatgaattaaatattcaacgttggtcaaataataaccatgccatatctatgaaaatttctgatcacaaaatttctaaaccatcgttggatgatatagaaaacataaacttgtattaaattgtggtaacaatattcaacgttggttgaaatattcaatcaccacaaaattttctgaattctatgcaatttaagcaataatcaatccacgttggtttcataattaactggaaaaattgcataaaatataaataaagtaccaaagtacgcagcggaataaaatagtccataaatatctctgaaattgtctaaatctagaaaaatatttctgtacttttctgaattttctagctatttttctaatttctttttctgttttactaattcttatttccaggataataaaaaaaatatcgctgaaaaaaaatggctggctgtgtggccagccgcgcgctggtgggccagctaggcctttcggccgagcgtgtaaggaggcaggcacgcccaggccgcaacctgggcctgggctgccgatttggcccatcgcgcgcgtcccattctcctccagttaatctcgtccgtcagtgccgatctaacggtccagacgcacttgcgcggctataaatggcggggaactcgggaccgttaggaaacctagctcatatttctgttctttcattttttcttcagccgccacaaaaaaatccggccgacagagtggccgtccgcgcgccttctttgtgccggctgctagcaatggagatgcgcactgcgcgctgcatacatgcatgctactcctttttctttgcatgcgtgctgcatgctacttttctctatctttttttttaatttctctcacgccgctgttttactctccctctgtttctgttttggccggcgacgttttttttttaatagcaacacaagaaaactaagacagcagagcagaccgctggaaaaaaaaaggtcggtctcttgaccgtcttctacatttgaactcggatctgattattcgagcttttctgtgatgttattttagtcctgaggccctatggatgcgtctgcagtgctctgcgcacttgatccgatttctgtaaacgttttctgatcacagatttgagcccaaaaaaaacgatattgggcctttggacagagcgtgcggttttgggattatttcggttagagttcaaaaccctaaccctatctgtgtttcttattgactttgtttcttggccgcggatcgttggatccataagcctgtgcatcgtctctgttgacggcttaaccgattagggttaggtcataaaccctaaccctagttagttgtgagagctctctggtttgaggccgagacacactgtgtcttttagagtggccagacctaaaatcttaactctaacccgagagcatgaaactctttctatctattctaatctctattctcgggtgatgaatgatgataaaaaaatgagttcatcacatatatccgagacctttctgtgatctcataaaacgatgcggattaggagatctagggttcttaggtggcctctgataccattgctagaaattactggtgcttaggatcgtttcctaagtccctagaataccaatccgtgtctaaaatacctcgatgatgagtagatctattctactgaggggtacatgtatacataccgtcgttgttgttcctagccatcattgcggcggcgtcttgcagcgaagacccgcctcctccttcttgtcgatctccctgctggtgtcgaggagattggttcccgtcgttgatcggcggtggatcagctcctccaatgttgcctgcagggggaatctcagatcccgatgggataacggggatctgagacatagtcacagcgattccagtcactccgagcgcctaggggatcggttcctctcaaagtgtcgattagggtttgtggtcgagcgattagcgttggctaaacccgtcggcccccttaatctatttatatggcgtcgtgtgaccgggggctgcaaccaacggttaggatagcccccccgatcaggggcgcggtttgacggttaggattaaccctaccccggttactgttaaccggctagtgtagaggacacatcctaacacccatgacttcttcaggcacgagcagagcattcctccattcatgtccacccggagagacgtgtcaggcacatcctcctagtagttaaaaaagctgttcgaagaacgtgctatgggattgagttttgatcgttctatccaaccaaatacagtatagcagaaaacatattacgattgtatataccaagcaataacaatgaattaggcagcaaataagcagacagtgacacaatgtaatgtcaatggagcacttggttagttaagtgcctactgagttccaaataggttaatagggataaggtacgaggtatgtgcatatgtgacatgagtgttcatactgagttccatataaagcatgaccatgaagacatgtgcacataaaataaatagatctaaacatgcacatcatcatactaattaagattaaaacttactgtaccagaaccgtgtataaacagattattacccaatatgaaatacataattaaagggagatggtcgtacatttctttcttggcggcaatcaggtagaaaagacgacgtcaacgttcagtaccgtctcgttcttgccaacgacgtcaagcgcccatgcaacaaggaggaagacaagctgcggcgatgaagttgacgaagatgacaagtcaagtgatcaagcaatcatgcagagcacttcctaaaacccttacccgccctctccagtacagaatcgcagagaacaacagttatggtggcctactttctcattcgccgatgcacaccgataattggggtgaagtagtgtacacggggacgtggcaaggaaaaagaggcaaaaccctagatgcattggtgtgtgctattcatctacgacatcactcgtacgtagttattaggagaaaccacgctagggttttgacgtcccaaaaaacgagtcaaatccataatttccaaaaatctgcataaaaatctgtaacagattaagttcccaaaaatccacaccaaaaaatccataacagaataagttttccgcactcgaaaatttgcaacagattaagtggaaaaacaaaactgcagaagaaagttgtgtgcctgcaagacttagacccccccccccgatttcggcgaaccattcacgtgcatgacgtgcgcccatgtccttcaccactccatgcccaaccccgtctcgctctagtccatcgaggcaagatgagtgaaagtgccttttagggtactaaggacatgtatgtcgcctagaggagagtgaataggcgttaataaaagcttaaactctattcgaactttcttacttgatttgcagagtcttatgcagcataaagatgcccttgtctcaaaagatatcttcacttcccagaaaacataacaaatataagtagaaaagtgcatcactatggtttgattaagcctcaaatgcttgcttactctatgttaaagttagccaatctggcttggagtatatttcaactccttcctttgtttgctcaagtttatcactaaggtgacaaactgagactttcactataccttgatgagagttacaacagaaccgaggctatcaaaaattggtagctcttcgatagaattgaatgtgtcgctcaaggtcacactagctcttctatgcagcaatagtatgacacatacgcctatctctttggctagaacacatgccaatcacttgatctatcacataatacacaagcgagggatagaatataagtatgcacttattctccacttgcttgctgccttgttgttctagctggggtcaaaatggggtctatttatagccctaagggctaaaatagtcgttcctgcaaatcaggaaaacctgttgtccatgaggtcaccggactggtttggtacatcactggactgtctaaagtcccgcgatcacaaagatcctaacagataccttccaaactagactggcaccagactggaccagtgcaccatggacccttgccacgtcagctaaccattggagtcgcacttgccctgcctgaagtagccattggaccaggaggtccagtgcacatggacccaaggtccagtgcactaggccgctaaatcttcaattctgaccactctagcaaagtggtccggtgtgccaggctaccaagtcttcaattctatcctagtactcataccgacaagatgcatcttctttctttggaaacctgtctcgaaataacctatgagttaagtgtgcttgtcccaaagcaatcttaggatgggtgatcggctcggaagtcttctcaggtgtgcatgagttagaacaaagtgcgcacaaaaggctcgtgttggtatgtcgggatggtttatgatcctagaagactgctaggagtaagtaccataggttaggtagtggacggggtgttacaaatagtattagagaagacccacgcggtttcacgggcgtgtgtgggctatggtttcaggtatatggcgcatatgggcctagagtggtcacatatcaagtcatatgacaacactagacatacagacgtgactgaaagggaaatgtgcctttgagccatttctataatattttggtgattaagtgcccaacatgtttaattaagttcttttatgccaaataaagtgataattgcaaatcaaggcaaaaggtatgtttctagacttggtgaattgtttttatgtactaacatggttatccaagtgctagaaacagtgctgagaagaagagaatcgaattgcaaaaagacttggctgtgtgcagccaaacttcagctcagtctggcacaccggactgtccggtggtgcaccggacagtgtccggtgcgccaggctggtctccggtgaaatggctgctctcaggaaaaggatcagcgatgtacgactaaaattcaccggactgtccggtggtgcaccgaactgttcggtgagccaacggtcgcctgatcaacggtcggccgcgcaatcttcgcgcaacacgtggactgctccaacggtcagctggtgcaccggacagtgtccggtgcgccaattagcccagaggagcaacggtcggatatgccaaatttggaaggagatcgcgcaccggacagtctacaggacctgtccggtgcgccactcgatagaaggcaaggatagccttccatgttgatctccaacggctcctagctgccttggggctataaaagggacccctaggcgcatagaggagacacctaagcattcactaagcattctaagactcccacactccgcctccgcgcatttgatcgattgtgttagtgatttgagctccgttcgagttgtgaactctctgtgctatgtttagagctcaagtcttggcttgtgtgcgtgtgtgtgctacgaatttgtgtgttgtgtgtgttgctctcctagccttactcttgtgccttctttgtgatctttattgtaagggcgagaggctccaacttgtggagattcctcgcaaacgggagaaaaactataaggaagaaagtcgtggtattcaagttgatcattggatcacttgaaaggggttgagtgcaaccctcgtccattgggacgccacaacgtggaagtaggcaagtattacttggccgaaccacaggataaaaatcgtgtgtcacttgtgttgctttctctgtgattattgtgttcacaagaactcgctacttagccgtactaacaccttaaactaagtttttgtggctattagtgtttaattttacaggatcacctattcacccccctctaggtgctctcaattggtatcagaaccgtactcttcatctaagggactaaccgcccaaagagatggatcctaagggaaaggggatggtggtcaatgacaaggaaaaggagtctatcctcaacgagccaagagacgacaagcctactgactcaggctcgagtcaaaagaagagggaagggaagaagaagaggcgcatcaagaagatcatatactacgacagtgatgcctcgtcttcttcaccacacgacgacgatgactcttcaaaaaggaaaacggtcaatcaaaactattcatttgattactcttgtattccatttaattcaaacgctcatttgctatcaattccacttgggaaacctccacactttgatggagaagactactctttctagagtcataaaatgcatagtcatttattttctctccatcctagtatctgggaactgttgaaaacggaatgcattttgatagtactgacaatcccgttttcataaatgagcaaattcataaaaatgcacaagctactcctgtcttgatagcttcactttgcagggatgaatataataaggtgagcggcttggacaacaccaagcaaatatgggacaccctcaagatatctcatgagggaaacgacgccaccatgattaccaaaatggagctgatagaaggcgagctgggaagattttccatgatcaggggagaagagccaacacaaacctacaacagactcaagaccctaatcaacaagatctgaagctatggaagcacaagatggacagatcatgatgtcgtccgactcatgctaaggtcatttactgtaattgacccccatcttgtcaatcttattcgtgaaaaccccaggtacacaaagatgacgcccg

SEQ ID NO: 58642 - DNA, 4379 bp, Zea Mays
ttctgttctttcattttttcttcagccgccacaaaaaaatccggccgacagagtggccgtccgcgcgccttctttgtgccggctgctagcaatggagatgcgcactgcgcgctgcatacatgcatgctactcctttttctttgcatgcgtgctgcatgctacttttctctatctttttttttaatttctctcacgccgctgttttactctccctctgtttctgttttggccggcgacgttttttttttaatagcaacacaagaaaactaagacagcagagcagaccgctggaaaaaaaaaggtagaaaagacgacgtcaacgttcagtaccgtctcgttcttgccaacgacgtcaagcgcccatgcaacaaggaggaagacaagctgcggcgatgaagttgacgaagatgacaagtcaagtgatcaagcaatcatgcagagcacttcctaaaacccttacccgccctctccagtacagaatcgcagagaacaacagttatggtggcctactttctcattcgccgatgcacaccgataattggggtgaagtagtgtacacggggacgtggcaaggaaaaagaggcaaaaccctagatgcattggtgtgtgctattcatctacgacatcactcgtacgtagttattaggagaaaccacgctagggttttgacgtcccaaaaaacgagtcaaatccataatttccaaaaatctgcataaaaatctgtaacagattaagttcccaaaaatccacaccaaaaaatccataacagaataagttttccgcactcgaaaatttgcaacagattaagtggaaaaacaaaactgcagaagaaagttgtgtgcctgcaagacttagacccccccccccgatttcggcgaaccattcacgtgcatgacgtgcgcccatgtccttcaccactccatgcccaaccccgtctcgctctagtccatcgaggcaagatgagtgaaagtgccttttagggtactaaggacatgtatgtcgcctagaggagagtgaataggcgttaataaaagcttaaactctattcgaactttcttacttgatttgcagagtcttatgcagcataaagatgcccttgtctcaaaagatatcttcacttcccagaaaacataacaaatataagtagaaaagtgcatcactatggtttgattaagcctcaaatgcttgcttactctatgttaaagttagccaatctggcttggagtatatttcaactccttcctttgtttgctcaagtttatcactaaggtgacaaactgagactttcactataccttgatgagagttacaacagaaccgaggctatcaaaaattggtagctcttcgatagaattgaatgtgtcgctcaaggtcacactagctcttctatgcagcaatagtatgacacatacgcctatctctttggctagaacacatgccaatcacttgatctatcacataatacacaagcgagggatagaatataagtatgcacttattctccacttgcttgctgccttgttgttctagctggggtcaaaatggggtctatttatagccctaagggctaaaatagtcgttcctgcaaatcaggaaaacctgttgtccatgaggtcaccggactggtttggtacatcactggactgtctaaagtcccgcgatcacaaagatcctaacagataccttccaaactagactggcaccagactggaccagtgcaccatggacccttgccacgtcagctaaccattggagtcgcacttgccctgcctgaagtagccattggaccaggaggtccagtgcacatggacccaaggtccagtgcactaggccgctaaatcttcaattctgaccactctagcaaagtggtccggtgtgccaggctaccaagtcttcaattctatcctagtactcataccgacaagatgcatcttctttctttggaaacctgtctcgaaataacctatgagttaagtgtgcttgtcccaaagcaatcttaggatgggtgatcggctcggaagtcttctcaggtgtgcatgagttagaacaaagtgcgcacaaaaggctcgtgttggtatgtcgggatggtttatgatcctagaagactgctaggagtaagtaccataggttaggtagtggacggggtgttacaaatagtattagagaagacccacgcggtttcacgggcgtgtgtgggctatggtttcaggtatatggcgcatatgggcctagagtggtcacatatcaagtcatatgacaacactagacatacagacgtgactgaaagggaaatgtgcctttgagccatttctataatattttggtgattaagtgcccaacatgtttaattaagttcttttatgccaaataaagtgataattgcaaatcaaggcaaaaggtatgtttctagacttggtgaattgtttttatgtactaacatggttatccaagtgctagaaacagtgctgagaagaagagaatcgaattgcaaaaagacttggctgtgtgcagccaaacttcagctcagtctggcacaccggactgtccggtggtgcaccggacagtgtccggtgcgccaggctggtctccggtgaaatggctgctctcaggaaaaggatcagcgatgtacgactaaaattcaccggactgtccggtggtgcaccgaactgttcggtgagccaacggtcgcctgatcaacggtcggccgcgcaatcttcgcgcaacacgtggactgctccaacggtcagctggtgcaccggacagtgtccggtgcgccaattagcccagaggagcaacggtcggatatgccaaatttggaaggagatcgcgcaccggacagtctacaggacctgtccggtgcgccactcgatagaaggcaaggatagccttccatgttgatctccaacggctcctagctgccttggggctataaaagggacccctaggcgcatagaggagacacctaagcattcactaagcattctaagactcccacactccgcctccgcgcatttgatcgattgtgttagtgatttgagctccgttcgagttgtgaactctctgtgctatgtttagagctcaagtcttggcttgtgtgcgtgtgtgtgctacgaatttgtgtgttgtgtgtgttgctctcctagccttactcttgtgccttctttgtgatctttattgtaagggcgagaggctccaacttgtggagattcctcgcaaacgggagaaaaactataaggaagaaagtcgtggtattcaagttgatcattggatcacttgaaaggggttgagtgcaaccctcgtccattgggacgccacaacgtggaagtaggcaagtattacttggccgaaccacaggataaaaatcgtgtgtcacttgtgttgctttctctgtgattattgtgttcacaagaactcgctacttagccgtactaacaccttaaactaagtttttgtggctattagtgtttaattttacaggatcacctattcacccccctctaggtgctctcaattggtatcagaaccgtactcttcatctaagggactaaccgcccaaagagatggatcctaagggaaaggggatggtggtcaatgacaaggaaaaggagtctatcctcaacgagccaagagacgacaagcctactgactcaggctcgagtcaaaagaagagggaagggaagaagaagaggcgcatcaagaagatcatatactacgacagtgatgcctcgtcttcttcaccacacgacgacgatgactcttcaaaaaggaaaacggtcaatcaaaactattcatttgattactcttgtattccatttaattcaaacgctcatttgctatcaattccacttgggaaacctccacactttgatggagaagactactctttctagagtcataaaatgcatagtcatttattttctctccatcctagtatctgggaactgttgaaaacggaatgcattttgatagtactgacaatcccgttttcataaatgagcaaattcataaaaatgcacaagctactcctgtcttgatagcttcactttgcagggatgaatataataaggtgagcggcttggacaacaccaagcaaatatgggacaccctcaagatatctcatgagggaaacgacgccaccatgattaccaaaatggagctgatagaaggcgagctgggaagattttccatgatcaggggagaagagccaacacaaacctacaacagactcaagaccctaatcaacaagatctgaagctatggaagcacaagatggacagatcatgatgtcgtccgactcatgctaaggtcatttactgtaattgacccccatcttgtcaatcttattcgtgaaaaccccaggtacacaaagatgacgcccg

SEQ ID NO: 58643 - DNA, 2136 bp, Zea Mays
gtccatttcccagtccatatattttattcccacatcaagcttgcttatgcttcttccgctccccactattattctcatcacgttcttcccttcttccttcctggttcctactagtcccaccacacacatcttcccagtcctatcatggtggcgtagagatatagaacgtagagatcgaggaggcaggagagcaggagaagaacctcatctcagaggtggggaagccacatgggaaaggtgaaacagaaggtggcaacggcggcggaggacatcgtccttgaagacgaagatgatgcggaaagatcttcggagaactctgtaccgcctgtgattctggacctcaaccagagtttcggcgagggtagcgaggaaggggaagccggagaggatggcagctacgacgaggaggatggtgactgcgacggcggtagcatgagtagagtcgccggaggaagcagttcaagcaacagcagcagcaccaaccaccatacttctatgagcaacaagaattatgacacgaataatagcagcagttgtaagggtgagggcagcggggagacggcgcagaccgtgaggcagtacaacagatccaagcttccccggctccggtggactccggacctgcatatggcgttcgtccacgccgtggagaggctgggcggccaagagagagcaacgccaaagctggtgcttcagacgatgaacgtgagggggctcagcattgctcatgtaaaaagtcacttgcagatgtacagaagcaagaagctggaccacgagtctgctggagctggacacgatagagcagccatctactccgttttcaagcccatggatttgcacatgatgatgaggagaggagaccatcgcttccacgacatgtttctccatcgagctgccgctgccggctcggtcatctcctccccgctgctccacaacggggatttattcgggtcacgggacgccgtctcgccggaggccagcaggctctacgcgctcctccaacgccggcagcagccttcctccacgcaaacgttcgccctcatgaactacagtagtagcctgatagatatgattgatcaagtgtggactttcagccggcatgcagcggcggcggcggcggcggcgagggctggggccatcgatgacgaccatggcccaacgaaagggctcatccatgatatgatcttgagaaaggacggcaggctgacgtcccatttgttcggcctgtgggatgccatcgcttgcaacaggacgtcgtcgaacgccgctggtgctgccagccacggcgcaagggtcgtcacaagcacggattggaacggcacctgcagctcatctcggcccctgtctgtgacaatgtcggcagctgcctccacaggtcttgcgatgggcagtcaccacctcatgtccaggggaagaggcggctccgctaacgacgtgacatcgttagatcatgccgtggtgacaaatgaagccctaggctcccgactccagacgctcctagagcggaacaatgcggccaaattaaccggcgaggagatgtgcggggggacaagaaccaagatgctgaagacggcaatggagggcaagaatggcggcatgcaggagccggacttgcagctaagcttcagccccaacgacgacatggaaggagatgccaacaagcagatcaagaagaggaagatcatagacggcattgggttcagccaacaggaggtggacagtgacaagtcgatgctacctctttcgctctcactgtcactccgtggcggcgacatcggcggcgaggatgcagggaggttcgaggcagcggcaggtagcggcggcaaaaaggccgctctggggcggagcactttggatctgaccatgtcgatcaaggcattggagtgagaagatgtttcacggccgctctggggggtgagtactttggatctgaccatgtcgatcgatccatcaaaggcattggagtgagatctttcaagtactcgtcccaaggccttccaaaacttgcacactgcaccatgagattaattaagtcataagactgtttgtttaagttaaccatgcatgagcagaccaggccagaccacatatacttacaaataataactgtcttcgatgagatgcactagacatagc

SEQ ID NO: 58644 - DNA, 1886 bp, Zea Mays
ctcagaggtggggaagccacatgggaaaggtgaaacagaaggtggcaacggcggcggaggacatcgtccttgaagacgaagatgatgcggaaagatcttcggagaactctgtaccgcctgtgattctggacctcaaccagagtttcggcgagggtagcgaggaaggggaagccggagaggatggcagctacgacgaggaggatggtgactgcgacggcggtagcatgagtagagtcgccggaggaagcagttcaagcaacagcagcagcaccaaccaccatacttctatgagcaacaagaattatgacacgaataatagcagcagttgtaagggtgagggcagcggggagacggcgcagaccgtgaggcagtacaacagatccaagcttccccggctccggtggactccggacctgcatatggcgttcgtccacgccgtggagaggctgggcggccaagagagagcaacgccaaagctggtgcttcagacgatgaacgtgagggggctcagcattgctcatgtaaaaagtcacttgcagatgtacagaagcaagaagctggaccacgagtctgctggagctggacacgatagagcagccatctactccgttttcaagcccatggatttgcacatgatgatgaggagaggagaccatcgcttccacgacatgtttctccatcgagctgccgctgccggctcggtcatctcctccccgctgctccacaacggggatttattcgggtcacgggacgccgtctcgccggaggccagcaggctctacgcgctcctccaacgccggcagcagccttcctccacgcaaactgatcaagtgtggactttcagccggcatgcagcggcggcggcggcggcggcgagggctggggccatcgatgacgaccatggcccaacgaaagggctcatccatgatatgatcttgagaaaggacggcaggctgacgtcccatttgttcggcctgtgggatgccatcgcttgcaacaggacgtcgtcgaacgccgctggtgctgccagccacggcgcaagggtcgtcacaagcacggattggaacggcacctgcagctcatctcggcccctgtctgtgacaatgtcggcagctgcctccacaggtcttgcgatgggcagtcaccacctcatgtccaggggaagaggcggctccgctaacgacgtgacatcgttagatcatgccgtggtgacaaatgaagccctaggctcccgactccagacgctcctagagcggaacaatgcggccaaattaaccggcgaggagatgtgcggggggacaagaaccaagatgctgaagacggcaatggagggcaagaatggcggcatgcaggagccggacttgcagctaagcttcagccccaacgacgacatggaaggagatgccaacaagcagatcaagaagaggaagatcatagacggcattgggttcagccaacaggaggtggacagtgacaagtcgatgctacctctttcgctctcactgtcactccgtggcggcgacatcggcggcgaggatgcagggaggttcgaggcagcggcaggtagcggcggcaaaaaggccgctctggggcggagcactttggatctgaccatgtcgatcaaggcattggagtgagaagatgtttcacggccgctctggggggtgagtactttggatctgaccatgtcgatcgatccatcaaaggcattggagtgagatctttcaagtactcgtcccaaggccttccaaaacttgcacactgcaccatgagattaattaagtcataagactgtttgtttaagttaaccatgcatgagcagaccaggccagaccacatatacttacaaataataactgtcttcgatgagatgcactagacatagc

SEQ ID NO: 58645 - DNA, 887 bp, Zea Mays
gtggaacccatgtaccaggatatcgtcgggcatattttttgaacgaagatatcgtcgggcatatgagccgtgactgttagcgtctcgtcagcgcagagaggagaagagaagaatcgggatgcgtggagaagaagaatagtgtagcgacgaggggaaatgtgttacgtaagtatctgttcttcgatgcgttacaacctctcgttcatttatctctcttatactcccgtgacaacggtccagtccaatcccctgacacgatcactcggacccattaactcgaacgttggtacgctctgacttctcctgttaacgcccctgttcacatccctagttctctttttcaggtgtcgttgtcacatgcgttgcctgctttggctgcttcgtgtgtagcatgactaacagtgactggactctaagcacgattcacccaccatctggaaatagaagagcagtagaggacgcacctggcagccctccggctgtcacagcgtgccctcgccatcgccgcctcgctctccggcgatccactgcgctggctcacgtctgacgaaggcgcgttggggcaacgggtcgtcacacgcatgtagtggtcgatcgccggcgacggcgagaggaaaacggatgcatcagccgagacgcgaggagcgccgccgtccacgcggcaagcttcctcatgttggtctcatactccctgtcctcctcgttccccgattcccgcttaccgccatctccgcaaccgccgccggcatggtgtcctcgccgcggattggggcctccgccgccacgtacggtaaccatagccgcgcagccaaactccgctgatccgaagccgatcgccgccgctcaccggaaaaaaaattcgcgaggaaatcgagaattatcctttt

SEQ ID NO: 58646 - DNA, 2275 bp, Zea Mays
ccagtctccatcagctgcgtgtcttttcttttaaccaaagcataaagttgtcggcattaaataattgatgacaataacaaggcgttcatgaatcacgaggtttcaaccctacactacagttgaacaaaccttttgctcaactaaccaagaaatggcatcctctgtgtcacaccggcattatcttcctctgctccacgccgtcggtggcagcgtcgggcgccgatgtcgtctgaccttcagagtgcaccatgtcataggtggcgtgcacgctgaagagcacgtagtacacaagcatcgccgccgtgcagatgccaaagcgcatgtaggcgagggagccgagagagcccataaggaagaggtttgtggcgacggacatggccggcagccacggcatgagcggcgcgccgtataccctgggcgcgcgctgctgctccgcgaatagcgccagccccgccgtgccggccgcccacaaggcgccgaacgctacgtacccgggccaccgagcagcgtagcccgagttgtagtacacggacagcccgatggacgacagcacgatcagcgccaggaagccgacgaaggtgcgggcctgcgcgggggacgtggtgcccgcgacgtagtatcgtcggacgaggagcgccacggcgacgagcgcgaagatgaagagcgtgctgatggaggagacggacgccagcacgtcgaggctggagaagagcgcgacgcaggcggcgccgagcgtgacggcgatggtggcgtagatgggcgtgccggtcctggggtgcacgagcgcgaagtagggcgggatcatgtgcgtgcgcgcgatctgcgtggtgtagcgcgcctggccgagcgcgccgacgaggaggccgctcgtcatgcccttgagcgcgccgagcgccacgacgtagcgcgcccacttcatcccggccgccgcgaacgccaccgagtaggccgcgttggcgtcaatgtcgctgtagcgctgcatccccacgagcgcgagggacatggcgcagtagacgagggtgatggcggacatggacgagatgaggcccagcggcacgtcgcggccggggttcttggtctcctcggccatggtggccaccatgtcgaatcccgtgtaggaccagtacacgacggccgccgcgcggaagacgcccgcggcgccgaaggggaagaatgacggcgcgaggttggctggctcgaagtgcgagaaccccgcggccagcacgaacgcgatgatggcgatgccgaccgcggacgccaccgagttgacggtggaggtgaggcgcgcgccggacacggcgagcgcggaagtggcgcacagcacgacgacggcgatcgggtccagcagattgaagccgtcggcgagcgcggggacgtggatgcggagcgcgtcgctgtcgcggccgatgagcgccgcgaggtacgacgtccaggaccggcccaggccggccgcgcccaccacggcctcgagcaggatgttcccggcggcgatgaacgcggccaggtccccgagctcgacgcgcaggtacgagaacgagccgccagccgacgggatctcgccggcgagctccgcgtagcagaaggacgagagcagcgccgagaagcccgcggcggcgtaggccagcgggatggccgggccggcgtcgaaccgcgcctcctggccggtgagcacgaagacgcccgagccgacgacggagccgaatccgaggaaggcgagatccacccacgacaggcaccgccggaggggattctcgctctgggcgagcagcgtccccgcctcgacggcctcggaggagcgactcgtgacgcggtcgcgcagccgtggcccagtggacaagagcgcgccgccgtacgcgcgccagctctggaacgagggctccgggaaaaagtcggctttgctccaccgccagtacccgtggcccgccgccggctcgccccccatcgctgtcgacgtcatcgcggatgtgttttagctaacacgatctataatttctgctggcacaaggatttatttgttggatttttagagaaataatgggacgagttgggcgaaggcccgtggacagatctgttaggcttgatcttatttaaaatttaaactcggcccgtgttggactccactaacacgatttccacgcgaagtgtaggctcggttatttctatttcatacggatcgaatgtgattagaaaaaaaatatgtttttttaacttatttaaaatttaaacttactaaattgtactcaatctatataaaaattgagagtaaaataaataa

SEQ ID NO: 58647 - DNA, 293 bp, Zea Mays
cgctgtccaagaattggacgccgtttatccattgtcccagacacagcttaaaaatccctcgcagctagatggcgccaagccaaaatactcgcacggaagccaccacaccagcccacaagccgcaaccgccatcgacatgtcggcagcggaggagcaccggtggcgctcgctggtcttcggcgaggccgtggccgcgcagcgcagcgcgctggtgctcgcgtcgtacccgctgctgctgctcctcgtcgtcctggccgcgttcgtcagggagtacttcggcggatcgatcgaga

SEQ ID NO: 58648 - DNA, 1967 bp, Zea Mays
tcaaccgcattcaatacctccaggccacggccgcagtcaatgcacagctcgcgtccgcgtgttccccgtctccacgcgtccatcaggccatctccagcggcagccggcagcagcaccacctccgcgcgcgcgggccgcaccgagagcaggcgtccaatcggtcgacggtcgtccacgcgcagctacgctacggcttggggtggtgggcgctagaactagaagaatccaaactctcccacccgaaccagtgaatgaactccacagtccatagcagtccggctcgtcactcgctgcactgcagcaggtcgcctgtgcctgtggctgccatgcctgcctggcctacaactacaagagcgagcggacaagcgccagcgccacgggcatgccaagccagttcacgagcccggccaagaacccaagcacggccaagccaaaccgcccttctcctcctggctcctcatgcctcgcttgactcctcgcgccaatttcgggaaacaggccatgccgggagacgggggagcagctggaagcgcgaggtgggtttgcgcggtcctttcggtgttcccgcttctagcggcggcggcccagggaaggtaccgcgcggtgttcagtttcggggactcgctggtggacgccggcaacctggtcacggagggcatcccggactacctcgccaccgcgcgcccgccctacggccagacctacttcggctaccccaccggcaggtgctccgacggccgcctcgtcgtcgatttcatcgcgcaggagttgggcctcccgctgccgccgccgtccaaggccaagaacgccagcttcgcgcagggcgccaacttcgccatcaccggcgccaccgcgctcgacaccgacttcttccggaagcgagggctcggcagcaccgtgtggaactccggctccctccgcacgcaaatccagtggctgcgagacctcaagccatcgctctgcagctccgcgcaaggcacacgagttcttcgccgagtgcctgttcgtcgtaggcgaattcggtgggaacgactacaacgccccgctgttcgccggcaaggacctcagggaggcatacaagctgacgtcccacgtgatccgagccatctccgatggagtcgaacaactgatcgccgagggggcaaaggatttgatcgtgcccggtgtgatgccatcagggtgctttccggtctacctgaccatgtacgctgaccccaaggaagggcatggctcgcgcaccggctgcctcaagcggttcaacactttctcttgggtgcacaatgcgatgctgaagcgcgcgctcgtgaagctccgagcgaagcaccctggcgcgaggatcatctatggcgattacttcacgccaatcatccagttcatactccagcccaagaaattcgggttttacaaacaaccaccaagggcatgttgtggcgcgcctgggaggggtccttacaatttcaacctgacagcgaagtgcggtgagcctggtgcctcggcttgcgctgatcctaagacgcactggagctgggatggtattcacttgacagaagccgcgtatctgcacattgccagaggctggcttcatggaccgttcgcagaccagcctgttgtacaagcatcttgagttgagtacagtacacccagcctctcctccctgctgttcttgcacctctagagtgagtgtgccacaatagcacacaccgtgcgtgacaccaaactggatccgataaggtaaggtagtagtagttccagtgcagtcgggtaaagagctgagataggtctattaattaaagcttgattcctttcattcaggatggtggtataagtacaatgtaatgcacaaaacaattcatatgagtaccagttagaaatcactatggtggttagcttgctccaacttctgtatctaacttttgtatctatttatatattttttatatatataggacatatcatgtacaaccatg

SEQ ID NO: 58649 - DNA, 1920 bp, Zea Mays
tcaaccgcattcaatacctccaggccacggccgcagtcaatgcacagctcgcgtccgcgtgttccccgtctccacgcgtccatcaggccatctccagcggcagccggcagcagcaccacctccgcgcgcgcgggccgcaccgagagcaggcgtccaatcggtcgacggtcgtccacgcgcagctacgctacggcttggggtggtgggcgctagaactagaagaatccaaactctcccacccgaaccagtgaatgaactccacagtccatagcagtccggctcgtcactcgctgcactgcagcaggtcgcctgtgcctgtggctgccatgcctgcctggcctacaactacaagagcgagcggacaagcgccagcgccacgggcatgccaagccagttcacgagcccggccaagaacccaagcacggccaagccaaaccgcccttctcctcctggctcctcatgcctcgcttgactcctcgcgccaatttcgggaaacaggccatgccgggagacgggggagcagctggaagcgcgaggtgggtttgcgcggtcctttcggtgttcccgcttctagcggcggcggcccagggaaggtaccgcgcggtgttcagtttcggggactcgctggtggacgccggcaacctggtcacggagggcatcccggactacctcgccaccgcgcgcccgccctacggccagacctacttcggctaccccaccggcaggtgctccgacggccgcctcgtcgtcgatttcatcgcgcaggagttgggcctcccgctgccgccgccgtccaaggccaagaacgccagcttcgcgcagggcgccaacttcgccatcaccggcgccaccgcgctcgacaccgacttcttccggaagcgagggctcggcagcaccgtgtggaactccggctccctccgcacgcaaatccagtggctgcgagacctcaagccatcgctctgcagctccgcgcaaggcacacgatgcaaggagttcttcgccgagtgcctgttcgtcgtaggcgaattcggtgggaacgactacaacgccccgctgttcgccggcaaggacctcagggaggcatacaagctgacgtcccacgtgatccgagccatctccgatggagtcgaaggtgctttccggtctacctgaccatgtacgctgaccccaaggaagggcatggctcgcgcaccggctgcctcaagcggttcaacactttctcttgggtgcacaatgcgatgctgaagcgcgcgctcgtgaagctccgagcgaagcaccctggcgcgaggatcatctatggcgattacttcacgccaatcatccagttcatactccagcccaagaaattcgggttttacaaacaaccaccaagggcatgttgtggcgcgcctgggaggggtccttacaatttcaacctgacagcgaagtgcggtgagcctggtgcctcggcttgcgctgatcctaagacgcactggagctgggatggtattcacttgacagaagccgcgtatctgcacattgccagaggctggcttcatggaccgttcgcagaccagcctgttgtacaagcatcttgagttgagtacagtacacccagcctctcctccctgctgttcttgcacctctagagtgagtgtgccacaatagcacacaccgtgcgtgacaccaaactggatccgataaggtaaggtagtagtagttccagtgcagtcgggtaaagagctgagataggtctattaattaaagcttgattcctttcattcaggatggtggtataagtacaatgtaatgcacaaaacaattcatatgagtaccagttagaaatcactatggtggttagcttgctccaacttctgtatctaacttttgtatctatttatatattttttatatatataggacatatcatgtacaaccatg

SEQ ID NO: 58650 - DNA, 2283 bp, Zea Mays
tcaaccgcattcaatacctccaggccacggccgcagtcaatgcacagctcgcgtccgcgtgttccccgtctccacgcgtccatcaggccatctccagcggcagccggcagcagcaccacctccgcgcgcgcgggccgcaccgagagcaggcgtccaatcggtcgacggtcgtccacgcgcagctacgctacggcttggggtggtgggcgctagaactagaagaatccaaactctcccacccgaaccagtgaatgaactccacagtccatagcagtccggctcgtcactcgctgcactgcagcaggtcgcctgtgcctgtggctgccatgcctgcctggcctacaactacaagagcgagcggacaagcgccagcgccacgggcatgccaagccagttcacgagcccggccaagaacccaagcacggccaagccaaaccgcccttctcctcctggctcctcatgcctcgcttgactcctcgcgccaatttcgggaaacaggccatgccgggagacgggggagcagctggaagcgcgaggtgggtttgcgcggtcctttcggtgttcccgcttctagcggcggcggcccagggaaggtaccgcgcggtgttcagtttcggggactcgctggtggacgccggcaacctggtcacggagggcatcccggactacctcgccaccgcgcgcccgccctacggccagacctacttcggctaccccaccggcaggtgctccgacggccgcctcgtcgtcgatttcatcgcgcaggagttgggcctcccgctgccgccgccgtccaaggccaagaacgccagcttcgcgcagggcgccaacttcgccatcaccggcgccaccgcgctcgacaccgacttcttccggaagcgagggctcggcagcaccgtgtggaactccggctccctccgcacgcaaatccagtggctgcgagacctcaagccatcgctctgcagctccgcgcaaggcacacgatgcaaggagttcttcgccgagtgcctgttcgtcgtaggcgaattcggtgggaacgactacaacgccccgctgttcgccggcaaggacctcagggaggcatacaagctgacgtcccacgtgatccgagccatctccgatggagtcgaacaactgatcgccgagggggcaaaggatttgatcgtgcccggtgtgatgccatcagggtgctttccggtctacctgaccatgtacgctgaccccaaggaagggcatggctcgcgcaccggctgcctcaagcggttcaacactttctcttgggtgcacaatgcgatgctgaagcgcgcgctcgtgaagctccgagcgaagcaccctggcgcgaggatcatctatggcgattacttcacgccaatcatccagttcatactccagcccaagaaattcggtgagctcctcggtttcttgtttgcattgcattgaacactattctagaacggctgacaaaacaaaaatgccatcttaaacagaacatacgtggaaagaactgcagccgatcacatgtcttgtttatttctactctgttaaccaccattcattcaggcatcgcatcctgggacccataactcttttagcaacattctgaccaatcaaatagagaagcatgggactgcattgctgaaacatctgtgtcagaaggagaatcttccttccatgctatgcattggttttctcccggacatcatcaagagatggggttttacaaacaaccaccaagggcatgttgtggcgcgcctgggaggggtccttacaatttcaacctgacagcgaagtgcggtgagcctggtgcctcggcttgcgctgatcctaagacgcactggagctgggatggtattcacttgacagaagccgcgtatctgcacattgccagaggctggcttcatggaccgttcgcagaccagcctgttgtacaagcatcttgagttgagtacagtacacccagcctctcctccctgctgttcttgcacctctagagtgagtgtgccacaatagcacacaccgtgcgtgacaccaaactggatccgataaggtaaggtagtagtagttccagtgcagtcgggtaaagagctgagataggtctattaattaaagcttgattcctttcattcaggatggtggtataagtacaatgtaatgcacaaaacaattcatatgagtaccagttagaaatcactatggtggttagcttgctccaacttctgtatctaacttttgtatctatttatatattttttatatatataggacatatcatgtacaaccatg

SEQ ID NO: 58651 - DNA, 862 bp, Zea Mays
caaaattaaaacgagtcgagtagctgactaataaatcgagtcgagcaagttatcgaggaaccagtatttcgtccggtcgtccagccctatctgcagtccaccgtcgggcgagcccgagaatcccgtctcctcggcgccgcggcccccggtttttttatgctttcctttcggtcggcgacgcatacattcggcgagggagaggaagaagtcagtaaagtaaattctgttgctccaattcggacgaggagatgccgcggatccctctgatcaggttccccaagcggaatctcaaagccccatctccatccgcgccagcggcgtcgcaacccgcagaccagcacgcgaccctcatgttccggttagctggggggctccatctgatatcacctcatatgaattggaaattctaggaacatcaataagattgtatgcctgagcttattgcctttgacctctgaaagagtgttattgaagccatgtcgatatggaagtgttttttttaattcagtctggaagttggctgttgagacatccatttccagtactccgcacatgtaactgagcaaaccgtgaacacatttagttccttgcagaagtgttgagcatggaatggttttgcttttgcataccaggttattttgttgcggatgttttgcattcttgcccccaccataagatcgctgagcatgctttttgaagcatgcctttcttgtgcatgtacttgcccacgaggccacaagatccgtgtgcttttggataagttgtgccgttggtgagcccgtgctgcagtttctggttcccgattccgtactggcgtcagccgtcagtgttcccggttctgtttgggtgtttcagcggttta

SEQ ID NO: 58652 - DNA, 976 bp, Zea Mays
aaatcgagtcgagcaagttatcgaggaaccagtatttcgtccggtcgtccagccctatctgcagtccaccgtcgggcgagcccgagaatcccgtctcctcggcgccgcggcccccggtttttttatgctttcctttcggtcggcgacgcatacattcggcgagggagaggaagaagtcagtaaagtaaattctgttgctccaattcggacgaggagatgccgcggatccctctgatcaggttccccaagcggaatctcaaagccccatctccatccgcgccagcggcgtcgcaacccgcagaccagcacgcgaccctcatgttccggttagcagaggcaccatcttctggagagattaaaaattaccgctttagatctgatgtgccttgcccaccttctcatactgccgtaggaggtccagcttcactccttcctaagcgcaaacccctgactgaagaagagattgaggctattatgctggggggctccatctgatatcacctcatatgaattggaaattctaggaacatcaataagattgtatgcctgagcttattgcctttgacctctgaaagagtgttattgaagccatgtcgatatggaagtgttttttttaattcagtctggaagttggctgttgagacatccatttccagtactccgcacatgtaactgagcaaaccgtgaacacatttagttccttgcagaagtgttgagcatggaatggttttgcttttgcataccaggttattttgttgcggatgttttgcattcttgcccccaccataagatcgctgagcatgctttttgaagcatgcctttcttgtgcatgtacttgcccacgaggccacaagatccgtgtgcttttggataagttgtgccgttggtgagcccgtgctgcagtttctggttcccgattccgtactggcgtcagccgtcagtgttcccggttctgtttgggtgtttcagcggttta

SEQ ID NO: 58653 - DNA, 973 bp, Zea Mays
aaatcgagtcgagcaagttatcgaggaaccagtatttcgtccggtcgtccagccctatctgcagtccaccgtcgggcgagcccgagaatcccgtctcctcggcgccgcggcccccggtttttttatgctttcctttcggtcggcgacgcatacattcggcgagggagaggaagaagtcagtaaagtaaattctgttgctccaattcggacgaggagatgccgcggatccctctgatcaggttccccaagcggaatctcaaagccccatctccatccgcgccagcggcgtcgcaacccgcagaccagcacgcgaccctcatgttccggttagaggcaccatcttctggagagattaaaaattaccgctttagatctgatgtgccttgcccaccttctcatactgccgtaggaggtccagcttcactccttcctaagcgcaaacccctgactgaagaagagattgaggctattatgctggggggctccatctgatatcacctcatatgaattggaaattctaggaacatcaataagattgtatgcctgagcttattgcctttgacctctgaaagagtgttattgaagccatgtcgatatggaagtgttttttttaattcagtctggaagttggctgttgagacatccatttccagtactccgcacatgtaactgagcaaaccgtgaacacatttagttccttgcagaagtgttgagcatggaatggttttgcttttgcataccaggttattttgttgcggatgttttgcattcttgcccccaccataagatcgctgagcatgctttttgaagcatgcctttcttgtgcatgtacttgcccacgaggccacaagatccgtgtgcttttggataagttgtgccgttggtgagcccgtgctgcagtttctggttcccgattccgtactggcgtcagccgtcagtgttcccggttctgtttgggtgtttcagcggttta

SEQ ID NO: 58654 - DNA, 937 bp, Zea Mays
aaatcgagtcgagcaagttatcgaggaaccagtatttcgtccggtcgtccagccctatctgcagtccaccgtcgggcgagcccgagaatcccgtctcctcggcgccgcggcccccggtttttttatgctttcctttcggtcggcgacgcatacattcggcgagggagaggaagaagtcagtaaagtaaattctgttgctccaattcggacgaggagatgccgcggatccctctgatcaggttccccaagcggaatctcaaagccccatctccatccgcgccaggggctaaagcagaggcaccatcttctggagagattaaaaattaccgctttagatctgatgtgccttgcccaccttctcatactgccgtaggaggtccagcttcactccttcctaagcgcaaacccctgactgaagaagagattgaggctattatgctggggggctccatctgatatcacctcatatgaattggaaattctaggaacatcaataagattgtatgcctgagcttattgcctttgacctctgaaagagtgttattgaagccatgtcgatatggaagtgttttttttaattcagtctggaagttggctgttgagacatccatttccagtactccgcacatgtaactgagcaaaccgtgaacacatttagttccttgcagaagtgttgagcatggaatggttttgcttttgcataccaggttattttgttgcggatgttttgcattcttgcccccaccataagatcgctgagcatgctttttgaagcatgcctttcttgtgcatgtacttgcccacgaggccacaagatccgtgtgcttttggataagttgtgccgttggtgagcccgtgctgcagtttctggttcccgattccgtactggcgtcagccgtcagtgttcccggttctgtttgggtgtttcagcggttta

SEQ ID NO: 58655 - DNA, 967 bp, Zea Mays
aaatcgagtcgagcaagttatcgaggaaccagtatttcgtccggtcgtccagccctatctgcagtccaccgtcgggcgagcccgagaatcccgtctcctcggcgccgcggcccccggtttttttatgctttcctttcggtcggcgacgcatacattcggcgagggagaggaagaagtcagtaaagtaaattctgttgctccaattcggacgaggagatgccgcggatccctctgatcaggttccccaagcggaatctcaaagccccatctccatccgcgccagaccagcacgcgaccctcatgttccggttaggggctaaagcagaggcaccatcttctggagagattaaaaattaccgctttagatctgatgtgccttgcccaccttctcatactgccgtaggaggtccagcttcactccttcctaagcgcaaacccctgactgaagaagagattgaggctattatgctggggggctccatctgatatcacctcatatgaattggaaattctaggaacatcaataagattgtatgcctgagcttattgcctttgacctctgaaagagtgttattgaagccatgtcgatatggaagtgttttttttaattcagtctggaagttggctgttgagacatccatttccagtactccgcacatgtaactgagcaaaccgtgaacacatttagttccttgcagaagtgttgagcatggaatggttttgcttttgcataccaggttattttgttgcggatgttttgcattcttgcccccaccataagatcgctgagcatgctttttgaagcatgcctttcttgtgcatgtacttgcccacgaggccacaagatccgtgtgcttttggataagttgtgccgttggtgagcccgtgctgcagtttctggttcccgattccgtactggcgtcagccgtcagtgttcccggttctgtttgggtgtttcagcggttta

SEQ ID NO: 58656 - DNA, 1048 bp, Zea Mays
atttgcctatttccggtgcaggcagtctggcagagcaggcaggcaactgggccagagtcagacaggcctgcccgccacgccgtcccgacggccatggcccgacccttctcttccccacacatcccgtcttcatcctgggtgactcgccgccctcctccctggacctcctcaccgtccgtctccaccacgagaactagcgcctcgtctattaccgcgtgcagaccgcgccgcagggcagtcgcgccggcggcctccctccacctcggcccgggggagatcgccgagctcgcgcgcaacaaggttttgattgcggcgacagtggcgagcgcgatcgggcagctgtccaagcccttcacctcggtcaagaatgggggcgtcggcgccggccttgacctcagaaccgtcttccgctccggagggatgccctccacccactccgcgagcgttgttgcagttgctacttcgcttgggctagaaagatttagtgtgcagggggtttgcagactccatatttggaatgtcagtggtgtttgcagcaattgtaatgtatgatgctcagggagtaagaagagaagtgggcaaccacgccaaggtcttgaacaggttttggatcctcaaagagaaggcacctctggagtattctgaagtggacatggcagctcctgagtttgtttcggtctccgaggaagcgagctccaatgcgagcccctccttgaagcgcggttgtagcaccgaatcaccaagggtgaatgggctccgtgggtctgagctgactgagctgaagcaggcttacgtagaggaggattaccggttgagtgaatctgttggccacacggagcttcaggtcacagtcggcgccctgttgggttttgctgtaagcttagcagtgtatgcaacactgtaagagcaacttttcatatcacgtcccttaattggttacacatttacacctttttttttacacagaaacaatacatgcggtttattgttcccaccgtttaaatcagaaatgcctatgctagctcgtttcacattctgtaaccaaata

SEQ ID NO: 58657 - DNA, 1489 bp, Zea Mays
atttgcctatttccggtgcaggcagtctggcagagcaggcaggcaactgggccagagtcagacaggcctgcccgccacgccgtcccgacggccatggcccgacccttctcttccccacacatcccgtcttcatcctgggtgactcgccgccctcctccctggacctcctcaccgtccgtctccaccacgagaactagcgcctcgtctattaccgcgtgcagaccgcgccgcagggcagtcgcgccggcggcctccctccacctcggcccgggggagatcgccgagctcgcgcgcaacaaggttttgattgcggcgacagtggcgagcgcgatcgggcagctgtccaagcccttcacctcggtcaagaatgggggcgtcggcgccggccttgacctcagaaccgtcttccgctccggagggatgccctccacccactccgcggtgaaaacatcggattacctaccccactcccttaccaaaaccttttcttttccagtttttgcgttactcgcaatctttggagatacctcttccacatgtttgcactgttgtgctaagttgtggtgtggataacctagtcacagggaaaatgtttgccttatgtggtgaactgttatatgtagtttgcacaatgaatgattgaggatggctctatagatctttgaggagttctgaaatataaagtatcccaaacggctttaaaattgaattgaaacaaatgtggtggtttgtcaaacaagaagtgctgcaaggtcctatctgaatctgctgtttttttattctagagtaaagtaattctgttttagccttaccttttcatgtaaacctttcaaatccccttgtcattgacccttctaacggttctgagttctaacaaaactttcctatcttgtagagcgttgttgcagttgctacttcgcttgggctagaaagggggtttgcagactccatatttggaatgtcagtggtgtttgcagcaattgtaatgtatgatgctcagggagtaagaagagaagtgggcaaccacgccaaggtcttgaacaggttttggatcctcaaagagaaggcacctctggagtattctgaagtggacatggcagctcctgagtttgtttcggtctccgaggaagcgagctccaatgcgagcccctccttgaagcgcggttgtagcaccgaatcaccaagggtgaatgggctccgtgggtctgagctgactgagctgaagcaggcttacgtagaggaggattaccggttgagtgaatctgttggccacacggagcttcaggtcacagtcggcgccctgttgggttttgctgtaagcttagcagtgtatgcaacactgtaagagcaacttttcatatcacgtcccttaattggttacacatttacacctttttttttacacagaaacaatacatgcggtttattgttcccaccgtttaaatcagaaatgcctatgctagctcgtttcacattctgtaaccaaata

SEQ ID NO: 58658 - DNA, 1496 bp, Zea Mays
atttgcctatttccggtgcaggcagtctggcagagcaggcaggcaactgggccagagtcagacaggcctgcccgccacgccgtcccgacggccatggcccgacccttctcttccccacacatcccgtcttcatcctgggtgactcgccgccctcctccctggacctcctcaccgtccgtctccaccacgagaactagcgcctcgtctattaccgcgtgcagaccgcgccgcagggcagtcgcgccggcggcctccctccacctcggcccgggggagatcgccgagctcgcgcgcaacaaggttttgattgcggcgacagtggcgagcgcgatcgggcagctgtccaagcccttcacctcggtcaagaatgggggcgtcggcgccggccttgacctcagaaccgtcttccgctccggagggatgccctccacccactccgcggtgaaaacatcggattacctaccccactcccttaccaaaaccttttcttttccagtttttgcgttactcgcaatctttggagatacctcttccacatgtttgcactgttgtgctaagttgtggtgtggataacctagtcacagggaaaatgtttgccttatgtggtgaactgttatatgtagtttgcacaatgaatgattgaggatggctctatagatctttgaggagttctgaaatataaagtatcccaaacggctttaaaattgaattgaaacaaatgtggtggtttgtcaaacaagaagtgctgcaaggtcctatctgaatctgctgtttttttattctagagtaaagtaattctgttttagccttaccttttcatgtaaacctttcaaatccccttgtcattgacccttctaacggttctgagttctaacaaaactttcctatcttgtagagcgttgttgcagttgctacttcgcttgggctagaaagtgtgcagggggtttgcagactccatatttggaatgtcagtggtgtttgcagcaattgtaatgtatgatgctcagggagtaagaagagaagtgggcaaccacgccaaggtcttgaacaggttttggatcctcaaagagaaggcacctctggagtattctgaagtggacatggcagctcctgagtttgtttcggtctccgaggaagcgagctccaatgcgagcccctccttgaagcgcggttgtagcaccgaatcaccaagggtgaatgggctccgtgggtctgagctgactgagctgaagcaggcttacgtagaggaggattaccggttgagtgaatctgttggccacacggagcttcaggtcacagtcggcgccctgttgggttttgctgtaagcttagcagtgtatgcaacactgtaagagcaacttttcatatcacgtcccttaattggttacacatttacacctttttttttacacagaaacaatacatgcggtttattgttcccaccgtttaaatcagaaatgcctatgctagctcgtttcacattctgtaaccaaata

SEQ ID NO: 58659 - DNA, 1502 bp, Zea Mays
atttgcctatttccggtgcaggcagtctggcagagcaggcaggcaactgggccagagtcagacaggcctgcccgccacgccgtcccgacggccatggcccgacccttctcttccccacacatcccgtcttcatcctgggtgactcgccgccctcctccctggacctcctcaccgtccgtctccaccacgagaactagcgcctcgtctattaccgcgtgcagaccgcgccgcagggcagtcgcgccggcggcctccctccacctcggcccgggggagatcgccgagctcgcgcgcaacaaggttttgattgcggcgacagtggcgagcgcgatcgggcagctgtccaagcccttcacctcggtcaagaatgggggcgtcggcgccggccttgacctcagaaccgtcttccgctccggagggatgccctccacccactccgcggtgaaaacatcggattacctaccccactcccttaccaaaaccttttcttttccagtttttgcgttactcgcaatctttggagatacctcttccacatgtttgcactgttgtgctaagttgtggtgtggataacctagtcacagggaaaatgtttgccttatgtggtgaactgttatatgtagtttgcacaatgaatgattgaggatggctctatagatctttgaggagttctgaaatataaagtatcccaaacggctttaaaattgaattgaaacaaatgtggtggtttgtcaaacaagaagtgctgcaaggtcctatctgaatctgctgtttttttattctagagtaaagtaattctgttttagccttaccttttcatgtaaacctttcaaatccccttgtcattgacccttctaacggttctgagttctaacaaaactttcctatcttgtagagcgttgttgcagttgctacttcgcttgggctagaaagatttagtgtgcagggggtttgcagactccatatttggaatgtcagtggtgtttgcagcaattgtaatgtatgatgctcagggagtaagaagagaagtgggcaaccacgccaaggtcttgaacaggttttggatcctcaaagagaaggcacctctggagtattctgaagtggacatggcagctcctgagtttgtttcggtctccgaggaagcgagctccaatgcgagcccctccttgaagcgcggttgtagcaccgaatcaccaagggtgaatgggctccgtgggtctgagctgactgagctgaagcaggcttacgtagaggaggattaccggttgagtgaatctgttggccacacggagcttcaggtcacagtcggcgccctgttgggttttgctgtaagcttagcagtgtatgcaacactgtaagagcaacttttcatatcacgtcccttaattggttacacatttacacctttttttttacacagaaacaatacatgcggtttattgttcccaccgtttaaatcagaaatgcctatgctagctcgtttcacattctgtaaccaaata

SEQ ID NO: 58660 - DNA, 1042 bp, Zea Mays
atttgcctatttccggtgcaggcagtctggcagagcaggcaggcaactgggccagagtcagacaggcctgcccgccacgccgtcccgacggccatggcccgacccttctcttccccacacatcccgtcttcatcctgggtgactcgccgccctcctccctggacctcctcaccgtccgtctccaccacgagaactagcgcctcgtctattaccgcgtgcagaccgcgccgcagggcagtcgcgccggcggcctccctccacctcggcccgggggagatcgccgagctcgcgcgcaacaaggttttgattgcggcgacagtggcgagcgcgatcgggcagctgtccaagcccttcacctcggtcaagaatgggggcgtcggcgccggccttgacctcagaaccgtcttccgctccggagggatgccctccacccactccgcgagcgttgttgcagttgctacttcgcttgggctagaaagtgtgcagggggtttgcagactccatatttggaatgtcagtggtgtttgcagcaattgtaatgtatgatgctcagggagtaagaagagaagtgggcaaccacgccaaggtcttgaacaggttttggatcctcaaagagaaggcacctctggagtattctgaagtggacatggcagctcctgagtttgtttcggtctccgaggaagcgagctccaatgcgagcccctccttgaagcgcggttgtagcaccgaatcaccaagggtgaatgggctccgtgggtctgagctgactgagctgaagcaggcttacgtagaggaggattaccggttgagtgaatctgttggccacacggagcttcaggtcacagtcggcgccctgttgggttttgctgtaagcttagcagtgtatgcaacactgtaagagcaacttttcatatcacgtcccttaattggttacacatttacacctttttttttacacagaaacaatacatgcggtttattgttcccaccgtttaaatcagaaatgcctatgctagctcgtttcacattctgtaaccaaata

SEQ ID NO: 58661 - DNA, 1022 bp, Zea Mays
atttgcctatttccggtgcaggcagtctggcagagcaggcaggcaactgggccagagtcagacaggcctgcccgccacgccgtcccgacggccatggcccgacccttctcttccccacacatcccgtcttcatcctgggtgactcgccgccctcctccctggacctcctcaccgtccgtctccaccacgagaactagcgcctcgtctattaccgcgtgcagaccgcgccgcagggcagtcgcgccggcggcctccctccacctcggcccgggggagatcgccgagctcgcgcgcaacaaggttttgattgcggcgacagtggcgagcgcgatcgggcagctgtccaagcccttcacctcggtcaagaatgggggcgtcggcgccggccttgacctcagaaccgtcttccgctccggagggatgccctccacccactccgcgttgctacttcgcttgggctagaaagggggtttgcagactccatatttggaatgtcagtggtgtttgcagcaattgtaatgtatgatgctcagggagtaagaagagaagtgggcaaccacgccaaggtcttgaacaggttttggatcctcaaagagaaggcacctctggagtattctgaagtggacatggcagctcctgagtttgtttcggtctccgaggaagcgagctccaatgcgagcccctccttgaagcgcggttgtagcaccgaatcaccaagggtgaatgggctccgtgggtctgagctgactgagctgaagcaggcttacgtagaggaggattaccggttgagtgaatctgttggccacacggagcttcaggtcacagtcggcgccctgttgggttttgctgtaagcttagcagtgtatgcaacactgtaagagcaacttttcatatcacgtcccttaattggttacacatttacacctttttttttacacagaaacaatacatgcggtttattgttcccaccgtttaaatcagaaatgcctatgctagctcgtttcacattctgtaaccaaata

SEQ ID NO: 58662 - DNA, 1684 bp, Zea Mays
gcaacgatgctgcatccgagtccgagagaatgcgaaggcagcggcagcagatgcgtaggaaacggcggcagtgtatatatacactacacaaacgcttgaaagccaagcgatcgatccaccatctccatccggcatccgctatatataaatggcgacgtagccacagctgctgccgcgccttgccggttgccgctgggcacctgcactgcactgcacaccggtgagacgcgcgcggcgatcgatcgtcgtacgtacgtgatggcgccgtcgtctcggcgtgcctgccatggctgggcgtgggcgctgacgatggtcgtcgtcctagcgttgtcggcttcttcggcagacgatgctgcctgcgacctgttccgggggaggtgggtggcggacaagtcgtacccactgtacgacgcgtccgcctgcccgttcgtgccggacgtcttcgactgccgccgcaacggccgccccgacgacgcgtacctcaagttccggtggagcccagccaataactgccagctgcccaggtttgacggcgccgacttcctgaggaggtggcgagggaagacggtgatgttcgtgggggactcgctgagcatgaaccagtgggtgtccctcgcctgcatgctccacgccgccgccccggctcccgtccgcgccaccttcaccagcggcgagcccgtgtcggccgtgcgcttcgaggtccggtccgtcgccgtcgtcactcgactacgacctgtcactggtgctctaccacaccacgttcctggtggacgtcgtgcgggaggacatcggccgggtgctgaagctggactccatgcgcaacgccagcgactggctcggcgcgcacctgctcgtcttcaacacgtggcactggtggacctacaggggcgccagccaagtgtgggactacgtgcaggacgggaatagcacgtaccgggacatggacaggctgacggccttctccaaggccctctccacatgggcgcgctgggtcgacgccaacgtcgacgcctcccgaaccagggtcttctaccagggcgtctccccgagccactacgacatgtcgtcgaagcagcaggagagccaggctgggacgacgacggtgccagcagcagcggccgcgggaggcagctgcctgaggcagacgcggccgctgcaggaagctacggaggcggccggcggcggcggcggcgggacgaccctggccccggagcaggccgtggtgcggggcgtcatcggcgccatgagggcgccggtgtcgctgctcgacatcaccgcgctgtcgcagctcaggatcgacgcgcacccgtccgtgtacgccgggccggggcgggacggcatggactgcacgcactggtgcatcgcggggctcccggacgcatggaaccatatcatgtacgccatgctcctgcagcacacggcatagtttgaacatgaacaccgataattatattctttcggaaaaaaaacaagaaccaataataaacctctactgcatgcgctttatttattcttcttttcgaaaaaaccatttattgttgagcctctaattaggcattaattagtgttactagcctttaatggaagctagatcattattgtgtttaattagcttctctagctagatttattgaaataatgtaaccccctacgctgcaagttattagttggagtgtgatgatat

SEQ ID NO: 58663 - DNA, 1351 bp, Zea Mays
gctgacaccactcgtaaccagaatcgccgcaagccaatctgtctccgccaggcgccaagccaaccctcaccaccacccgtccaccgtgcatcaccgcccacagcctttattcgccaccgcagcaccccctgctcggccgcccgcccccgagttcccactcggccacttcccacatctctctctctctggctctctgctcgccacgcgccgtaccagcgccgcgcgccacatggctccctcgttcactagcctcctctcggccgcgaactccgccgccgccgcgaccgcctcgcggctcccctcggccgccgccggacgggcatccacttttgtgcgcttcccgcatcacccgacgggctgggctggggcctccgtcgcggcgccgcgtacggcgcgcaagcgggcacccggcgtcgcctacgccaccgcagctaccgagaagagcatctacgactacaccgttaaggacattgatggaaaagatgttcctcttaaaaagttcaagaataaggtgttgctgattgttaacgttgcttctcaatgtgggttgacaacagcaaattacactgaactatctcatatctatgagaagtacaagactcaagggtttgagatccttgcatttccttgcaatcaatttggtgcacaagaacctggatcaaatactcagattaagcagtttgcatgtacaagattcaaagctgaatttccgatttttgacaaggttgatgtcaatggacctaatacagctcccatctataaatttctgaagtccagtgcaggaggatttttgggtgatctcgtgaaatggaattttgagaagttcttagtggataagaatggcaaagtcattgagagatatccaccaacaacttcacctttccagattgagaaggacatccagaaactgctcgcggcataagtacttccaagtctttcagagactctgagtttgtgtggaggtcctcccgaagactttaatctcttgatttgagaaaggaaactcaagcttgatctaggtgatcgcttgagagagggaaagagttgaaagagacacatcctaagtggactccttaatagagaggtaggtttcctttagaaaccaaactctggtaaataaatcatttgtatcttgtgttgcctttccttgtgatttatttctcccttccctcttctaagtttgcttgctcgtgtttgattgaaaatcatttgtgttgctactgaagtaattctgtaaccattaagagcaacactagcaagaagaacacctctccctcactccgattgatctgcttctcgttctaacacctaaccgggatttgagttttttgtattaagtggtaaattttag

SEQ ID NO: 58664 - DNA, 1063 bp, Zea Mays
aaccagaatcgccgcaagccaatctgtctccgccaggcgccaagccaaccctcaccaccacccgtccaccgtgcatcaccgcccacagcctttattcgccaccgcagcaccccctgctcggccgcccgcccccgagttcccactcggccacttcccacatctctctctctctggctctctgctcgccacgcgccgtaccagcgccgcgcgccacatggctccctcgttcactagcctcctctcggccgcgaactccgccgccgccgcgaccgcctcgcggctcccctcggccgccgccggacgggcatccacttttgtgcgcttcccgcatcacccgacgggctgggctggggcctccgtcgcggcgccgcgtacggcgcgcaagcgggcacccggcgtcgcctacgccaccgcagctaccgagaagagcatctacgactacaccgttaaggacattgatggaaaagatgttcctcttaaaaagttcaagaataaggtgttgctgattgttaacgttgcttctcaatgtgggttgacaacagcaaattacactgaactatctcatatctatgagaagtacaagactcaagggtttgagatccttgcatttccttgcaatcaatttggtgcacaagaacctggatcaaatactcagattaagcagtttgcatgtacaagattcaaagctgaatttccgatttttgacaaggttgatgtcaatggacctaatacagctcccatctataaatttctgaagtccagtgcaggaggatttttgggtgatctcgtgaaatggaattttgagaagttcttagtggataagaatggcaaagtcattgagagatatccaccaacaacttcacctttccagattgagaaggacatccagaaactgctcgcggcataagtacttccaagtctttcaatgtaacatgagactatattagattttggactatcaactccgaagtttacctgtacatgaaactctgcccaacggagtagcttgggtgaactggctgcctgggagcatcctgattcctgaatgcttcggctcacctgt

SEQ ID NO: 58665 - DNA, 1724 bp, Zea Mays
aaccagaatcgccgcaagccaatctgtctccgccaggcgccaagccaaccctcaccaccacccgtccaccgtgcatcaccgcccacagcctttattcgccaccgcagcaccccctgctcggccgcccgcccccgagttcccactcggccacttcccacatctctctctctctggctctctgctcgccacgcgccgtaccagcgccgcgcgccacatggctccctcgttcactagcctcctctcggccgcgaactccgccgccgccgcgaccgcctcgcggctcccctcggccgccgccggacgggcatccacttttgtgcgcttcccgcatcacccgacgggctgggctggggcctccgtcgcggcgccgcgtacggcgcgcaagcgggcacccggcgtcgcctacgccaccgcagctaccgagaagagcatctacgactacaccgttaaggacattgatggaaaagatgttcctcttaaaaagttcaagaataaggtgttgctgattgttaacgttgcttctcaatgtgggttgacaacagcaaattacactgaactatctcatatctatgagaagtacaagactcaagggtttgagatccttgcatttccttgcaatcaatttggtgcacaagaacctggatcaaatactcagattaagcagtttgcatgtacaagattcaaagctgaatttccgatttttgacaaggttgatgtcaatggacctaatacagctcccatctataaatttctgaagtccagtgcaggaggatttttgggtgatctcgtgaaatggaattttgagaagttcttagtggataagaatggcaaagtcattgagagatatccaccaacaacttcacctttccagattgagaaggacatccagaaactgctcgcggcataagtacttccaagtctttcagctccgacacttcagaagttcttttgaatggcgtccctgggaaacgatttcacagcaaacgtggagtcagacaaggagatcctctgccccccttctttttgttcttgcgacagatctcctgcagtcgattgtcaacaaggcttgtgattgtggcatcctccggctccctctatcgaacacttgtggttctgatttccctattattcaatatgcagatgacactatcctcataatggaagcttgtcctaaacaacttttcttcctaaaggcgatgctcaattcttttgctgaatccacagagctacatgtcaactaccacaaatctaatatttatcccatcaatgtcacggaccaaaaaatgaaaatccttgcaaatacatttcactgcaaaattggttcaatgctgttcacctacttagggcttcccttgggattacaaagacccaaccttggtgcttttcttccacttattcagaaaattgagaaaagacttgcgtcaacctctgtcttcttatcccaggctggcagattgcaaatgattaatgcagtcttctcacttccaacatattacatgagcattctcaagctcccaaaaatggtgatcaaacatattgacaaattcagacgacactgcctttggagaggagcagatttaaatgcaaagaaacatcctcaagtagcctggaaaacagtttgcaagccaaaatttcaggggggattgggtgtgataaatttagagctacaaaacaaagcccttcttatgaagaatctgcataaattctacaacagagctgacatc

SEQ ID NO: 58666 - DNA, 1339 bp, Zea Mays
aaccagaatcgccgcaagccaatctgtctccgccaggcgccaagccaaccctcaccaccacccgtccaccgtgcatcaccgcccacagcctttattcgccaccgcagcaccccctgctcggccgcccgcccccgagttcccactcggccacttcccacatctctctctctctggctctctgctcgccacgcgccgtaccagcgccgcgcgccacatggctccctcgttcactagcctcctctcggccgcgaactccgccgccgccgcgaccgcctcgcggctcccctcggccgccgccggacgggcatccacttttgtgcgcttcccgcatcacccgacgggctgggctggggcctccgtcgcggcgccgcgtacggcgcgcaagcgggcacccggcgtcgcctacgccaccgcagctaccgagaagagcatctacgactacaccgttaaggacattgatggaaaagatgttcctcttaaaaagttcaagaataaggtgttgctgattgttaacgttgcttctcaatgtgggttgacaacagcaaattacactgaactatctcatatctatgagaagtacaagactcaagggtttgagatccttgcatttccttgcaatcaatttggtgcacaagaacctggatcaaatactcagattaagcagtttgcatgtacaagattcaaagctgaatttccgatttttgacaaggttgatgtcaatggacctaatacagctcccatctataaatttctgaagtccagtgcaggaggatttttgggtgatctcgtgaaatggaattttgagaagttcttagtggataagaatggcaaagtcattgagagatatccaccaacaacttcacctttccagattgagaaggacatccagaaactgctcgcggcataagtacttccaagtctttcacaggagactctgagtttgtgtggaggtcctcccgaagactttaatctcttgatttgagaaaggaaactcaagcttgatctaggtgatcgcttgagagagggaaagagttgaaagagacacatcctaagtggactccttaatagagaggtaggtttcctttagaaaccaaactctggtaaataaatcatttgtatcttgtgttgcctttccttgtgatttatttctcccttccctcttctaagtttgcttgctcgtgtttgattgaaaatcatttgtgttgctactgaagtaattctgtaaccattaagagcaacactagcaagaagaacacctctccctcactccgattgatctgcttctcgttctaacacctaaccgggatttgagttttttgtattaagtggtaaattttag

SEQ ID NO: 58667 - DNA, 1344 bp, Zea Mays
aaccagaatcgccgcaagccaatctgtctccgccaggcgccaagccaaccctcaccaccacccgtccaccgtgcatcaccgcccacagcctttattcgccaccgcagcaccccctgctcggccgcccgcccccgagttcccactcggccacttcccacatctctctctctctggctctctgctcgccacgcgccgtaccagcgccgcgcgccacatggctccctcgttcactagcctcctctcggccgcgaactccgccgccgccgcgaccgcctcgcggctcccctcggccgccgccggacgggcatccacttttgtgcgcttcccgcatcacccgacgggctgggctggggcctccgtcgcggcgccgcgtacggcgcgcaagcgggcacccggcgtcgcctacgccaccgcagctaccgagaagagcatctacgactacaccgttaaggacattgatggaaaagatgttcctcttaaaaagttcaagaataaggtgttgctgattgttaacgttgcttctcaatgtgggttgacaacagcaaattacactgaactatctcatatctatgagaagtacaagactcaagggtttgagatccttgcatttccttgcaatcaatttggtgcacaagaacctggatcaaatactcagattaagcagtttgcatgtacaagattcaaagctgaatttccgatttttgacaaggttgatgtcaatggacctaatacagctcccatctataaatttctgaagtccagtgcaggaggatttttgggtgatctcgtgaaatggaattttgagaagttcttagtggataagaatggcaaagtcattgagagatatccaccaacaacttcacctttccagattgagaaggacatccagaaactgctcgcggcataagtacttccaagtctttcagccagcaggagactctgagtttgtgtggaggtcctcccgaagactttaatctcttgatttgagaaaggaaactcaagcttgatctaggtgatcgcttgagagagggaaagagttgaaagagacacatcctaagtggactccttaatagagaggtaggtttcctttagaaaccaaactctggtaaataaatcatttgtatcttgtgttgcctttccttgtgatttatttctcccttccctcttctaagtttgcttgctcgtgtttgattgaaaatcatttgtgttgctactgaagtaattctgtaaccattaagagcaacactagcaagaagaacacctctccctcactccgattgatctgcttctcgttctaacacctaaccgggatttgagttttttgtattaagtggtaaattttag

SEQ ID NO: 58668 - DNA, 1197 bp, Zea Mays
aaccagaatcgccgcaagccaatctgtctccgccaggcgccaagccaaccctcaccaccacccgtccaccgtgcatcaccgcccacagcctttattcgccaccgcagcaccccctgctcggccgcccgcccccgagttcccactcggccacttcccacatctctctctctctggctctctgctcgccacgcgccgtaccagcgccgcgcgccacatggctccctcgttcactagcctcctctcggccgcgaactccgccgccgccgcgaccgcctcgcggctcccctcggccgccgccggacgggcatccacttttgtgcgcttcccgcatcacccgacgggctgggctggggcctccgtcgcggcgccgcgtacggcgcgcaagcgggcacccggcgtcgcctacgccaccgcagctaccgagaagagcatctacgactacaccgttaaggacattgatggaaaagatgttcctcttaaaaagttcaagaataaggtgttgctgattgttaacgttgcttctcaatgtgggttgacaacagcaaattacactgaactatctcatatctatgagaagtacaagactcaagggtttgagatccttgcatttccttgcaatcaatttggtgcacaagaacctggatcaaatactcagattaagcagtttgcatgtacaagattcaaagctgaatttccgatttttgacaaggttgatgtcaatggacctaatacagctcccatctataaatttctgaagtccagtgcaggaggatttttgggtgatctcgtgaaatggaattttgagaagttcttagtggataagaatggcaaagtcattgagagatatccaccaacaacttcacctttccagattgagaaggacatccagaaactgctcgcggcataagtacttccaagtctttcacaggagactctgagtttgtgtggaggtcctcccgaagactttaatctcttgatttgagaaaggaaactcaagcttgatctaggtgatcgcttgagagagggaaagagttgaaagagacacatcctaagtggactccttaatagagagtgttgagacgatcaacgataatggagaaagttgagtgaattcatgatggatcaaagcggtgaagcacaatgtaaaggcttggaccgagggaccaatgtgcaagggtggactatggctaaaacttg

SEQ ID NO: 58669 - DNA, 3234 bp, Zea Mays
aatcgccattaggttgatccttagtgaacgcctggcagggcccactcccccaccatctactcccctatttattagacgaccatctagtcatctacccatagcgtagcctttcaccaccgccgtacgcccgtacccccatgatccaaacctaattgccactgtaatccccacaatgccacgattgttcgtaaccctgattgccgtcgccgttgctgctgtcagctcagtggattcgcacgccaccgaccgcgccgctctgctcgccttcaagtccggcgtacggggcaacctctccgactggggctcccgctcccctagaatgtgcaactggactggcgtcacgtgtgactcgacaggacgcgtgacgcgcctccttctcaagaactctaacctcagcggcgtcatctccccgtcgatcggcaacctctccgctctcaggaagctcgatctccggttcaaccacctctccggcaccatcccgcgggagctcggcatgctgtcccagctcctggagctgaggctcggccacaacagtctcaccggtaccatcccggaggccgtcgtctgcaactgcacctccctgacctccatcatcctgagcaacaacagcctcaccggcgagatcccgttctccgcacggtgccggctcccgcgcctgcagcagctcagcctctacgagaacaggctcgaaggcggcatcccctcgcccatgtccaacttcaccagcctcagctgggtgcttctgcagtacaatcgcctcggcggcgtgctgccgtcccagatgttcagcaagatgccgtccctccggtacctctacctgtccggcaacagcttctcgagcgacggcgggaacaccgacctcgagccgttcctcgcctccctggcgaactgcaccgggctgcaggagcttggagtggggtcgaacggcatcggaggcgagatcccggcggtcatcggcaacctgtcgtccgccaatctctccctgctctacttggacgacaacgagatcaccggtgccatccctcgcgccatcggaaaccttgcctcgctgacggatttagagctgcaggacaacatgctggaggggccaatccccagcgagctgttccatccacgtgggcttacaaagatagtcctctcgaataaccagatcaatgccgaaatacccaaatccatcggcttattagctcagcagctagccaccatcagcatatcgaatagcggtctccgaggcgagataccagagaccttgtcgaacctcaccaacttggactacgttcttcttgaccacaaccagctctcgggtgccataccacctggtggtcttagctgccagatgatcctggacctttcgtacaacaagcttacaggccagatccctagtggcatgcctgggctccttggtagcttcaacatgtaccttaatctctctaacaacctcctagaggggcccgtgtcgtcactggagttcggcagcatggagatgatccaagctcttgacttgtcgggaaacaagctctccggcggccttccgtcttccatgggcgccttgaaaaacctccgtttccttgacgtttcttccaacggccttaccggtgtgattcctcggtctctgcaagggttgccgctccagtttgccaacttctcacacaacaacttcaccggcgaggtgtgcggcggagggtcattcgcgaacctcacgggcgactcgtttctcggcaatcctggcctgtgcgggtctgtccccggcatggcgccatgcggcggaaggaaacgtggccgcttcctgtacatagccatcggcgtcgtcgtcgccgttgctgtcggcttgttggccatggtgtgcgctgttgttgatcactacctgatgaggtcgtccaggtcgaggttggcaatggcagccccatctagtctactaccacgtttctccacgacaggattggtcaaggccaccggcgacggcgagaaggagagcggcgagcacccaaggatctcgtactgggagcttgccgacgcgaccgacggcttttcagaagtgaatctgatcgggaaaggaggatacgggcatgtctacaggggtgtcctccatggcgagagcgagacggtgatcgccgtgaaggtcctgcgccaggaccaggccgctggtggcgaggtggtcgccggcagcttcgagagggaatgccgggtgctcaggagcatccggcaccggaacctcatccgcgtggtcaccgcgtgcagcacgccggagttcaaggcggtcgtgctccccttcatgccgaacggcagcctcgacagcctcatccacgggcctccggcggcggcggcaggcgggccgcggcacctgggcctggacctggacctgctgctcggcgtggccagcaacgtcgccgagggcatggcgtacctgcaccaccacgcccccgtcaaggtcgtgcactgcgacctcaagcccagcaacgtcctcctcgacggcgacatgaccgccgtcgtatccgacttcggcatctccaagctggtggcgaccgacgacggcgcgagaggtccagaggtgacgggcgaggcatcgacgtcgtccgtgtgcaactccatcactcggctgttacaaggctctgtcggctacatcgcgcccggtatggcttgggaggccgcccttcgacgcaaggcgacgtgtacagcttcggggtgatgctgctggagatgatctccgggaagaggccgacggacgtgatctccgaggaggggcacggcctgcacgactgggccaagaaactcttgcagcacaagcgtgacttgggcgccgtcgtcgaggagcgctcgctgctgccgtttggcccgccgccgcggggcgagatggaagaggtcgccgtcgtcttggagctgcttgagatcggtgtcgcgtgctcgcagctcgcaccgtcgatgagaccctccatggacgacgtggcgcacgagatcgcgtacctcagggacggtacgtggaggaagtacggggtgacagatctcaaaaccaccatttttgaccagcaaactccaagatgcaccgactagttctatcttcagttgtccggtgccaaacgattagcacaaccgacagatctagcgtatatgtaactaagtttgaagtattgggatatagatcatggcctggtgtcaatgtgtgctactagctgtattgtactcgccgactgtccgtaaataaaccaccaatttgtaaagctgttttaaattatgttt

SEQ ID NO: 58670 - DNA, 203 bp, Zea Mays
gccagaactagcttactatttcggatgttgcaacgaaggcattccttcacagtgtatgtgatagttctctttatacaggtaagacagtgtacaagggcaaaactttgtatgaaattactctgggcctgtttggttcagcttttttttttaccagcttttctgagaatctggttgtggagagaatctagctgtgggaagaatct

SEQ ID NO: 58671 - DNA, 780 bp, Zea Mays
cacaaacactaaccataccactatgcatgctaagacattttatcttacgacaaatataactacgactcgtaagctcacaacaagataatcattgcgactactatatttatccaatccaactattccctatactcacgggaaataaatggatcagcttaccatgtccgaatcgacttggagcagggatttcgacgaggctatccggtttgaaccattcatcgaacaccaggtgtgtgtcattctccccaaaatcaatatccggcaagaacatcggtgtcgatcttcccaacacgcgacgagcactggtccactcattttgctgaacggggagctgcaggggcgcatagccagcgggcacgaggaaacgacgatagcgggaagtgagctcgcggcgcggcacgacgtgactgtggttttccgtgaactcggcaatcacgatgtgaggagcaggagaacggctggggcgagcccaacagagaacagcagggcgagcgacgccagggagctcggcacggtggagcacgcgaccaaggagtggtggggaattgactatgagataaagaatcatgggatccacatttcccaacatggtgaaggatacagagcactcattccagagatttggttcagcttctcactttgttttttaaatgagaagaagcagacaacaaattatagtgaaggctcctctcatcccctgtcgcatggtggatcacccccatggaaccagcctagccaaagacagggtgactattcttacatgaagagactatttcgtga

SEQ ID NO: 58672 - DNA, 501 bp, Zea Mays
cttaccatgtccgaatcgacttggagcagggatttcgacgaggctatccggtttgaaccattcatcgaacaccaggtgtgtgtcattctccccaaaatcaatatccggcaagaacatcggtgtcgatcttcccaacacgcgacgagcactggtccactcattttgctgaacggggagctgcaggggcgcatagccagcgggcacgaggaaacgacgatagcgggaagtgagctcgcggcgcggcacgacgtgactgtggttttccgtgaactcggcaatcacgatgtgaggagcaggagaacggctggggcgagcccaacagagaacagcagggcgagcgacgccagggagctcggcacggtggagcacgcgaccaaggagtggtggggaattgactatgagataaagaatcatgggatccacatttcccaacatggtgaaggatacagagcactcattccagagttgctttgagccgtggtggatctctaggtgtgacga

SEQ ID NO: 58673 - DNA, 2238 bp, Zea Mays
cgaactcacgcaacgcaagctgagcaaccgctgccggccgcgcacggccgcccacccaccagtccaccactaaagcctcacaccgccacagcagctgccgcggccgagccgacgacgaggatgagcggggccgcgctgtgcgcggcgctgacggagctggggttcgacggggaggacccgctggacgcggatgcgctggagtggccgttccagtatgaggaggcgcgaccgctgcttgcctggatctgctcctgcctccgcccctctaacgtcctctccccgtcccacctggcccagtatgaacaactcgtggaagagggaagactgttagagggtgaagatttggactctgcttttgatagtatttcagctttttcaagcaagaaagacaatcaagaggctgtgtttggatcggaagaaaccattcttgatatccggccaggcttcaactcttattcaaggtagaagatcacgtgtatctgctatgtctgcagttagtggagagcttatatcgctagatgagatactttcttccagaaacttggagatgaattcagttcttggaagaatcactgctactacccaggaactagcccattatcattcaggggatgaggaaagtatatatttggcatattcagacttccactcctatgttgttggtgacttggcttgtacgaaagagctaaataggtggttctcaaagcaatttgagaaggggccatttcgacttgttgctgaggaggggaaatccaaatgttcctgggttagtcttgatgacatcactaattgcttgataagaggagattctgaaaaatcgcatcatcaccaacgtgtcgctgagttgcaacgacttcggtccatatttgcaacaagtgaaagacaatggattgaagcgcaggttgagaatgctaaacagcaggctatactctctatattgaaagcacaagtgtcatccgacgaggctcatatacatagggatatccattctcttaggagaaaaggttctgagcttgctggagagctctcgacactttctcaaaaggtgcaagctttggtatctgagacaataccatgcctgtgttcagaacttgctcaacttcaaggcacatatatcttgcaaggggattatgatttaaaggtcatgcgccaggagtactacattaacaggcaaaaaacgttcatcaatcacttggttaatcagcttgccagacaccagtttctgaagattgcttgccaacttgaaaggaagaatatagctagtgcgtactcattgcttagagtaatagaatctgagttacaaagctacctctcagcagtcaatacccgcttgggtcattataattcattgattcaagctgcatctgaagtacgagaacaaggagctattgatgatcgtgacactttcctccatgcagtgcgagatctcctatgtattcactcaaatgtccaagcaacagtgccaacatacatgtcagcacatgcattggttcagcagatatcagcacttcaatctgacttgctttctcttcagtctgagctggagaacacccttccagctgaccggaaaagatgtatcaatgaattatgtactctgattcaaacagtggaacagcttctatttgcgtcgtcaactactgcagaaccaatattgacgccttggccattgatgcgggcacttgatgatatggaaaatgccaacgctcaagtcgaagtttctgtggaagaagtaaccaaggctcgcacccagaagataaagatctttgaaaatcgtgcccatgaggtggggagggagaggcaaatattcgttgatttcttctgcaaccctgaacgcctcaagaatcaagtcagagagctgacctcccgtgtgaaagctctccaggactaacctgtttctgtaggctggtctcacaggtcgtgatgctttttttttctatgtaaagtttgacttcactccagcgtcaggttggggctgctgtgcagggacggtatggaacaatatacccatcatgtagctcgggggggttcaggctgtaggtccttgtgccacccggaataggatggcattgttgtgatattatttgtagcgatatgtatgttgtaaagtatctcagaaatcacgagccctttctttcgtgtatggttttgcttttgagtaggttgtggtggtacagttgttagcgtccaaaggcacaatcggtactgtagtttggataaatgggatcgatttcctcttca

SEQ ID NO: 58674 - DNA, 2153 bp, Zea Mays
cgaactcacgcaacgcaagctgagcaaccgctgccggccgcgcacggccgcccacccaccagtccaccactaaagcctcacaccgccacagcagctgccgcggccgagccgacgacgaggatgagcggggccgcgctgtgcgcggcgctgacggagctggggttcgacggggaggacccgctggacgcggatgcgctggagtggccgttccagtatgaggaggcgcgaccgctgcttgcctggatctgctcctgcctccgcccctctaacgtcctctccccgtcccacctggcccagtatgaacaactcgtggaagagggaagactgttagagggtgaagatttggactctgcttttgatagtatttcagctttttcaagcaagaaagacaatcaagaggctgtgtttggatcggaagaaaccattcttgatatccgtgaagcaaaactagcatatagagccgaagtttttgagttacaaaagcagcttgtgcggcagcaagcacaatttgatttgcttgcaggccaggcttcaactcttattcaaggtagaagatcacgtgtatctgctatgtctgcagttagtggagagcttatatcgctagatgagatactttcttccagaaacttggaggggccatttcgacttgttgctgaggaggggaaatccaaatgttcctgggttagtcttgatgacatcactaattgcttgataagaggagattctgaaaaatcgcatcatcaccaacgtgtcgctgagttgcaacgacttcggtccatatttgcaacaagtgaaagacaatggattgaagcgcaggttgagaatgctaaacagcaggctatactctctatattgaaagcacaagtgtcatccgacgaggctcatatacatagggatatccattctcttaggagaaaaggttctgagcttgctggagagctctcgacactttctcaaaaggtgcaagctttggtatctgagacaataccatgcctgtgttcagaacttgctcaacttcaaggcacatatatcttgcaaggggattatgatttaaaggtcatgcgccaggagtactacattaacaggcaaaaaacgttcatcaatcacttggttaatcagcttgccagacaccagtttctgaagattgcttgccaacttgaaaggaagaatatagctagtgcgtactcattgcttagagtaatagaatctgagttacaaagctacctctcagcagtcaatacccgcttgggtcattataattcattgattcaagctgcatctgaagtacgagaacaaggagctattgatgatcgtgacactttcctccatgcagtgcgagatctcctatgtattcactcaaatgtccaagcaacagtgccaacatacatgtcagcacatgcattggttcagcagatatcagcacttcaatctgacttgctttctcttcagtctgagctggagaacacccttccagctgaccggaaaagatgtatcaatgaattatgtactctgattcaaacagtggaacagcttctatttgcgtcgtcaactactgcagaaccaatattgacgccttggccattgatgcgggcacttgatgatatggaaaatgccaacgctcaagtcgaagtttctgtggaagaagtaaccaaggctcgcacccagaagataaagatctttgaaaatcgtgcccatgaggtggggagggagaggcaaatattcgttgatttcttctgcaaccctgaacgcctcaagaatcaagtcagagagctgacctcccgtgtgaaagctctccaggactaacctgtttctgtaggctggtctcacaggtcgtgatgctttttttttctatgtaaagtttgacttcactccagcgtcaggttggggctgctgtgcagggacggtatggaacaatatacccatcatgtagctcgggggggttcaggctgtaggtccttgtgccacccggaataggatggcattgttgtgatattatttgtagcgatatgtatgttgtaaagtatctcagaaatcacgagccctttctttcgtgtatggttttgcttttgagtaggttgtggtggtacagttgttagcgtccaaaggcacaatcggtactgtagtttggataaatgggatcgatttcctcttca

SEQ ID NO: 58675 - DNA, 2064 bp, Zea Mays
cgaactcacgcaacgcaagctgagcaaccgctgccggccgcgcacggccgcccacccaccagtccaccactaaagcctcacaccgccacagcagctgccgcggccgagccgacgacgaggatgagcggggccgcgctgtgcgcggcgctgacggagctggggttcgacggggaggacccgctggacgcggatgcgctggagtggccgttccagtatgaggaggcgcgaccgctgcttgcctggatctgctcctgcctccgcccctctaacgtcctctccccgtcccacctggcccagtatgaacaactcgtggaagagggaagactgttagagggtgaagatttggactctgcttttgatagtatttcagctttttcaagcaagaaagacaatcaagaggctgtgtttggatcggaagaaaccattcttgatatccgtgaagcaaaactagcatatagagccgaagtttttgagttacaaaagcagcttgtgcggcagcaagcacaatttgatttgcttgcaggccaggcttcaactcttattcaaggtagaagatcacgtgtatctgctatgtctgcagttagtggagagcttatatcgctagatgagatactttcttccagaaacttggagatgaattcagttcttggaagaatcactgctactacccaggaactagcccattatcattcaggggatgaggaaagtatatatttggcatattcagacttccactcctatgttgttggtgacttggcttgtacgaaagagctaaataggtggttctcaaagcaatttgagaaggggccatttcgacttgttgctgaggaggggaaatccaaatgttcctgggttagtcttgatgacatcactaattgcttgataagaggagattctgaaaaatcgcatcatcaccaacgtgtcgctgagttgcaacgacttcggtccatatttgcaacaagtgaaagacaatggattgaagcgcaggttgagaatgctaaacagcaggctatactctctatattgaaagcacaagtgtcatccgacgaggctcatatacatagggatatccattctcttaggagaaaaggttctgagcttgctggagagctctcgacactttctcaaaaggtgcaagctttggtatctgagacaataccatgcctgtgttcagaacttgctcaacttcaaggcacatatatcttgcaaggggattatgatttaaaggtcatgcgccaggagtactacattaacaggcaaaaaacgttcatcaatcacttggttaatcagcttgccagacaccagtttctgaagattgcttgccaacttgaaaggaagaatatagctagtgcgtactcattgcttagagtaatagaatctgagttacaaagctacctctcagcagtcaatacccgcttgggtcattataattcattgattcaagctgcatctgaagtacgagaacaaggagctattgatgatcgtgacactttcctccatgcagtgcgagatctcctatgtattcactcaaatgtccaagcaacagtgccaacatacatgtcagcacatgcattggttcagcagatatcagcacttcaatctgacttgctttctcttcagtctgagctggagaacacccttccagctgaccggaaaagatgtatcaatgaattatgtactctgattcaaacagtggaacagcttctatttgcgtcgtcaactactgcagaaccaatattgacgccttggccattgatgcgggcacttgatgatatggaaaatgccaacgctcaagtcgaagtttctgtggaagaagtaaccaaggctcgcacccagaagataaagatctttgaaaatcgtgcccatgaggtggggagggagaggcaaatattcgttgatttcttctgcaaccctgaacgcctcaagaatcaagtcagagagctgacctcccgtgtgaaagctctccaggactaacctgtttctgtaggctggtttccctgttggcgcggaggtgaattcttcgtcggaaccatctgaggcttccacgccgatgctgtccccgtc

SEQ ID NO: 58676 - DNA, 3019 bp, Zea Mays
cttcactcggcacctccaccaccgtaatttcgttccctcacgttatcgctgtcgaccctctccctcttaggattatagtgttagcatggatttataagagtcgagattgtaccaaactaaactcctataaaaaaggagcaatttacaaaaatgccaaaactgcggtgtgaatgagcgccaaacggccgaaaccctaacaccgtccactcccgtcggccaccagccacctccatttcaaatacagtttccaccttcctcctccgcctcccacccctcgctgtctccggcgagacccggaaatggatctcgtcgcctccccctccaggtcaaaatccaagcccagatcctcgccagcgaagcccgtcgccgcccccgctgagtccaggatggacctctgcaccccgtccaagcccacgcccaggcggaagtccaaaacgacggcctcgccggcgccgatgtctccggcgacgccatccaccgtccgacgctcgcgtcgccttcttgaaacccccaccaaagcctccccggaggtgcaagtgaaggctacgcccatctccagggctaagcgcaccgcgccgtcaccgaaaacccctgttcagcgcgagaccaagaggcagaggcgacacccgaggaagagggcatactaccggaaggtggtgtatgatggcggggagttcgaggtcggcgatgacgtgtacgtgaagaggcgggagacggcggagtctgacgcggaggaccccgaggaggaggagtgccgcgtatgcttccgcactggcggcggggttatggtggagtgcgacgcgtgcctcggcggattccacctgcgatgcgtgcgaccgccgcttcggagggtgcctgaaggtgattgggcgtgcccttactgcgaggccgagcgcgccggtaaggtggtcgagcggcccaggccgcctgaggggaagcgcgtcgtgaggaccgccaaggaaaaactcctttccagcgacctgtgggctgcacgcatcgagagtttatggagggagcctgatgggacgttctgggcaaaggtcaggtggtacattatccctgaagagactgcagcaggaaggcagctgcataacttgagaagagagctgtatcgtaccaatgatcttgcagacattgagatggaaacaatccttagacattgttctataatgtgccccaaagactttagggatgctaacaacggaggggatgatgtattttattgtgaatatgagtatgatatacattggcataattttaagcgtttggcagatattgatgatgagccagagacaaaggaagatctcagtgacgagccctacaatgctggtgatgattataacagtgacactgatgaagattcagactatgacgaggaggaagaatccacatcatctttctctgtcagaaggaatcaatcacatgaatctgcggcgaattcaaggaaaggtagaatatatggcctgcaaaaaattgggatacaaaaaattcctgagcatgctcggtgccaccaaaagactgagctggagaaggctaaagcaaccctgttattggcaactcttcctaagtcattgccttgcagagataaagaaatggatgagatatcaatatttgtaaaggatgcaatctgcaacaaccaatgcctaggacgctgcctttatatacatggtgtacctggcactggcaagactatgagtgtacttgctgttatgaggaggctgagatctgaatttgattctggaactctgaggccatattgttttatcgaaattaatggtcttaaattagcatctccagagaatatctacaaggttgtatatgaacagttgagtgggcatagggttgggtggaaaaaggctcttcactatttaacagaacatttttcaggtggtactaaaattggaaagcaagcaaaccagccaattgttttgctgatcgatgaacttgatcttcttatgacaagaaaccaatcggtgttgtataacattcttgactggcctaccaaaccaaattcaaatctagttgttataggtatagcaaacacaatggatcttccagaaaagttattgcctcgtatatcaagtcggatgggtatccaacgactgtgttttggtccatacaattatagacaactgcaggaaattataacaagccgtttaaagggtattgatgcctttgaggaacaggctattgaatttgcttctagaaaggtagctgctatgtcaggtgatgctaggcgagctttagagatttgtagacgggcagcagagtttgcagactaccgtgtcaaacagtctcgacagtctgcacagactactgtttctgcaaagaaaggtgatgctgttgtttccatgggtgacatagaagctgctattcaggaagtcttccaggcacctcatattcaagtgatgaagaattgcccaaagtttggaaaagttatactggttgccatggttcatgagctgtacaaaagtggactaggtgaaataatgtttgataagttagcaacaacagttttctcctggtgccatgccaacagagaactattgcctggatacgacactctcttgaaaatttgttgcaagcttggtgaaagcaagatcatcctctgtgaagagggtagtaagcacaagttgcagaaggttcagcttaactatccaagtgacgatgtgacatttgccctcaaggaatccccagatcttccttggctatccaagtacttgtgaggttcatattacattaaccattaattcctggcgttctgttgcatttctgttctctttggaagcaacgattcactttacctgcagaccttgcatacacacgtcccatggtcgatctgcaaaggaaccatcgaaggatgtcggcatggcgctgcacccaagggatcacgcatatttaatcgcacaacaggaacataaaacgttaagaaatattaactatatacgaattgttcgttaaacattgacagttttgaataagaaacattgagatatcaaatttgtactttgccggcccc

SEQ ID NO: 58677 - DNA, 2937 bp, Zea Mays
cttcactcggcacctccaccaccgtaatttcgttccctcacgttatcgctgtcgaccctctccctcttaggattatagtgttagcatggatttataagagtcgagattgtaccaaactaaactcctataaaaaaggagcaatttacaaaaatgccaaaactgcggtgtgaatgagcgccaaacggccgaaaccctaacaccgtccactcccgtcggccaccagccacctccatttcaaatacagtttccaccttcctcctccgcctcccacccctcgctgtctccggcgagacccggaaatggatctcgtcgcctccccctccaggtcaaaatccaagcccagatcctcgccagcgaagcccgtcgccgcccccgctgagtccaggatggacctctgcaccccgtccaagcccacgcccaggcggaagtccaaaacgacggcctcgccggcgccgatgtctccggcgacgccatccaccgtccgacgctcgcgtcgccttcttgaaacccccaccaaagcctccccggaggtgcaagtgaaggctacgcccatctccagggctaagcgcaccgcgccgtcaccgaaaacccctgttcagcgcgagaccaagaggcagaggcgacacccgaggaagagggcatactaccggaaggtggtgtatgatggcggggagttcgaggtcggcgatgacgtgtacgtgaagaggcgggagacggcggagtctgacgcggaggaccccgaggaggaggagtgccgcgtatgcttccgcactggcggcggggttatggtggagtgcgacgcgtgcctcggcggattccacctgcgatgcgtgcgaccgccgcttcggagggtgcctgaaggtgattgggcgtgcccttactgcgaggccgagcgcgccggtaaggtggtcgagcggcccaggccgcctgaggggaagcgcgtcgtgaggaccgccaaggaaaaactcctttccagcgacctgtgggctgcacgcatcgagagtttatggagggagcctgatgggacgttctgggcaaaggtcaggtggtacattatccctgaagagactgcagcaggaaggcagctgcataacttgagaagagagctgtatcgtaccaatgatcttgcagacattgagatggaaacaatccttagacattgttctataatgtgccccaaagactttagggatgctaacaacggaggggatgatgtattttattgtgaatatgagtatgatatacattggcataattttaagcgtttggcagatattgatgatgagccagagacaaaggaagatctcagtgacgagccctacaatgctggtgatgattataacagtgacactgatgaagattcagactatgacgaggaggaagaatccacatcatctttctctgtcagaaggaatcaatcacatgaatctgcggcgaattcaaggaaaggtagaatatatggcctgcaaaaaattgggatacaaaaaattcctgagcatgctcggtgccaccaaaagactgagctggagaaggctaaagcaaccctgttattggcaactcttcctaagtcattgccttgcagagataaagaaatggatgagatatcaatatttgtaaaggatgcaatctgcaacaaccaatgcctaggacgctgcctttatatacatggtgtacctggcactggcaagactatgagtgtacttgctgttatgaggaggctgagatctgaatttgattctggaactctgaggccatattgttttatcgaaattaatggtcttaaattagcatctccagagaatatctacaaggttgtatatgaacagttgagtgggcatagggttgggtggaaaaaggctcttcactatttaacagaacatttttcaggtggtactaaaattggaaagcaagcaaaccagccaattgttttgctgatcgatgaacttgatcttcttatgacaagaaaccaatcggtgttgtataacattcttgactggcctaccaaaccaaattcaaatctagttgttataggtatagcaaacacaatggatcttccagaaaagttattgcctcgtatatcaagtcggatgggtatccaacgactgtgttttggtccatacaattatagacaactgcaggaaattataacaagccgtttaaagggtattgatgcctttgaggaacaggctattgaatttgcttctagaaaggtagctgctatgtcaggtgatgctaggcgagctttagagatttgtagacgggcagcagagtttgcagactaccgtgtcaaacagtctcgacagtctgcacagactactgtttctgcaaagaaaggtgatgctgttgtttccatgggtgacatagaagctgctattcaggaagtcttccaggcacctcatattcaagtgatgaagaattgcccaaagtttggaaaagttatactggttgccatggttcatgagctgtacaaaagtggactaggtgaaataatgtttgataagttagcaacaacagttttctcctggtgccatgccaacagagaactattgcctggatacgacactctcttgaaaatttgttgcaagcttggtgaaagcaagatcatcctctgtgaagagggtagtaagcacaagttgcagaaggttcagcttaactatccaagtgacgatgtgacatttgccctcaaggaatccccagatcttccttggctatccaagtacttgtgaggaccttgcatacacacgtcccatggtcgatctgcaaaggaaccatcgaaggatgtcggcatggcgctgcacccaagggatcacgcatatttaatcgcacaacaggaacataaaacgttaagaaatattaactatatacgaattgttcgttaaacattgacagttttgaataagaaacattgagatatcaaatttgtactttgccggcccc

SEQ ID NO: 58678 - DNA, 3103 bp, Zea Mays
ctcacgttatcgctgtcgaccctctccctcttaggattatagtgttagcatggatttataagagtcgagattgtaccaaactaaactcctataaaaaaggagcaatttacaaaaatgccaaaactgcggtgtgaatgagcgccaaacggccgaaaccctaacaccgtccactcccgtcggccaccagccacctccatttcaaatacagtttccaccttcctcctccgcctcccacccctcgctgtctccggcgagacccggaaatggatctcgtcgcctccccctccaggtcaaaatccaagcccagatcctcgccagcgaagcccgtcgccgcccccgctgagtccaggatggacctctgcaccccgtccaagcccacgcccaggcggaagtccaaaacgacggcctcgccggcgccgatgtctccggcgacgccatccaccgtccgacgctcgcgtcgccttcttgaaacccccaccaaagcctccccggaggtgcaagtgaaggctacgcccatctccagggctaagcgcaccgcgccgtcaccgaaaacccctgttcagcgcgagaccaagaggcagaggcgacacccgaggaagagggcatactaccggaaggtggtgtatgatggcggggagttcgaggtcggcgatgacgtgtacgtgaagaggcgggagacggcggagtctgacgcggaggaccccgaggaggaggagtgccgcgtatgcttccgcactggcggcggggttatggtggagtgcgacgcgtgcctcggcggattccacctgcgatgcgtgcgaccgccgcttcggagggtgcctgaaggtgattgggcgtgcccttactgcgaggccgagcgcgccggtaaggtggtcgagcggcccaggccgcctgaggggaagcgcgtcgtgaggaccgccaaggaaaaactcctttccagcgacctgtgggctgcacgcatcgagagtttatggagggagcctgatgggacgttctgggcaaaggtcaggtggtacattatccctgaagagactgcagcaggaaggcagctgcataacttgagaagagagctgtatcgtaccaatgatcttgcagacattgagatggaaacaatccttagacattgttctataatgtgccccaaagactttagggatgctaacaacggaggggatgatgtattttattgtgaatatgagtatgatatacattggcataattttaagcgtttggcagatattgatgatgagccagagacaaaggaagatctcagtgacgagccctacaatgctggtgatgattataacagtgacactgatgaagattcagactatgacgaggaggaagaatccacatcatctttctctgtcagaaggaatcaatcacatgaatctgcggcgaattcaaggaaaggtagaatatatggcctgcaaaaaattgggatacaaaaaattcctgagcatgctcggtgccaccaaaagactgagctggagaaggctaaagcaaccctgttattggcaactcttcctaagtcattgccttgcagagataaagaaatggatgagatatcaatatttgtaaaggatgcaatctgcaacaaccaatgcctaggacgctgcctttatatacatggtgtacctggcactggcaagactatgagtgtacttgctgttatgaggaggctgagatctgaatttgattctggaactctgaggccatattgttttatcgaaattaatggtcttaaattagcatctccagagaatatctacaaggtggtactaaaattggaaagcaagcaaaccagccaattgttttgctgatcgatgaacttgatcttcttatgacaagaaaccaatcggtgttgtataacattcttgactggcctaccaaaccaaattcaaatctagttgttataggtatagcaaacacaatggatcttccagaaaagttattgcctcgtatatcaagtcggatgggtatccaacgactgtgttttggtccatacaattatagacaactgcaggaaattataacaagccgtttaaagggtattgatgcctttgaggaacaggctattgaatttgcttctagaaaggtagctgctatgtcaggtgatgctaggcgagctttagagatttgtagacgggcagcagagtttgcagactaccgtgtcaaacagtctcgacagtctgcacagactactgtttctgcaaagaaaggtgatgctgttgtttccatgggtgacatagaagctgctattcaggaagtcttccaggcacctcatattcaagtgatgaagaattgcccaaagtttggaaaagttatactggttgccatggttcatgagctgtacaaaagtggactaggtgaaataatgtttgataagttagcaacaacagttttctcctggtgccatgccaacagagaactattgcctggatacgacactctcttgaaaatttgttgcaagcttggtgaaagcaagatcatcctctgtgaagagggtagtaagcacaagttgcagaaggttcagcttaactatccaagtgacgatgtgacatttgccctcaaggaatccccagatcttccttggctatccaagtacttgtgaggttcatattacattaaccattaattcctggcgttctgttgcatttctgttctctttggaagcaacgattcactttacctgcagtaagttctctttgcattgctgatgccctgattgcggcttcaattcttggacctgctaaggagctgagcacattacatatcttatcatatgcaggaccttgcatacacacgtcccatggtcgatctgcaaaggaaccatcgaaggatgtcggcatggcgctgcacccaagggatcacgcatatttaatcgcacaacaggaacataaaacgttaagaaatatgtacgtctgcaatttcgtctccttcaaactatggtgttgtttgtgttgtattgaactgccgcgtgtgagctgatccaattgttttctattgccatctttcagtaactatatacgaattgttcgttaaacattgacagttttgaataagaaacattgagatatcaaatttgtactttgccggcccc

SEQ ID NO: 58679 - DNA, 2858 bp, Zea Mays
aaaccctaacaccgtccactcccgtcggccaccagccacctccatttcaaatacagtttccaccttcctcctccgcctcccacccctcgctgtctccggcgagacccggaaatggatctcgtcgcctccccctccaggtcaaaatccaagcccagatcctcgccagcgaagcccgtcgccgcccccgctgagtccaggatggacctctgcaccccgtccaagcccacgcccaggcggaagtccaaaacgacggcctcgccggcgccgatgtctccggcgacgccatccaccgtccgacgctcgcgtcgccttcttgaaacccccaccaaagcctccccggaggtgcaagtgaaggctacgcccatctccagggctaagcgcaccgcgccgtcaccgaaaacccctgttcagcgcgagaccaagaggcagaggcgacacccgaggaagagggcatactaccggaaggtggtgtatgatggcggggagttcgaggtcggcgatgacgtgtacgtgaagaggcgggagacggcggagtctgacgcggaggaccccgaggaggaggagtgccgcgtatgcttccgcactggcggcggggttatggtggagtgcgacgcgtgcctcggcggattccacctgcgatgcgtgcgaccgccgcttcggagggtgcctgaaggtgattgggcgtgcccttactgcgaggccgagcgcgccggtaaggtggtcgagcggcccaggccgcctgaggggaagcgcgtcgtgaggaccgccaaggaaaaactcctttccagcgacctgtgggctgcacgcatcgagagtttatggagggagcctgatgggacgttctgggcaaaggtcaggtggtacattatccctgaagagactgcagcaggaaggcagctgcataacttgagaagagagctgtatcgtaccaatgatcttgcagacattgagatggaaacaatccttagacattgttctataatgtgccccaaagactttagggatgctaacaacggaggggatgatgtattttattgtgaatatgagtatgatatacattggcataattttaagcgtttggcagatattgatgatgagccagagacaaaggaagatctcagtgacgagccctacaatgctggtgatgattataacagtgacactgatgaagattcagactatgacgaggaggaagaatccacatcatctttctctgtcagaaggaatcaatcacatgaatctgcggcgaattcaaggaaaggtagaatatatggcctgcaaaaaattgggatacaaaaaattcctgagcatgctcggtgccaccaaaagactgagctggagaaggctaaagcaaccctgttattggcaactcttcctaagtcattgccttgcagagataaagaaatggatgagatatcaatatttgtaaaggatgcaatctgcaacaaccaatgcctaggacgctgcctttatatacatggtgtacctggcactggcaagactatgagtgtacttgctgttatgaggaggctgagatctgaatttgattctggaactctgaggccatattgttttatcgaaattaatggtcttaaattagcatctccagagaatatctacaagggtggtactaaaattggaaagcaagcaaaccagccaattgttttgctgatcgatgaacttgatcttcttatgacaagaaaccaatcggtgttgtataacattcttgactggcctaccaaaccaaattcaaatctagttgttataggtatagcaaacacaatggatcttccagaaaagttattgcctcgtatatcaagtcggatgggtatccaacgactgtgttttggtccatacaattatagacaactgcaggaaattataacaagccgtttaaagggtattgatgcctttgaggaacaggctattgaatttgcttctagaaaggtagctgctatgtcaggtgatgctaggcgagctttagagatttgtagacgggcagcagagtttgcagactaccgtgtcaaacagtctcgacagtctgcacagactactgtttctgcaaagaaaggtgatgctgttgtttccatgggtgacatagaagctgctattcaggaagtcttccaggcacctcatattcaagtgatgaagaattgcccaaagtttggaaaagttatactggttgccatggttcatgagctgtacaaaagtggactaggtgaaataatgtttgataagttagcaacaacagttttctcctggtgccatgccaacagagaactattgcctggatacgacactctcttgaaaatttgttgcaagcttggtgaaagcaagatcatcctctgtgaagagggtagtaagcacaagttgcagaaggttcagcttaactatccaagtgacgatgtgacatttgccctcaaggaatccccagatcttccttggctatccaagtacttgtgaggttcatattacattaaccattaattcctggcgttctgttgcatttctgttctctttggaagcaacgattcactttacctgcagaccttgcatacacacgtcccatggtcgatctgcaaaggaaccatcgaaggatgtcggcatggcgctgcacccaagggatcacgcatatttaatcgcacaacaggaacataaaacgttaagaaatatgtacgtctgcaatttcgtctccttcaaactatggtgttgtttgtgttgtattgaactgccgcgtgtgagctgatccaattgttttctattgccatctttcagtaactatatacgaattgttcgttaaacattgacagttttgaataagaaacattgagatatcaaatttgtactttgccggcccc

SEQ ID NO: 58680 - DNA, 2847 bp, Zea Mays
aaaccctaacaccgtccactcccgtcggccaccagccacctccatttcaaatacagtttccaccttcctcctccgcctcccacccctcgctgtctccggcgagacccggaaatggatctcgtcgcctccccctccaggtcaaaatccaagcccagatcctcgccagcgaagcccgtcgccgcccccgctgagtccaggatggacctctgcaccccgtccaagcccacgcccaggcggaagtccaaaacgacggcctcgccggcgccgatgtctccggcgacgccatccaccgtccgacgctcgcgtcgccttcttgaaacccccaccaaagcctccccggaggtgcaagtgaaggctacgcccatctccagggctaagcgcaccgcgccgtcaccgaaaacccctgttcagcgcgagaccaagaggcagaggcgacacccgaggaagagggcatactaccggaaggtggtgtatgatggcggggagttcgaggtcggcgatgacgtgtacgtgaagaggcgggagacggcggagtctgacgcggaggaccccgaggaggaggagtgccgcgtatgcttccgcactggcggcggggttatggtggagtgcgacgcgtgcctcggcggattccacctgcgatgcgtgcgaccgccgcttcggagggtgcctgaaggtgattgggcgtgcccttactgcgaggccgagcgcgccggtaaggtggtcgagcggcccaggccgcctgaggggaagcgcgtcgtgaggaccgccaaggaaaaactcctttccagcgacctgtgggctgcacgcatcgagagtttatggagggagcctgatgggacgttctgggcaaaggtcaggtggtacattatccctgaagagactgcagcaggaaggcagctgcataacttgagaagagagctgtatcgtaccaatgatcttgcagacattgagatggaaacaatccttagacattgttctataatgtgccccaaagactttagggatgctaacaacggaggggatgatgtattttattgtgaatatgagtatgatatacattggcataattttaagcgtttggcagatattgatgatgagccagagacaaaggaagatctcagtgacgagccctacaatgctggtgatgattataacagtgacactgatgaagattcagactatgacgaggaggaagaatccacatcatctttctctgtcagaaggaatcaatcacatgaatctgcggcgaattcaaggaaaggtagaatatatggcctgcaaaaaattgggatacaaaaaattcctgagcatgctcggtgccaccaaaagactgagctggagaaggctaaagcaaccctgttattggcaactcttcctaagtcattgccttgcagagataaagaaatggatgagatatcaatatttgtaaaggatgcaatctgcaacaaccaatgcctaggacgctgcctttatatacatggtgtacctggcactggcaagactatgagtgtacttgctgttatgaggaggctgagatctgaatttgattctggaactctgaggccatattgttttatcgaaattaatggtcttaaattagcatctccagagaatatctacaaggttgtatatgaacagttgagtgggcatagggttgggtggaaaaaggctcttcactatttaacagaacatttttcaggtggtactaaaattggaaagcaagcaaaccagccaattgttttgctgatcgatgaacttgatcttcttatgacaagaaaccaatcggtgttgtataacattcttgactggcctaccaaaccaaattcaaatctagttgttataggtatagcaaacacaatggatcttccagaaaagttattgcctcgtatatcaagtcggatgggtatccaacgactgtgttttggtccatacaattatagacaactgcaggaaattataacaagccgtttaaagggtattgatgcctttgaggaacaggctattgaatttgcttctagaaagctgctatgtcaggtgatgctaggcgagctttagagatttgtagacgggcagcagagtttgcagactaccgtgtcaaacagtctcgacagtctgcacagactactgtttctgcaaagaaaggtgatgctgttgtttccatgggtgacatagaagctgctattcaggaagtcttccaggcacctcatattcaagtgatgaagaattgcccaaagtttggaaaagttatactggttgccatggttcatgagctgtacaaaagtggactaggtgaaataatgtttgataagttagcaacaacagttttctcctggtgccatgccaacagagaactattgcctggatacgacactctcttgaaaatttgttgcaagcttggtgaaagcaagatcatcctctgtgaagagggtagtaagcacaagttgcagaaggttcagcttaactatccaagtgacgatgtgacatttgccctcaaggaatccccagatcttccttggctatccaagtacttgtgaggaccttgcatacacacgtcccatggtcgatctgcaaaggaaccatcgaaggatgtcggcatggcgctgcacccaagggatcacgcatatttaatcgcacaacaggaacataaaacgttaagaaatatgtacgtctgcaatttcgtctccttcaaactatggtgttgtttgtgttgtattgaactgccgcgtgtgagctgatccaattgttttctattgccatctttcagtaactatatacgaattgttcgttaaacattgacagttttgaataagaaacattgagatatcaaatttgtactttgccggcccc

SEQ ID NO: 58681 - DNA, 829 bp, Zea Mays
tgcggcttcatgtcgtgttgagtttgggtgaccatataggaggtgatgctgttgtttccatgggtgacatagaagctgctattcaggaagtcttccaggcacctcatattcaagtgatgaagaattgcccaaagtttggaaaagttatactggttgccatggttcatgagctgtacaaaagtggactaggtgaaataatgtttgataagttagcaacaacagttttctcctggtgccatgccaacagagaactattgcctggatacgacactctcttgaaaatttgttgcaagcttggtgaaagcaagatcatcctctgtgaagagggtagtaagcacaagttgcagaaggttcagcttaactatccaagtgacgatgtgacatttgccctcaaggaatccccagatcttccttggctatccaagtacttgtgaggttcatattacattaaccattaattcctggcgttctgttgcatttctgttctctttggaagcaacgattcactttacctgcagaccttgcatacacacgtcccatggtcgatctgcaaaggaaccatcgaaggatgtcggcatggcgctgcacccaagggatcacgcatatttaatcgcacaacaggaacataaaacgttaagaaatatgtacgtctgcaatttcgtctccttcaaactatggtgttgtttgtgttgtattgaactgccgcgtgtgagctgatccaattgttttctattgccatctttcagtaactatatacgaattgttcgttaaacattgacagttttgaataagaaacattgagatatcaaatttgtactttgccggcccc

SEQ ID NO: 58682 - DNA, 1388 bp, Zea Mays
cgtcgctcctcccttctcgtgtcccgtcgtccccttctcccatcagcgggagggcggcggcgtcagccggcaaaaaagcaaagcgtcacgagaagctcgttccttgacaggcagccatgattccaaggacgtcctcggtctcttcgtcggcggcggcggcggcgcccaccgcgggcgcgccgccggcgtggccgagcggcagcgacgcggcggcgttccaggcctcgggcagctcgggacatcagcaggtggtcatcagcaacggggtgctcctcgcggcggtcatcttcctcttcatggtcgtcgtgttcgtcttcctcctctacctctacgccaagcggtacctgggcgccgggaacccgctcgtggcgtcgccgtcctcgcggttcctcttcgtggccgcgtccccgctcccgcagcgcggcctgcccgcctccgccctgcgctccctccccgtcgcggtctacggcggcggcggcccgggcaccaagagcagcaaggaggcgctggagtgcgccgtgtgcctgtccgaggtggccgacggcgagaaggtgcggacgctgcccaagtgcgggcacgcgttccacgtggagtgcatcgacatgtggttccactcccacgacacctgcccgctctgccgcgcccccgtcggcggcgacctcgacgcgctgccgcgggaggagcccttcggcgcgtcgctcgagttccccaccaacgtcctgttctggggcacccacgacgaggtcgccaacgccggcctcgccacgcccccgcccccgccgccgcccgtcgccagcgccgtctccgcgagctcctcggcctccgggcgcaggaaggagaacctggtcatcgacatcccgacgcggcccgtggccctgaccaccacgccgcccttcaactccccgctgccggcgagccgggtgcctgggagcgccgacgagacgcggtccccggtctccgccaggctgcggtcgctgcgccggctgctgagcagaggcaagcaggccgtggtcggcacctcctacagcccgcgcggcgccggtgacgtcgagcaggggctcgcaggagccgaggccgcccgcccgcccaagacgcctccggcgtcggactgattcagatcccccccgagctccgggtcgcatttggctcgactcgccgatcaccggagcgcgcgacgtttccattcaacgaggtgcatgtgttccacttgaagacgttcgtcttctttcagaaatttcgtcgagcagtacattacaaggagcgtgtaaaataggtcactcgttgctgtcactcactaactacgtccttcagcagcctttttcatttggctaacccgtacccaggagttttgtctctataaattacagctacaaactattaattctata

SEQ ID NO: 58683 - DNA, 958 bp, Zea Mays
atttcggaaacagaaagcaaaaacgaaggaccttctggcgctgctactcaagagtgagaactgagaacaaaagttcttcagatataccatcacaggttcatcaatacgactccgaggtggtaggtagtctaggggaccaactgagtcactcagacaaaccaatggaaaactatacaaaattacggccctggcatcacacgttcttattgtctttattattgtcaaagttgcattaggggcaacgccatcacggccccgaaaactgaaaacatgaccagcaccatccagaagggcaccgccttcttctggttcttgtcacggcgcgcctccgccagtggttgtgccctattggccacggtcggggcttgctggacagcaggggatggagcaggtgcaggattctcctgaggcaccggctctgcagcagtgttctccaattgtagctgttgattgtacttctcaacatactctgggaaaagtttcctgaagtgcggacagtttttgctctcacaattgtagacaagggaagcttttgctaaacgcctcttttctgcatctgatgtcttgatgcttccagttgtcagtgcatcgtccatctgcaactagttattggtatatgtgtaccttgcaacagaccacatcggattccaagattcaggatgaacttcactcattgacaagcatattcttttgtgtggcgcaaatctgccgctcggggttgtcatgctgaacaattaaatatgttagaaacagaaacaaagaattagcattttcatctgcatctaatagaaatcctctagttccagttttcaatcttcacactataataagaagcaacatgccattaaaacgcaaacatttctcatgtattacaacatttaaggtttccgcacctgatacttggaggcttaaaaggataatccggtggaaatttgagtttcccatagtaatatccacc

SEQ ID NO: 58684 - DNA, 2755 bp, Zea Mays
gccagatgctaatttctcaaaagtatactttaggataatgactctgctactaaaagaagaacaaaaaaggagtttcagaatccagatagcataaactaaccttgactttgacatggaattgtcagaggctgaagacatcccatgcactgaatcagaactccagtttggatgttgcccttcattttttgaaccagtaagtgctgagtttaaaactccatttgggccattactggacattgatagtttgcttttattaagaatgctgccatctgatcttgccctcttcatcaatttactgacaaatatctataatctcagataactaacaagatatattgttttgatttgcacaatgcatgtgtgaataaaatctggattatttaattcttaaaacaagtagtcaggaaacaccccaacaaaaatgtgaaaagatataatataaatgattccttgctacccatatgaaagtaaagaagttaatactttcctgtttggttggtgccgtagtttgccacgcctaaccttcggcaaacagtggctgccacgaaaagtgtggcgagcaaaatcaacgccacacttatggcaaagtttggcacaaaaatgaatctatcaagtgtgggacaggatgctaaggaactgtggcacaccatagttgtgtttgtgtcagtgaaccaaatagctgtcgaagaaaccgtggcataactaactcgtgtcatggcaagttagaactggttaaaccagaacatgtggaccagatattgtttcacaattctttgtgctctcgtgcaaagactactagtcaatttttggttccactatcacttatattgtgtcagtttaatgtgatattaataggagaggcaataaatataggatcgtagtcacaccacctttagtgacaattctgttattgcctcaattcatagagaagcgtatattgttcttttattaggagcatacttaaccctgtaagttcaagcataggtatatattgctagcttaccttgtctcgtcatcaagtacatgctcgtcaccagattctggctcccaaagtgcaggttttcccacctgcggttggaagtatcctagaaatctgaaatttaaaatgcatggggaaaacaagtgacagaaacttaatccatattcatggtattttccaggtgaaacttcaaaagataagaagatcattcctatcttaatcacacatacaagtttatcgctgcttgtttgtaagcatccatataggcattactgtagtaccgttgcagagtcctaaagaactcttgagattgaatggcgaacttcaagtgccctctttttgcagagaatatctacacatgaatccacagaatgagcacaaactaattctgttgtcacttcataattgaagtaccaactgacaagaaaagcgtgaaagaggttcaagaatccgttttgtaatttttttggccttttggcaccatattatagttcagtccactgaatatcattacatgcaacagttccttttatactgtagttgtacagtggataatttaggtgcagatgccacgctgtcgccctatttagacagagcaatagcacacttttccctttaatttacaaaccacagatatcacatgtatactctacagacaagaaaatcaatgaaaataaacctctcattttgtaggtcggaaaggaaacatcattacaaatcgattccaactttttatatgacttatgaattagaaaaaagagcattttagaaacgtgtatggccctagttaaagaaaaattgatccatgacagacagatatgatgatagaatacacaaacatattgaaataatgccaaggaagtatgataaaaatgcaatttcaaaaatgtgtcaacttaattgagtagaattatacagacgaaatcataagattaattctgtacaaaagtagttgcattgcactaacatttatgataaaatattgagaaaagtgaatatcagagcaatggacacaattcgctcgcagttgatacattgtatgattaattgcaaatttgcgatactattgcggccactgtatcggttgcactagctactaaaataggcagcctcagtatcaaattattaactgagcctatatacttgttgaactttttttagtcatcaatcagcatacttgattcagcctgatcggttgcactagcacagctgtgactgctgtctgcaggctgctgctgcacacgtacaatacaagagtaatagtaggaatagtagaatgtgctagaagtaacagtgcatgaatgcagcagcagccaacggccacagcagtggtagggcagccaatcatgctgattaataatagccaattttcaaattctcatatcataaactgtggatttcaagtacaaaatagttctcaaatttaattttcataaataactccaactagctttatggttttatttcactttttggaataaatactagtctttatgccactcatcctggcctggcacaaccagttcgatttgaaatgcaaccacttaaaacagaccagatgcaaagctaatggagcaaacatggatgcagagttaatgagcaaacttggacgagttctgaaataatgtaagggcatatgcattatgtaattcaaccactccatatttcaacacacaagcatattgtggaagggataaagaacctacagtttttctgtcagatagaagaatatagcaacattcaatgagtaccttattgtgagcagcagaaccacca

SEQ ID NO: 58685 - DNA, 4012 bp, Zea Mays
gaccaaacggcccggtagcgcgcagaaaagatagctgtagacatccccggaagaaatggtcccgtgcgtgcgctcactcctttgctgtttttcttctctccgttcaccttgcgtgcgcgacatctagggcgaccgccgccgccgccgccgccctacgcccagcagcccaggtcttcgtcgcgccctttgccggctacgagcacccaccacaccagatcactgtaatccaggctgaattgtggctggtattggcgatataagcattcgttagctgtttaaattgtgtcttttgtctttgattaagcgtcattggaaaggctgtcatgagaaaactcttttgttcaaacgtttctctcctgtaatatgaatgtactgtgacaatccttcatcctatgctagaatcacatattttagcttctaagctccttacagttctttacaagtttcttattcaaccgaatacctaatgcattaattcggtgcttgtgacaagcattcatgcaaattcgtggatattaattcagaacctggtggcatattaatcttggatacttggtcaactgcaaacttgaagattcattttcatgcaatcaatggagagcctagcgcaattagaggtgttgtgtgaaaagctttataattctagagactcggctgagcgagcgcatgcagaaagcaccctcaagtgcttctcagagaacagcgagtacatttcgcagtgccaatacatattggacaatgcctcaactccatatgccctgatgctggcgagttcaagcttgctgaagcaagtttctgaccgcagtctttctttgatgctccgtctcgatatacggaattatgtcataaactatcttggcacaagggggcctaaattgcagaactttgtcattgtgtccttaattcagctggtctgtcgaattacaaaatttggatggtttgatgatgacagattcagagagactgtcaaggaagcgactgattttttaggtcttgcttcccaggatcattatttcataggcttgaagatactaaacaatctcgttacagaaatgaatcagccaaaccccgcgatgcctttgacgcttcataggaaaattgcgggttcattcaaggatcagtttcttctgcagatcttccaaatttcgttaacctcactaaaccaactgaagagtgaagctccggatgactttggacatattcctcttgaccttgccttgaagtgcttatcttttgactttgttggttctccggtggacgaaagctctgaagaatttggaacagtgcagcttcctgcatcttggaggcctcttcttcaagatccttccacactccaaatcttttttgattactacaaagtcaatgacatacgggtttcaaaagaggccttggagtgtctggttcgacttgcttctgtcaggcgcagtatttttgtggaggatcctgcaaggtcccagtttctttctcatctgatgctaggcaccaaggagatacttctaactggccaaggacttgctgatcatgacaattaccatgagttctgccgtcttttgggacgtttcaaagtgaattaccagctggcagagcttttgaatgttgagttttatggtgagtggattggtctagtagctgaatttacaactagatccttgttgtcatggcagtgggccagcaacagtgtctactaccttctaagtctttggtcaaggctggtgacatccgtgccttacttgaaaggtgaaacaccaagtcttcttgatgaaactgttcccaagatcacagaaggttttatcacttccagaattaattctgttcaggccatccttgctgacaactcactggaaaatcctttggatagtgtggaagttctccaggaccagctggagtttcttcctttcctttgcagattccagtaccaaagtagtagtctgtacatcataaacatcatggaacctcttctgcaagcttatacggaaaggtccagattacccgctcctggtgatgctgatgagctgtctgtcattgaaggccaaattgcatggatggttcacataattgcggccattgtcaaagttaggcaggtaacaggtgttagtcaagaaacacaagagttgattgacgcagaactctctgcccgtgtactacagttgataagtgtgactgatacaggagcgcacacacagagatatcaagaattaagtaagcaaaggcttgaccgagctattctcatttttgtacaaagtttcagaaggtcatatgtaggagaccaagctatgcattcttcaaagcagttgtatggaagattgtctgagcttctaggacttaatgaccatttaattctactcaatgtgattgttggcaaaattgctacaaatatgaagtgctatgctgagagtgaggatgttattgatcatactctgtccctgttccttgacttggcaactggctatatgactggaaagctgctgcttaagctggagagtgtaaaattcatcattgcaaatcattctccagagaatttcccatttcttgcagaatacaaatgttcacgtagtagaactacgttctattacatccttggctccttagtcttcatggaagatagccctgtgaaattcaggactttcatggaaccacttcaacaggttgcattaaacctggaggcaactcctgatgctgcttttcggactgatgtcgctaagcgtgcatttgttggttggatgagagatctacgtggcatagctatggcaaccaacagccgcaagacatatggcctcctatttgactggttgtatccatctcgcatgccacttctgctgagagccatctcactttgcactgatgaaccagaggtcaccacacccttgctcaagttcacgtatgaatttgttttgaacaaagctcaaagactgacatttgattcatcatcaccaaatgggatccttttattccgagaggttagcaagataatcgtggcttacgggtcacgaattctattgcttcctaatggcacagacatttatggaagtaaatacaaaggcatatggatctcactgactgttctttcaagggctttgtgtgggaattatgtcaattttggcgtatttgagctctatggtgacagagcacttgctgatgcccttgatatatctctgaagatgaccctctcagttccattatctgatatattggcattcaaaaagctgtcgaaagcgtactttgggtatatggaagttctgttcaacaaccatatcaagtttgttctcaatttggacacaaacacattcatacatattgtcagctcactcgaatctggcttaaaaggtctagatgcagggatatcatcacagtgcgcttctgccatcgacaacctggcagccttttactttaataacattacatctggtgactcacctccatcaccagcttcagtaaatctcgcacgacatattggagagtgtcccaatttgtttcctcagatactgaagactctttttgagatcatgctctttgaggatgctggtaatcagtggagtctgagtcgaccaatactgagcctgataatgaccagtgaacagatgttcagtgaactcagagcgcacatattagcatcacaggttgtgtggtgcaattgcaatgcggcactgcgcattgtagctgcttgctggtaggagatagtggtcttgttgcttgccggagcttgtactggcctacctggaggtgcagacatgcaatgcagcagagaatttcttgagcctagggccccagctgtggaggtttcatattgccattcctgtgtttacgagtaatagtcagatcgtcatgttttgtttgtttgattatgttgatttcttgtttttacgatgctctttaaaccccatgcaatctgtttgctgttgaccggcgggtggtggtggtgtaaaaacagatcacccagtcaattaggtcttttgatgtttgcacttattcgacgagacagctgtgtttggatcagcttctttggagattgtgg

SEQ ID NO: 58686 - DNA, 3276 bp, Zea Mays
cgcgcagaaaagatagctgtagacatccccggaagaaatggtcccgtgcgtgcgctcactcctttgctgtttttcttctctccgttcaccttgcgtgcgcgacatctagggcgaccgccgccgccgccgccgccctacgcccagcagcccaggtcttcgtcgcgccctttgccggctacgagcacccaccacaccagatcactgtaatccaggctgaattgtggctgcattcatgcaaattcgtggatattaattcagaacctggtggcatattaatcttggatacttggtcaactgcaaacttgaagattcattttcatgcaatcaatggagagcctagcgcaattagaggtgttgtgtgaaaagctttataattctagagactcggctgagcgagcgcatgcagaaagcaccctcaagtgcttctcagagaacagcgagtacatttcgcagtgccaatacatattggacaatgcctcaactccatatgccctgatgctggcgagttcaagcttgctgaagcaagtttctgaccgcagtctttctttgatgctccgtctcgatatacggaattatgtcataaactatcttggcacaagggggcctaaattgcagaactttgtcattgtgtccttaattcagctggtctgtcgaattacaaaatttggatggtttgatgatgacagattcagagagactgtcaaggaagcgactgattttttaggtcttgcttcccaggatcattatttcataggcttgaagatactaaacaatctcgttacagaaatgaatcagccaaaccccgcgatgcctttgacgcttcataggaaaattgcgggttcattcaaggatcagtttcttctgcagatcttccaaatttcgttaacctcactaaaccaactgaagagtgaagctccggatgactttggacatattcctcttgaccttgccttgaagtgcttatcttttgactttgttggttctccggtggacgaaagctctgaagaatttggaacagtgcagcttcctgcatcttggaggcctcttcttcaagatccttccacactccaaatcttttttgattactacaaagtcaatgacatacgggtttcaaaagaggccttggagtgtctggttcgacttgcttctgtcaggcgcagtatttttgtggaggatcctgcaaggtcccagtttctttctcatctgatgctaggcaccaaggagatacttctaactggccaaggacttgctgatcatgacaattaccatgagttctgccgtcttttgggacgtttcaaagtgaattaccagctggcagagcttttgaatgttgagttttatggtgagtggattggtctagtagctgaatttacaactagatccttgttgtcatggcagtgggccagcaacagtgtctactaccttctaagtctttggtcaaggctggtgacatccgtgccttacttgaaaggtgaaacaccaagtcttcttgatgaaactgttcccaagatcacagaaggttttatcacttccagaattaattctgttcaggccatccttgctgacaactcactggaaaatcctttggatagtgtggaagttctccaggaccagctggagtttcttcctttcctttgcagattccagtaccaaagtagtagtctgtacatcataaacatcatggaacctcttctgcaagcttatacggtatgtttgtgttgtttcacacaatcctttttttaatataattatattaaaaaataatctactacaggaaaggtccagattacccgctcctggtgatgctgatgagctgtctgtcattgaaggccaaattgcatggatggttcacataattgcggccattgtcaaagttaggcaggtaacaggtgttaggtgagcaatgttttttttatatttgttgtttttgttcttttctatgcttttcatggatgagatttttcatgttcttctgcagtcaagaaacacaagagttgattgacgcagaactctctgcccgtgtactacagttgataagtgtgactgatacaggagcgcacacacagagatatcaagaattaagtaagcaaaggcttgaccgagctattctcatttttgtacaaagtttcagaaggtcatatgtaggagaccaagctatgcattcttcaaagttgtatggaagattgtctgagcttctaggacttaatgaccatttaattctactcaatgtgattgttggcaaaattgctacaaatatgaagtgctatgctgagagtgaggatgttattgatcatactctgtccctgttccttgacttggcaactgggtaaagttgtgactatgtttttccagttttttttctcatttatgcgtgatgactgttcatattttttttcttgccaagtcagctatatgactggaaagctgctgcttaagctggagagtgtaaaattcatcattgcaaatcattctgtaaagtcttccgcttcccactaacttttatttattttccatcgctgcactcagttttagagataactcttttttattattcttccagccagagaatttcccatttcttgcagaatacaaatgttcacgtagtagaactacgttctattacatccttggctccttagtcttcatggaagatagccctgtgaaattcaggactttcatggaaccacttcaacaggttgcattaaacctggaggcaactcctgatgctgcttttcggactgatgtcgctaagcgtgcatttgttggttggatgagagatctacgtggcatagctatggcaaccaacagccgcaagacatatggcctcctatttgactggttgtatccatctcgcatgccacttctgctgagagccatctcactttgcactgatgaaccagaggtcaccacacccttgctcaagttcacgtatgaatttgttttgaacaaagctcaaagactgacatttgattcatcatcaccaaatgggatccttttattccgagaggttagcaagataatcgtggcttacgggtcacgaattctattgcttcctaatggcacagacatttatggaagtaaatacaaaggcatatggatctcactgactgttctttcaagggctttgtgtgggaattatgtcaattttggcgtatttgagctctatggtgacagagcacttgctgatgcccttgatatatctctgaagatgaccctctcagttccattatctgatatattggcattcaaaaagctgttgaccttagtgagaatgag

SEQ ID NO: 58687 - DNA, 2374 bp, Zea Mays
gaaaagatagctgtagacatccccggaagaaatggtcccgtgcgtgcgctcactcctttgctgtttttcttctctccgttcaccttgcgtgcgcgacatctagggcgaccgccgccgccgccgccgccctacgcccagcagcccaggtcttcgtcgcgccctttgccggctacgagcacccaccacaccagatcactgtaatccaggctgaattgtggctggtattggcgatataagcattcgttagctgtttaaattgtgtcttttgtctttgattaagcgtcattggaaaggctgtcatgagaaaactcttttgttcaaacgtttctctcctgtaatatgaatgtactgtgacaatccttcatcctatgctagaatcacatattttagcttctaagctccttacagttctttacaagtttcttattcaaccgaatacctaatgcattaattcggtgcttgtgacaagcattcatgcaaattcgtggatattaattcagaacctggtggcatattaatcttggatacttggtcaactgcaaacttgaagattcattttcatgcaatcaatggagagcctagcgcaattagaggtgttgtgtgaaaagctttataattctagagactcggctgagcgagcgcatgcagaaagcaccctcaagtgcttctcagagaacagcgagtacatttcgcagtgccaatacatattggacaatgcctcaactccatatgccctgatgctggcgagttcaagcttgctgaagcaagtttctgaccgcagtctttctttgatgctccgtctcgatatacggaattatgtcataaactatcttggcacaagggggcctaaattgcagaactttgtcattgtgtccttaattcagctggtctgtcgaattacaaaatttggatggtttgatgatgacagattcagagagactgtcaaggaagcgactgattttttaggtcttgcttcccaggatcattatttcataggcttgaagatactaaacaatctcgttacagaaatgaatcagccaaaccccgcgatgcctttgacgcttcataggaaaattgcgggttcattcaaggatcagtttcttctgcagatcttccaaatttcgttaacctcactaaaccaactgaagagtgaagctccggatgactttggacatattcctcttgaccttgccttgaagtgcttatcttttgactttgttggttctccggtggacgaaagctctgaagaatttggaacagtgcagcttcctgcatcttggaggcctcttcttcaagatccttccacactccaaatcttttttgattactacaaagtcaatgacatacgggtttcaaaagaggccttggagtgtctggttcgacttgcttctgtcaggcgcagtatttttgtggaggatcctgcaaggtcccagtttctttctcatctgatgctaggcaccaaggagatacttctaactggccaaggacttgctgatcatgacaattaccatgagttctgccgtcttttgggacgtttcaaagtgaattaccagctggcagagcttttgaatgttgagttttatggtgagtggattggtctagtagctgaatttacaactagatccttgttgtcatggcagtgggccagcaacagtgtctactaccttctaagtctttggtcaaggctggtgacatccgtgccttacttgaaaggtgaaacaccaagtcttcttgatgaaactgttcccaagatcacagaaggttttatcacttccagaattaattctgttcaggccatccttgctgacaactcactggaaaatcctttggatagtgtggaagttctccaggaccagctggagtttcttcctttcctttgcagattccagtaccaaagtagtagtctgtacatcataaacatcatggaacctcttctgcaagcttatacggaaaggtccagattacccgctcctggtgatgctgatgagctgtctgtcattgaaggccaaattgcatggatggttcacataattgcggccattgtcaaagttaggcaggtaacaggtgttagtcaagaaacacaagagttgattgacgcagaactctctgcccgtgtactacagttgataagtgtgactgatacaggagcgcacacacagatggaaccaagcagctccaaaagtggaatattcctcgaatatactgcatctctagcctccccaaaaacgatcgtacctgggcgctcgcaagtccagtgctcctttccatgttgctgtcagtagcctcctcttctgttctgcttcactctggaaccaaacacagaatggagctgctctgttctgcttcactctggaaccaaacaaaaaaaacaaag

SEQ ID NO: 58688 - DNA, 4238 bp, Zea Mays
gaaaagatagctgtagacatccccggaagaaatggtcccgtgcgtgcgctcactcctttgctgtttttcttctctccgttcaccttgcgtgcgcgacatctagggcgaccgccgccgccgccgccgccctacgcccagcagcccaggtcttcgtcgcgccctttgccggctacgagcacccaccacaccagatcactgtaatccaggctgaattgtggctggtattggcgatataagcattcgttagctgtttaaattgtgtcttttgtctttgattaagcgtcattggaaaggctgtcatgagaaaactcttttgttcaaacgtttctctcctgtaatatgaatgtactgtgacaatccttcatcctatgctagaatcacatattttagcttctaagctccttacagttctttacaagtttcttattcaaccgaatacctaatgcattaattcggtgcttgtgacaagcattcatgcaaattcgtggatattaattcagaacctggtggcatattaatcttggatacttggtcaactgcaaacttgaagattcattttcatgcaatcaatggagagcctagcgcaattagaggtgttgtgtgaaaagctttataattctagagactcggctgagcgagcgcatgcagaaagcaccctcaagtgcttctcagagaacagcgagtacatttcgcagtgccaatacatattggacaatgcctcaactccatatgccctgatgctggcgagttcaagcttgctgaagcaagtttctgaccgcagtctttctttgatgctccgtctcgatatacggaattatgtcataaactatcttggcacaagggggcctaaattgcagaactttgtcattgtgtccttaattcagctggtctgtcgaattacaaaatttggatggtttgatgatgacagattcagagagactgtcaaggaagcgactgattttttaggtcttgcttcccaggatcattatttcataggcttgaagatactaaacaatctcgttacagaaatgaatcagccaaaccccgcgatgcctttgacgcttcataggaaaattgcgggttcattcaaggatcagtttcttctgcagatcttccaaatttcgttaacctcactaaaccaactgaagagtgaagctccggatgactttggacatattcctcttgaccttgccttgaagtgcttatcttttgactttgttggttctccggtggacgaaagctctgaagaatttggaacagtgcagcttcctgcatcttggaggcctcttcttcaagatccttccacactccaaatcttttttgattactacaaagtcaatgacatacgggtttcaaaagaggccttggagtgtctggttcgacttgcttctgtcaggcgcagtatttttgtggaggatcctgcaaggtcccagtttctttctcatctgatgctaggcaccaaggagatacttctaactggccaaggacttgctgatcatgacaattaccatgagttctgccgtcttttgggacgtttcaaagtgaattaccagctggcagagcttttgaatgttgagttttatggtgagtggattggtctagtagctgaatttacaactagatccttgttgtcatggcagtgggccagcaacagtgtctactaccttctaagtctttggtcaaggctggtgacatccgtgccttacttgaaaggtgaaacaccaagtcttcttgatgaaactgttcccaagatcacagaaggttttatcacttccagaattaattctgttcaggccatccttgctgacaactcactggaaaatcctttggatagtgtggaagttctccaggaccagctggagtttcttcctttcctttgcagattccagtaccaaagtagtagtctgtacatcataaacatcatggaacctcttctgcaagcttatacggaaaggtccagattacccgctcctggtgatgctgatgagctgtctgtcattgaaggccaaattgcatggatggttcacataattgcggccattgtcaaagttaggcaggtaacaggtgttagtcaagaaacacaagagttgattgacgcagaactctctgcccgtgtactacagttgataagtgtgactgatacaggagcgcacacacagagatatcaagaattaagtaagcaaaggcttgaccgagctattctcatttttgtacaaagtttcagaaggtcatatgtaggagaccaagctatgcattcttcaaagcagttgtatggaagattgtctgagcttctaggacttaatgaccatttaattctactcaatgtgattgttggcaaaattgctacaaatatgaagtgctatgctgagagtgaggatgttattgatcatactctgtccctgttccttgacttggcaactggctatatgactggaaagctgctgcttaagctggagagtgtaaaattcatcattgcaaatcattctccagagaatttcccatttcttgcagaatacaaatgttcacgtagtagaactacgttctattacatccttggctccttagtcttcatggaagatagccctgtgaaattcaggactttcatggaaccacttcaacaggttgcattaaacctggaggcaactcctgatgctgcttttcggactgatgtcgctaagcgtgcatttgttggttggatgagagatctacgtggcatagctatggcaaccaacagccgcaagacatatggcctcctatttgactggttgtatccatctcgcatgccacttctgctgagagccatctcactttgcactgatgaaccagaggtcaccacacccttgctcaagttcacgtatgaatttgttttgaacaaagctcaaagactgacatttgattcatcatcaccaaatgggatccttttattccgagaggttagcaagataatcgtggcttacgggtcacgaattctattgcttcctaatggcacagacatttatggaagtaaatacaaaggcatatggatctcactgactgttctttcaagggctttgtgtgggaattatgtcaattttggcgtatttgagctctatggtgacagagcacttgctgatgcccttgatatatctctgaagatgaccctctcagttccattatctgatatattggcattcaaaaagctgtcgaaagcgtactttgggtatatggaagttctgttcaacaaccatatcaagtttgttctcaatttggacacaaacacattcatacatattgtcagctcactcgaatctggcttaaaaggtctagatgcagggatatcatcacagtgcgcttctgccatcgacaacctggcagccttttactttaataacattacatctggtgactcacctccatcaccagcttcagtaaatctcgcacgacatattggagagtgtcccaatttgtttcctcagatactgaagactctttttgagatcatgctctttgaggatgctggtaatcagtggagtctgagtcgaccaatactgagcctgataatgaccagtgaacagatgttcagtgaactcagagcgcacatattagcatcacagcaacaacgcctttcacagtgcttcgataagctgatgacggatgtcaataggaacttggaacctaagaatcgtgacagattcactcaaaacctgacagcatttagacgtgattttcgactgaagtaacagctccttggtaccagctatcagtttgaaggtgttcctgcatgatgtaaatactccagttaccttcttttttggaaccacctttctgtgggttgagaaaagaagagcttgtccttaggtttgccttggattggctgaagatggtcttgttgatgcatgtggtagtgaaagcagctgtaaatttcatagcatgtcattttaatcagaatggtgaaaggtggagattgtttcttttgttttttattttatattgcatccctttagcatgtacagcaaaattggtgctagaacaggggtggctgtttgcccaatttgttaagtgggaggcagtcatctcagatataattcatttgttaagaagtcaacgaggtaaaggatgtaaatgattccgttggctttgctgaatatgaaagttgaacagtaagaaggatggctcagttgcatccgctgtgcagattgaactgttaatgataacaatttcttttttttttgtctctgtttggtattgatactctgcag

SEQ ID NO: 58689 - DNA, 3971 bp, Zea Mays
gaaaagatagctgtagacatccccggaagaaatggtcccgtgcgtgcgctcactcctttgctgtttttcttctctccgttcaccttgcgtgcgcgacatctagggcgaccgccgccgccgccgccgccctacgcccagcagcccaggtcttcgtcgcgccctttgccggctacgagcacccaccacaccagatcactgtaatccaggctgaattgtggctgaacctggtggcatattaatcttggatacttggtcaactgcaaacttgaagattcattttcatgcaatcaatggagagcctagcgcaattagaggtgttgtgtgaaaagctttataattctagagactcggctgagcgagcgcatgcagaaagcaccctcaagtgcttctcagagaacagcgagtacatttcgcagtgccaatacatattggacaatgcctcaactccatatgccctgatgctggcgagttcaagcttgctgaagcaagtttctgaccgcagtctttctttgatgctccgtctcgatatacggaattatgtcataaactatcttggcacaagggggcctaaattgcagaactttgtcattgtgtccttaattcagctggtctgtcgaattacaaaatttggatggtttgatgatgacagattcagagagactgtcaaggaagcgactgattttttaggtcttgcttcccaggatcattatttcataggcttgaagatactaaacaatctcgttacagaaatgaatcagccaaaccccgcgatgcctttgacgcttcataggaaaattgcgggttcattcaaggatcagtttcttctgcagatcttccaaatttcgttaacctcactaaaccaactgaagagtgaagctccggatgactttggacatattcctcttgaccttgccttgaagtgcttatcttttgactttgttggttctccggtggacgaaagctctgaagaatttggaacagtgcagcttcctgcatcttggaggcctcttcttcaagatccttccacactccaaatcttttttgattactacaaagtcaatgacatacgggtttcaaaagaggccttggagtgtctggttcgacttgcttctgtcaggcgcagtatttttgtggaggatcctgcaaggtcccagtttctttctcatctgatgctaggcaccaaggagatacttctaactggccaaggacttgctgatcatgacaattaccatgagttctgccgtcttttgggacgtttcaaagtgaattaccagctggcagagcttttgaatgttgagttttatggtgagtggattggtctagtagctgaatttacaactagatccttgttgtcatggcagtgggccagcaacagtgtctactaccttctaagtctttggtcaaggctggtgacatccgtgccttacttgaaaggtgaaacaccaagtcttcttgatgaaactgttcccaagatcacagaaggttttatcacttccagaattaattctgttcaggccatccttgctgacaactcactggaaaatcctttggatagtgtggaagttctccaggaccagctggagtttcttcctttcctttgcagattccagtaccaaagtagtagtctgtacatcataaacatcatggaacctcttctgcaagcttatacggaaaggtccagattacccgctcctggtgatgctgatgagctgtctgtcattgaaggccaaattgcatggatggttcacataattgcggccattgtcaaagttaggcaggtaacaggtgttagtcaagaaacacaagagttgattgacgcagaactctctgcccgtgtactacagttgataagtgtgactgatacaggagcgcacacacagagatatcaagaattaagtaagcaaaggcttgaccgagctattctcatttttgtacaaagtttcagaaggtcatatgtaggagaccaagctatgcattcttcaaagcagttgtatggaagattgtctgagcttctaggacttaatgaccatttaattctactcaatgtgattgttggcaaaattgctacaaatatgaagtgctatgctgagagtgaggatgttattgatcatactctgtccctgttccttgacttggcaactggctatatgactggaaagctgctgcttaagctggagagtgtaaaattcatcattgcaaatcattctccagagaatttcccatttcttgcagaatacaaatgttcacgtagtagaactacgttctattacatccttggctccttagtcttcatggaagatagccctgtgaaattcaggactttcatggaaccacttcaacaggttgcattaaacctggaggcaactcctgatgctgcttttcggactgatgtcgctaagcgtgcatttgttggttggatgagagatctacgtggcatagctatggcaaccaacagccgcaagacatatggcctcctatttgactggttgtatccatctcgcatgccacttctgctgagagccatctcactttgcactgatgaaccagaggtcaccacacccttgctcaagttcacgtatgaatttgttttgaacaaagctcaaagactgacatttgattcatcatcaccaaatgggatccttttattccgagaggttagcaagataatcgtggcttacgggtcacgaattctattgcttcctaatggcacagacatttatggaagtaaatacaaaggcatatggatctcactgactgttctttcaagggctttgtgtgggaattatgtcaattttggcgtatttgagctctatggtgacagagcacttgctgatgcccttgatatatctctgaagatgaccctctcagttccattatctgatatattggcattcaaaaagctgtcgaaagcgtactttgggtatatggaagttctgttcaacaaccatatcaagtttgttctcaatttggacacaaacacattcatacatattgtcagctcactcgaatctggcttaaaaggtctagatgcagggatatcatcacagtgcgcttctgccatcgacaacctggcagccttttactttaataacattacatctggtgactcacctccatcaccagcttcagtaaatctcgcacgacatattggagagtgtcccaatttgtttcctcagatactgaagactctttttgagatcatgctctttgaggatgctggtaatcagtggagtctgagtcgaccaatactgagcctgataatgaccagtgaacagatgttcagtgaactcagagcgcacatattagcatcacagactgtggaccagcaacaacgcctttcacagtgcttcgataagctgatgacggatgtcaataggaacttggaacctaagaatcgtgacagattcactcaaaacctgacagcatttagacgtgattttcgactgaagtaacagctccttggtaccagctatcagtttgaaggtgttcctgcatgatgtaaatactccagttaccttcttttttggaaccacctttctgtgggttgagaaaagaagagcttgtccttaggtttgccttggattggctgaagatggtcttgttgatgcatgtggtagtgaaagcagctgtaaatttcatagcatgtcattttaatcagaatggtgaaaggtggagattgtttcttttgttttttattttatattgcatccctttagcatgtacagcaaaattggtgctagaacaggggtggctgtttgcccaatttgttaagtgggaggcagtcatctcagatataattcatttgttaagaagtcaacgaggtaaaggatgtaaatgattccgttggctttgctgaatatgaaagttgaacagtaagaaggatggctcagttgcatccgctgtgcagattgaactgttaatgataacaatttcttttttttttgtctctgtttggtattgatactctgcag

SEQ ID NO: 58690 - DNA, 3785 bp, Zea Mays
gaaaagatagctgtagacatccccggaagaaatggtcccgtgcgtgcgctcactcctttgctgtttttcttctctccgttcaccttgcgtgcgcgacatctagggcgaccgccgccgccgccgccgccctacgcccagcagcccaggtcttcgtcgcgccctttgccggctacgagcacccaccacaccagatcactgtaatccaggctgaattgtggctggtattggcgatataagcattcgttagctgtttaaattgtgtcttttgtctttgattaagcgtcattggaaaggctgtcatgagaaaactcttttgttcaaacgtttctctcctgtaatatgaatggaattatgtcataaactatcttggcacaagggggcctaaattgcagaactttgtcattgtgtccttaattcagctggtctgtcgaattacaaaatttggatggtttgatgatgacagattcagagagactgtcaaggaagcgactgattttttaggtcttgcttcccaggatcattatttcataggcttgaagatactaaacaatctcgttacagaaatgaatcagccaaaccccgcgatgcctttgacgcttcataggaaaattgcgggttcattcaaggatcagtttcttctgcagatcttccaaatttcgttaacctcactaaaccaactgaagagtgaagctccggatgactttggacatattcctcttgaccttgccttgaagtgcttatcttttgactttgttggttctccggtggacgaaagctctgaagaatttggaacagtgcagcttcctgcatcttggaggcctcttcttcaagatccttccacactccaaatcttttttgattactacaaagtcaatgacatacgggtttcaaaagaggccttggagtgtctggttcgacttgcttctgtcaggcgcagtatttttgtggaggatcctgcaaggtcccagtttctttctcatctgatgctaggcaccaaggagatacttctaactggccaaggacttgctgatcatgacaattaccatgagttctgccgtcttttgggacgtttcaaagtgaattaccagctggcagagcttttgaatgttgagttttatggtgagtggattggtctagtagctgaatttacaactagatccttgttgtcatggcagtgggccagcaacagtgtctactaccttctaagtctttggtcaaggctggtgacatccgtgccttacttgaaaggtgaaacaccaagtcttcttgatgaaactgttcccaagatcacagaaggttttatcacttccagaattaattctgttcaggccatccttgctgacaactcactggaaaatcctttggatagtgtggaagttctccaggaccagctggagtttcttcctttcctttgcagattccagtaccaaagtagtagtctgtacatcataaacatcatggaacctcttctgcaagcttatacggaaaggtccagattacccgctcctggtgatgctgatgagctgtctgtcattgaaggccaaattgcatggatggttcacataattgcggccattgtcaaagttaggcaggtaacaggtgttagtcaagaaacacaagagttgattgacgcagaactctctgcccgtgtactacagttgataagtgtgactgatacaggagcgcacacacagagatatcaagaattaagtaagcaaaggcttgaccgagctattctcatttttgtacaaagtttcagaaggtcatatgtaggagaccaagctatgcattcttcaaagcagttgtatggaagattgtctgagcttctaggacttaatgaccatttaattctactcaatgtgattgttggcaaaattgctacaaatatgaagtgctatgctgagagtgaggatgttattgatcatactctgtccctgttccttgacttggcaactggctatatgactggaaagctgctgcttaagctggagagtgtaaaattcatcattgcaaatcattctccagagaatttcccatttcttgcagaatacaaatgttcacgtagtagaactacgttctattacatccttggctccttagtcttcatggaagatagccctgtgaaattcaggactttcatggaaccacttcaacaggttgcattaaacctggaggcaactcctgatgctgcttttcggactgatgtcgctaagcgtgcatttgttggttggatgagagatctacgtggcatagctatggcaaccaacagccgcaagacatatggcctcctatttgactggttgtatccatctcgcatgccacttctgctgagagccatctcactttgcactgatgaaccagaggtcaccacacccttgctcaagttcacgtatgaatttgttttgaacaaagctcaaagactgacatttgattcatcatcaccaaatgggatccttttattccgagaggttagcaagataatcgtggcttacgggtcacgaattctattgcttcctaatggcacagacatttatggaagtaaatacaaaggcatatggatctcactgactgttctttcaagggctttgtgtgggaattatgtcaattttggcgtatttgagctctatggtgacagagcacttgctgatgcccttgatatatctctgaagatgaccctctcagttccattatctgatatattggcattcaaaaagctgtcgaaagcgtactttgggtatatggaagttctgttcaacaaccatatcaagtttgttctcaatttggacacaaacacattcatacatattgtcagctcactcgaatctggcttaaaaggtctagatgcagggatatcatcacagtgcgcttctgccatcgacaacctggcagccttttactttaataacattacatctggtgactcacctccatcaccagcttcagtaaatctcgcacgacatattggagagtgtcccaatttgtttcctcagatactgaagactctttttgagatcatgctctttgaggatgctggtaatcagtggagtctgagtcgaccaatactgagcctgataatgaccagtgaacagatgttcagtgaactcagagcgcacatattagcatcacagactgtggaccagcaacaacgcctttcacagtgcttcgataagctgatgacggatgtcaataggaacttggaacctaagaatcgtgacagattcactcaaaacctgacagcatttagacgtgattttcgactgaagtaacagctccttggtaccagctatcagtttgaaggtgttcctgcatgatgtaaatactccagttaccttcttttttggaaccacctttctgtgggttgagaaaagaagagcttgtccttaggtttgccttggattggctgaagatggtcttgttgatgcatgtggtagtgaaagcagctgtaaatttcatagcatgtcattttaatcagaatggtgaaaggtggagattgtttcttttgttttttattttatattgcatccctttagcatgtacagcaaaattggtgctagaacaggggtggctgtttgcccaatttgttaagtgggaggcagtcatctcagatataattcatttgttaagaagtcaacgaggtaaaggatgtaaatgattccgttggctttgctgaatatgaaagttgaacagtaagaaggatggctcagttgcatccgctgtgcagattgaactgttaatgataacaatttcttttttttttgtctctgtttggtattgatactctgcag

SEQ ID NO: 58691 - DNA, 4236 bp, Zea Mays
gaaaagatagctgtagacatccccggaagaaatggtcccgtgcgtgcgctcactcctttgctgtttttcttctctccgttcaccttgcgtgcgcgacatctagggcgaccgccgccgccgccgccgccctacgcccagcagcccaggtcttcgtcgcgccctttgccggctacgagcacccaccacaccagatcactgtaatccaggctgaattgtggctggtattggcgatataagcattcgttagctgtttaaattgtgtcttttgtctttgattaagcgtcattggaaaggctgtcatgagaaaactcttttgttcaaacgtttctctcctgtaatatgaatgtactgtgacaatccttcatcctatgctagaatcacatattttagcttctaagctccttacagttctttacaagtttcttattcaaccgaatacctaatgcattaattcggtgcttgtgacaagcattcatgcaaattcgtggatattaattcagaacctggtggcatattaatcttggatacttggtcaactgcaaacttgaagattcattttcatgcaatcaatggagagcctagcgcaattagaggtgttgtgtgaaaagctttataattctagagactcggctgagcgagcgcatgcagaaagcaccctcaagtgcttctcagagaacagcgagtacatttcgcagtgccaatacatattggacaatgcctcaactccatatgccctgatgctggcgagttcaagcttgctgaagcaagtttctgaccgcagtctttctttgatgctccgtctcgatatacggaattatgtcataaactatcttggcacaagggggcctaaattgcagaactttgtcattgtgtccttaattcagctggtctgtcgaattacaaaatttggatggtttgatgatgacagattcagagagactgtcaaggaagcgactgattttttaggtcttgcttcccaggatcattatttcataggcttgaagatactaaacaatctcgttacagaaatgaatcagccaaaccccgcgatgcctttgacgcttcataggaaaattgcgggttcattcaaggatcagtttcttctgcagatcttccaaatttcgttaacctcactaaaccaactgaagagtgaagctccggatgactttggacatattcctcttgaccttgccttgaagtgcttatcttttgactttgttggttctccggtggacgaaagctctgaagaatttggaacagtgcagcttcctgcatcttggaggcctcttcttcaagatccttccacactccaaatcttttttgattactacaaagtcaatgacatacgggtttcaaaagaggccttggagtgtctggttcgacttgcttctgtcaggcgcagtatttttgtggaggatcctgcaaggtcccagtttctttctcatctgatgctaggcaccaaggagatacttctaactggccaaggacttgctgatcatgacaattaccatgagttctgccgtcttttgggacgtttcaaagtgaattaccagctggcagagcttttgaatgttgagttttatggtgagtggattggtctagtagctgaatttacaactagatccttgttgtcatggcagtgggccagcaacagtgtctactaccttctaagtctttggtcaaggctggtgacatccgtgccttacttgaaaggtgaaacaccaagtcttcttgatgaaactgttcccaagatcacagaaggttttatcacttccagaattaattctgttcaggccatccttgctgacaactcactggaaaatcctttggatagtgtggaagttctccaggaccagctggagtttcttcctttcctttgcagattccagtaccaaagtagtagtctgtacatcataaacatcatggaacctcttctgcaagcttatacggaaaggtccagattacccgctcctggtgatgctgatgagctgtctgtcattgaaggccaaattgcatggatggttcacataattgcggccattgtcaaagttaggcagtcaagaaacacaagagttgattgacgcagaactctctgcccgtgtactacagttgataagtgtgactgatacaggagcgcacacacagagatatcaagaattaagtaagcaaaggcttgaccgagctattctcatttttgtacaaagtttcagaaggtcatatgtaggagaccaagctatgcattcttcaaagcagttgtatggaagattgtctgagcttctaggacttaatgaccatttaattctactcaatgtgattgttggcaaaattgctacaaatatgaagtgctatgctgagagtgaggatgttattgatcatactctgtccctgttccttgacttggcaactggctatatgactggaaagctgctgcttaagctggagagtgtaaaattcatcattgcaaatcattctccagagaatttcccatttcttgcagaatacaaatgttcacgtagtagaactacgttctattacatccttggctccttagtcttcatggaagatagccctgtgaaattcaggactttcatggaaccacttcaacaggttgcattaaacctggaggcaactcctgatgctgcttttcggactgatgtcgctaagcgtgcatttgttggttggatgagagatctacgtggcatagctatggcaaccaacagccgcaagacatatggcctcctatttgactggttgtatccatctcgcatgccacttctgctgagagccatctcactttgcactgatgaaccagaggtcaccacacccttgctcaagttcacgtatgaatttgttttgaacaaagctcaaagactgacatttgattcatcatcaccaaatgggatccttttattccgagaggttagcaagataatcgtggcttacgggtcacgaattctattgcttcctaatggcacagacatttatggaagtaaatacaaaggcatatggatctcactgactgttctttcaagggctttgtgtgggaattatgtcaattttggcgtatttgagctctatggtgacagagcacttgctgatgcccttgatatatctctgaagatgaccctctcagttccattatctgatatattggcattcaaaaagctgtcgaaagcgtactttgggtatatggaagttctgttcaacaaccatatcaagtttgttctcaatttggacacaaacacattcatacatattgtcagctcactcgaatctggcttaaaaggtctagatgcagggatatcatcacagtgcgcttctgccatcgacaacctggcagccttttactttaataacattacatctggtgactcacctccatcaccagcttcagtaaatctcgcacgacatattggagagtgtcccaatttgtttcctcagatactgaagactctttttgagatcatgctctttgaggatgctggtaatcagtggagtctgagtcgaccaatactgagcctgataatgaccagtgaacagatgttcagtgaactcagagcgcacatattagcatcacagactgtggaccagcaacaacgcctttcacagtgcttcgataagctgatgacggatgtcaataggaacttggaacctaagaatcgtgacagattcactcaaaacctgacagcatttagacgtgattttcgactgaagtaacagctccttggtaccagctatcagtttgaaggtgttcctgcatgatgtaaatactccagttaccttcttttttggaaccacctttctgtgggttgagaaaagaagagcttgtccttaggtttgccttggattggctgaagatggtcttgttgatgcatgtggtagtgaaagcagctgtaaatttcatagcatgtcattttaatcagaatggtgaaaggtggagattgtttcttttgttttttattttatattgcatccctttagcatgtacagcaaaattggtgctagaacaggggtggctgtttgcccaatttgttaagtgggaggcagtcatctcagatataattcatttgttaagaagtcaacgaggtaaaggatgtaaatgattccgttggctttgctgaatatgaaagttgaacagtaagaaggatggctcagttgcatccgctgtgcagattgaactgttaatgataacaatttcttttttttttgtctctgtttggtattgatactctgcag

SEQ ID NO: 58692 - DNA, 3968 bp, Zea Mays
gaaaagatagctgtagacatccccggaagaaatggtcccgtgcgtgcgctcactcctttgctgtttttcttctctccgttcaccttgcgtgcgcgacatctagggcgaccgccgccgccgccgccgccctacgcccagcagcccaggtcttcgtcgcgccctttgccggctacgagcacccaccacaccagatcactgtaatccaggctgaattgtggctgaacctggtggcatattaatcttggatacttggtcaactgcaaacttgaagattcattttcatgcaatcaatggagagcctagcgcaattagaggtgttgtgtgaaaagctttataattctagagactcggctgagcgagcgcatgcagaaagcaccctcaagtgcttctcagagaacagcgagtacatttcgcagtgccaatacatattggacaatgcctcaactccatatgccctgatgctggcgagttcaagcttgctgaagcaagtttctgaccgcagtctttctttgatgctccgtctcgatatacggaattatgtcataaactatcttggcacaagggggcctaaattgcagaactttgtcattgtgtccttaattcagctggtctgtcgaattacaaaatttggatggtttgatgatgacagattcagagagactgtcaaggaagcgactgattttttaggtcttgcttcccaggatcattatttcataggcttgaagatactaaacaatctcgttacagaaatgaatcagccaaaccccgcgatgcctttgacgcttcataggaaaattgcgggttcattcaaggatcagtttcttctgcagatcttccaaatttcgttaacctcactaaaccaactgaagagtgaagctccggatgactttggacatattcctcttgaccttgccttgaagtgcttatcttttgactttgttggttctccggtggacgaaagctctgaagaatttggaacagtgcagcttcctgcatcttggaggcctcttcttcaagatccttccacactccaaatcttttttgattactacaaagtcaatgacatacgggtttcaaaagaggccttggagtgtctggttcgacttgcttctgtcaggcgcagtatttttgtggaggatcctgcaaggtcccagtttctttctcatctgatgctaggcaccaaggagatacttctaactggccaaggacttgctgatcatgacaattaccatgagttctgccgtcttttgggacgtttcaaagtgaattaccagctggcagagcttttgaatgttgagttttatggtgagtggattggtctagtagctgaatttacaactagatccttgttgtcatggcagtgggccagcaacagtgtctactaccttctaagtctttggtcaaggctggtgacatccgtgccttacttgaaaggtgaaacaccaagtcttcttgatgaaactgttcccaagatcacagaaggttttatcacttccagaattaattctgttcaggccatccttgctgacaactcactggaaaatcctttggatagtgtggaagttctccaggaccagctggagtttcttcctttcctttgcagattccagtaccaaagtagtagtctgtacatcataaacatcatggaacctcttctgcaagcttatacggaaaggtccagattacccgctcctggtgatgctgatgagctgtctgtcattgaaggccaaattgcatggatggttcacataattgcggccattgtcaaagttaggcaggtaacaggtgttagtcaagaaacacaagagttgattgacgcagaactctctgcccgtgtactacagttgataagtgtgactgatacaggagcgcacacacagagatatcaagaattaagtaagcaaaggcttgaccgagctattctcatttttgtacaaagtttcagaaggtcatatgtaggagaccaagctatgcattcttcaaagttgtatggaagattgtctgagcttctaggacttaatgaccatttaattctactcaatgtgattgttggcaaaattgctacaaatatgaagtgctatgctgagagtgaggatgttattgatcatactctgtccctgttccttgacttggcaactggctatatgactggaaagctgctgcttaagctggagagtgtaaaattcatcattgcaaatcattctccagagaatttcccatttcttgcagaatacaaatgttcacgtagtagaactacgttctattacatccttggctccttagtcttcatggaagatagccctgtgaaattcaggactttcatggaaccacttcaacaggttgcattaaacctggaggcaactcctgatgctgcttttcggactgatgtcgctaagcgtgcatttgttggttggatgagagatctacgtggcatagctatggcaaccaacagccgcaagacatatggcctcctatttgactggttgtatccatctcgcatgccacttctgctgagagccatctcactttgcactgatgaaccagaggtcaccacacccttgctcaagttcacgtatgaatttgttttgaacaaagctcaaagactgacatttgattcatcatcaccaaatgggatccttttattccgagaggttagcaagataatcgtggcttacgggtcacgaattctattgcttcctaatggcacagacatttatggaagtaaatacaaaggcatatggatctcactgactgttctttcaagggctttgtgtgggaattatgtcaattttggcgtatttgagctctatggtgacagagcacttgctgatgcccttgatatatctctgaagatgaccctctcagttccattatctgatatattggcattcaaaaagctgtcgaaagcgtactttgggtatatggaagttctgttcaacaaccatatcaagtttgttctcaatttggacacaaacacattcatacatattgtcagctcactcgaatctggcttaaaaggtctagatgcagggatatcatcacagtgcgcttctgccatcgacaacctggcagccttttactttaataacattacatctggtgactcacctccatcaccagcttcagtaaatctcgcacgacatattggagagtgtcccaatttgtttcctcagatactgaagactctttttgagatcatgctctttgaggatgctggtaatcagtggagtctgagtcgaccaatactgagcctgataatgaccagtgaacagatgttcagtgaactcagagcgcacatattagcatcacagactgtggaccagcaacaacgcctttcacagtgcttcgataagctgatgacggatgtcaataggaacttggaacctaagaatcgtgacagattcactcaaaacctgacagcatttagacgtgattttcgactgaagtaacagctccttggtaccagctatcagtttgaaggtgttcctgcatgatgtaaatactccagttaccttcttttttggaaccacctttctgtgggttgagaaaagaagagcttgtccttaggtttgccttggattggctgaagatggtcttgttgatgcatgtggtagtgaaagcagctgtaaatttcatagcatgtcattttaatcagaatggtgaaaggtggagattgtttcttttgttttttattttatattgcatccctttagcatgtacagcaaaattggtgctagaacaggggtggctgtttgcccaatttgttaagtgggaggcagtcatctcagatataattcatttgttaagaagtcaacgaggtaaaggatgtaaatgattccgttggctttgctgaatatgaaagttgaacagtaagaaggatggctcagttgcatccgctgtgcagattgaactgttaatgataacaatttcttttttttttgtctctgtttggtattgatactctgcag

SEQ ID NO: 58693 - DNA, 4161 bp, Zea Mays
gaaaagatagctgtagacatccccggaagaaatggtcccgtgcgtgcgctcactcctttgctgtttttcttctctccgttcaccttgcgtgcgcgacatctagggcgaccgccgccgccgccgccgccctacgcccagcagcccaggtcttcgtcgcgccctttgccggctacgagcacccaccacaccagatcactgtaatccaggctgaattgtggctggtattggcgatataagcattcgttagctgtttaaattgtgtcttttgtctttgattaagcgtcattggaaaggctgtcatgagaaaactcttttgttcaaacgtttctctcctgtaatatgaatgtactgtgacaatccttcatcctatgctagaatcacatattttagcttctaagctccttacagttctttacaagtttcttattcaaccgaatacctaatgcattaattcggtgcttgtgacaagcattcatgcaaattcgtggatattaattcagaacctggtggcatattaatcttggatacttggtcaactgcaaacttgaagattcattttcatgcaatcaatggagagcctagcgcaattagaggtgttgtgtgaaaagctttataattctagagactcggctgagcgagcgcatgcagaaagcaccctcaagtgcttctcagagaacagcgagtacatttcgcagtgccaatacatattggacaatgcctcaactccatatgccctgatgctggcgagttcaagcttgctgaagcaagtttctgaccgcagtctttctttgatgctccgtctcgatatacggaattatgtcataaactatcttggcacaagggggcctaaattgcagaactttgtcattgtgtccttaattcagctggtctgtcgaattacaaaatttggatggtttgatgatgacagattcagagagactgtcaaggaagcgactgattttttaggtcttgcttcccaggatcattatttcataggcttgaagatactaaacaatctcgttacagaaatgaatcagccaaaccccgcgatgcctttgacgcttcataggaaaattgcgggttcattcaaggatcagtttcttctgcagatcttccaaatttcgttaacctcactaaaccaactgaagagtgaagctccggatgactttggacatattcctcttgaccttgccttgaagtgcttatcttttgactttgttggttctccggtggacgaaagctctgaagaatttggaacagtgcagcttcctgcatcttggaggcctcttcttcaagatccttccacactccaaatcttttttgattactacaaagtcaatgacatacgggtttcaaaagaggccttggagtgtctggttcgacttgcttctgtcaggcgcagtatttttgtggaggatcctgcaaggtcccagtttctttctcatctgatgctaggcaccaaggagatacttctaactggccaaggacttgctgatcatgacaattaccatgagttctgccgtcttttgggacgtttcaaagtgaattaccagctggcagagcttttgaatgttgagttttatggtgagtggattggtctagtagctgaatttacaactagatccttgttgtcatggcagtgggccagcaacagtgtctactaccttctaagtctttggtcaaggctggtgacatccgtgccttacttgaaaggtgaaacaccaagtcttcttgatgaaactgttcccaagatcacagaaggttttatcacttccagaattaattctgttcaggccatccttgctgacaactcactggaaaatcctttggatagtgtggaagttctccaggaccagctggagtttcttcctttcctttgcagattccagtaccaaagtagtagtctgtacatcataaacatcatggaacctcttctgcaagcttatacggaaaggtccagattacccgctcctggtgatgctgatgagctgtctgtcattgaaggccaaattgcatggatggttcacataattgcggccattgtcaaagttaggcaggtaacaggtgttagtcaagaaacacaagagttgattgacgcagaactctctgcccgtgtactacagttgataagtgtgactgatacaggagcgcacacacagagatatcaagaattaagtaagcaaaggcttgaccgagctattctcatttttgtacaaagtttcagaaggtcatatgtaggagaccaagctatgcattcttcaaagcagttgtatggaagattgtctgagcttctaggacttaatgaccatttaattctactcaatgtgattgttggcaaaattgctacaaatatgaagtgctatgctgagagtgaggatgttattgatcatactctgtccctgttccttgacttggcaactggaatacaaatgttcacgtagtagaactacgttctattacatccttggctccttagtcttcatggaagatagccctgtgaaattcaggactttcatggaaccacttcaacaggttgcattaaacctggaggcaactcctgatgctgcttttcggactgatgtcgctaagcgtgcatttgttggttggatgagagatctacgtggcatagctatggcaaccaacagccgcaagacatatggcctcctatttgactggttgtatccatctcgcatgccacttctgctgagagccatctcactttgcactgatgaaccagaggtcaccacacccttgctcaagttcacgtatgaatttgttttgaacaaagctcaaagactgacatttgattcatcatcaccaaatgggatccttttattccgagaggttagcaagataatcgtggcttacgggtcacgaattctattgcttcctaatggcacagacatttatggaagtaaatacaaaggcatatggatctcactgactgttctttcaagggctttgtgtgggaattatgtcaattttggcgtatttgagctctatggtgacagagcacttgctgatgcccttgatatatctctgaagatgaccctctcagttccattatctgatatattggcattcaaaaagctgtcgaaagcgtactttgggtatatggaagttctgttcaacaaccatatcaagtttgttctcaatttggacacaaacacattcatacatattgtcagctcactcgaatctggcttaaaaggtctagatgcagggatatcatcacagtgcgcttctgccatcgacaacctggcagccttttactttaataacattacatctggtgactcacctccatcaccagcttcagtaaatctcgcacgacatattggagagtgtcccaatttgtttcctcagatactgaagactctttttgagatcatgctctttgaggatgctggtaatcagtggagtctgagtcgaccaatactgagcctgataatgaccagtgaacagatgttcagtgaactcagagcgcacatattagcatcacagactgtggaccagcaacaacgcctttcacagtgcttcgataagctgatgacggatgtcaataggaacttggaacctaagaatcgtgacagattcactcaaaacctgacagcatttagacgtgattttcgactgaagtaacagctccttggtaccagctatcagtttgaaggtgttcctgcatgatgtaaatactccagttaccttcttttttggaaccacctttctgtgggttgagaaaagaagagcttgtccttaggtttgccttggattggctgaagatggtcttgttgatgcatgtggtagtgaaagcagctgtaaatttcatagcatgtcattttaatcagaatggtgaaaggtggagattgtttcttttgttttttattttatattgcatccctttagcatgtacagcaaaattggtgctagaacaggggtggctgtttgcccaatttgttaagtgggaggcagtcatctcagatataattcatttgttaagaagtcaacgaggtaaaggatgtaaatgattccgttggctttgctgaatatgaaagttgaacagtaagaaggatggctcagttgcatccgctgtgcagattgaactgttaatgataacaatttcttttttttttgtctctgtttggtattgatactctgcag

SEQ ID NO: 58694 - DNA, 4247 bp, Zea Mays
gaaaagatagctgtagacatccccggaagaaatggtcccgtgcgtgcgctcactcctttgctgtttttcttctctccgttcaccttgcgtgcgcgacatctagggcgaccgccgccgccgccgccgccctacgcccagcagcccaggtcttcgtcgcgccctttgccggctacgagcacccaccacaccagatcactgtaatccaggctgaattgtggctggtattggcgatataagcattcgttagctgtttaaattgtgtcttttgtctttgattaagcgtcattggaaaggctgtcatgagaaaactcttttgttcaaacgtttctctcctgtaatatgaatgtactgtgacaatccttcatcctatgctagaatcacatattttagcttctaagctccttacagttctttacaagtttcttattcaaccgaatacctaatgcattaattcggtgcttgtgacaagcattcatgcaaattcgtggatattaattcagaacctggtggcatattaatcttggatacttggtcaactgcaaacttgaagattcattttcatgcaatcaatggagagcctagcgcaattagaggtgttgtgtgaaaagctttataattctagagactcggctgagcgagcgcatgcagaaagcaccctcaagtgcttctcagagaacagcgagtacatttcgcagtgccaatacatattggacaatgcctcaactccatatgccctgatgctggcgagttcaagcttgctgaagcaagtttctgaccgcagtctttctttgatgctccgtctcgatatacggaattatgtcataaactatcttggcacaagggggcctaaattgcagaactttgtcattgtgtccttaattcagctggtctgtcgaattacaaaatttggatggtttgatgatgacagattcagagagactgtcaaggaagcgactgattttttaggtcttgcttcccaggatcattatttcataggcttgaagatactaaacaatctcgttacagaaatgaatcagccaaaccccgcgatgcctttgacgcttcataggaaaattgcgggttcattcaaggatcagtttcttctgcagatcttccaaatttcgttaacctcactaaaccaactgaagagtgaagctccggatgactttggacatattcctcttgaccttgccttgaagtgcttatcttttgactttgttggttctccggtggacgaaagctctgaagaatttggaacagtgcagcttcctgcatcttggaggcctcttcttcaagatccttccacactccaaatcttttttgattactacaaagtcaatgacatacgggtttcaaaagaggccttggagtgtctggttcgacttgcttctgtcaggcgcagtatttttgtggaggatcctgcaaggtcccagtttctttctcatctgatgctaggcaccaaggagatacttctaactggccaaggacttgctgatcatgacaattaccatgagttctgccgtcttttgggacgtttcaaagtgaattaccagctggcagagcttttgaatgttgagttttatggtgagtggattggtctagtagctgaatttacaactagatccttgttgtcatggcagtgggccagcaacagtgtctactaccttctaagtctttggtcaaggctggtgacatccgtgccttacttgaaaggtgaaacaccaagtcttcttgatgaaactgttcccaagatcacagaaggttttatcacttccagaattaattctgttcaggccatccttgctgacaactcactggaaaatcctttggatagtgtggaagttctccaggaccagctggagtttcttcctttcctttgcagattccagtaccaaagtagtagtctgtacatcataaacatcatggaacctcttctgcaagcttatacggaaaggtccagattacccgctcctggtgatgctgatgagctgtctgtcattgaaggccaaattgcatggatggttcacataattgcggccattgtcaaagttaggcaggtaacaggtgttagtcaagaaacacaagagttgattgacgcagaactctctgcccgtgtactacagttgataagtgtgactgatacaggagcgcacacacagagatatcaagaattaagtaagcaaaggcttgaccgagctattctcatttttgtacaaagtttcagaaggtcatatgtaggagaccaagctatgcattcttcaaagttgtatggaagattgtctgagcttctaggacttaatgaccatttaattctactcaatgtgattgttggcaaaattgctacaaatatgaagtgctatgctgagagtgaggatgttattgatcatactctgtccctgttccttgacttggcaactggctatatgactggaaagctgctgcttaagctggagagtgtaaaattcatcattgcaaatcattctccagagaatttcccatttcttgcagaatacaaatgttcacgtagtagaactacgttctattacatccttggctccttagtcttcatggaagatagccctgtgaaattcaggactttcatggaaccacttcaacaggttgcattaaacctggaggcaactcctgatgctgcttttcggactgatgtcgctaagcgtgcatttgttggttggatgagagatctacgtggcatagctatggcaaccaacagccgcaagacatatggcctcctatttgactggttgtatccatctcgcatgccacttctgctgagagccatctcactttgcactgatgaaccagaggtcaccacacccttgctcaagttcacgtatgaatttgttttgaacaaagctcaaagactgacatttgattcatcatcaccaaatgggatccttttattccgagaggttagcaagataatcgtggcttacgggtcacgaattctattgcttcctaatggcacagacatttatggaagtaaatacaaaggcatatggatctcactgactgttctttcaagggctttgtgtgggaattatgtcaattttggcgtatttgagctctatggtgacagagcacttgctgatgcccttgatatatctctgaagatgaccctctcagttccattatctgatatattggcattcaaaaagctgtcgaaagcgtactttgggtatatggaagttctgttcaacaaccatatcaagtttgttctcaatttggacacaaacacattcatacatattgtcagctcactcgaatctggcttaaaaggtctagatgcagggatatcatcacagtgcgcttctgccatcgacaacctggcagccttttactttaataacattacatctggtgactcacctccatcaccagcttcagtaaatctcgcacgacatattggagagtgtcccaatttgtttcctcagatactgaagactctttttgagatcatgctctttgaggatgctggtaatcagtggagtctgagtcgaccaatactgagcctgataatgaccagtgaacagatgttcagtgaactcagagcgcacatattagcatcacagactgtggaccagcaacaacgcctttcacagtgcttcgataagctgatgacggatgtcaataggaacttggaacctaagaatcgtgacagattcactcaaaacctgacagcatttagacgtgattttcgactgaagtaacagctccttggtaccagctatcagtttgaaggtgttcctgcatgatgtaaatactccagttaccttcttttttggaaccacctttctgtgggttgagaaaagaagagcttgtccttaggtttgccttggattggctgaagatggtcttgttgatgcatgtggtagtgaaagcagctgtaaatttcatagcatgtcattttaatcagaatggtgaaaggtggagattgtttcttttgttttttattttatattgcatccctttagcatgtacagcaaaattggtgctagaacaggggtggctgtttgcccaatttgttaagtgggaggcagtcatctcagatataattcatttgttaagaagtcaacgaggtaaaggatgtaaatgattccgttggctttgctgaatatgaaagttgaacagtaagaaggatggctcagttgcatccgctgtgcagattgaactgttaatgataacaatttcttttttttttgtctctgtttggtattgatactctgcag

SEQ ID NO: 58695 - DNA, 4002 bp, Zea Mays
gaaaagatagctgtagacatccccggaagaaatggtcccgtgcgtgcgctcactcctttgctgtttttcttctctccgttcaccttgcgtgcgcgacatctagggcgaccgccgccgccgccgccgccctacgcccagcagcccaggtcttcgtcgcgccctttgccggctacgagcacccaccacaccagatcactgtaatccaggctgaattgtggctgcattcatgcaaattcgtggatattaattcagaacctggtggcatattaatcttggatacttggtcaactgcaaacttgaagattcattttcatgcaatcaatggagagcctagcgcaattagaggtgttgtgtgaaaagctttataattctagagactcggctgagcgagcgcatgcagaaagcaccctcaagtgcttctcagagaacagcgagtacatttcgcagtgccaatacatattggacaatgcctcaactccatatgccctgatgctggcgagttcaagcttgctgaagcaagtttctgaccgcagtctttctttgatgctccgtctcgatatacggaattatgtcataaactatcttggcacaagggggcctaaattgcagaactttgtcattgtgtccttaattcagctggtctgtcgaattacaaaatttggatggtttgatgatgacagattcagagagactgtcaaggaagcgactgattttttaggtcttgcttcccaggatcattatttcataggcttgaagatactaaacaatctcgttacagaaatgaatcagccaaaccccgcgatgcctttgacgcttcataggaaaattgcgggttcattcaaggatcagtttcttctgcagatcttccaaatttcgttaacctcactaaaccaactgaagagtgaagctccggatgactttggacatattcctcttgaccttgccttgaagtgcttatcttttgactttgttggttctccggtggacgaaagctctgaagaatttggaacagtgcagcttcctgcatcttggaggcctcttcttcaagatccttccacactccaaatcttttttgattactacaaagtcaatgacatacgggtttcaaaagaggccttggagtgtctggttcgacttgcttctgtcaggcgcagtatttttgtggaggatcctgcaaggtcccagtttctttctcatctgatgctaggcaccaaggagatacttctaactggccaaggacttgctgatcatgacaattaccatgagttctgccgtcttttgggacgtttcaaagtgaattaccagctggcagagcttttgaatgttgagttttatggtgagtggattggtctagtagctgaatttacaactagatccttgttgtcatggcagtgggccagcaacagtgtctactaccttctaagtctttggtcaaggctggtgacatccgtgccttacttgaaaggtgaaacaccaagtcttcttgatgaaactgttcccaagatcacagaaggttttatcacttccagaattaattctgttcaggccatccttgctgacaactcactggaaaatcctttggatagtgtggaagttctccaggaccagctggagtttcttcctttcctttgcagattccagtaccaaagtagtagtctgtacatcataaacatcatggaacctcttctgcaagcttatacggaaaggtccagattacccgctcctggtgatgctgatgagctgtctgtcattgaaggccaaattgcatggatggttcacataattgcggccattgtcaaagttaggcaggtaacaggtgttagtcaagaaacacaagagttgattgacgcagaactctctgcccgtgtactacagttgataagtgtgactgatacaggagcgcacacacagagatatcaagaattaagtaagcaaaggcttgaccgagctattctcatttttgtacaaagtttcagaaggtcatatgtaggagaccaagctatgcattcttcaaagcagttgtatggaagattgtctgagcttctaggacttaatgaccatttaattctactcaatgtgattgttggcaaaattgctacaaatatgaagtgctatgctgagagtgaggatgttattgatcatactctgtccctgttccttgacttggcaactggctatatgactggaaagctgctgcttaagctggagagtgtaaaattcatcattgcaaatcattctccagagaatttcccatttcttgcagaatacaaatgttcacgtagtagaactacgttctattacatccttggctccttagtcttcatggaagatagccctgtgaaattcaggactttcatggaaccacttcaacaggttgcattaaacctggaggcaactcctgatgctgcttttcggactgatgtcgctaagcgtgcatttgttggttggatgagagatctacgtggcatagctatggcaaccaacagccgcaagacatatggcctcctatttgactggttgtatccatctcgcatgccacttctgctgagagccatctcactttgcactgatgaaccagaggtcaccacacccttgctcaagttcacgtatgaatttgttttgaacaaagctcaaagactgacatttgattcatcatcaccaaatgggatccttttattccgagaggttagcaagataatcgtggcttacgggtcacgaattctattgcttcctaatggcacagacatttatggaagtaaatacaaaggcatatggatctcactgactgttctttcaagggctttgtgtgggaattatgtcaattttggcgtatttgagctctatggtgacagagcacttgctgatgcccttgatatatctctgaagatgaccctctcagttccattatctgatatattggcattcaaaaagctgtcgaaagcgtactttgggtatatggaagttctgttcaacaaccatatcaagtttgttctcaatttggacacaaacacattcatacatattgtcagctcactcgaatctggcttaaaaggtctagatgcagggatatcatcacagtgcgcttctgccatcgacaacctggcagccttttactttaataacattacatctggtgactcacctccatcaccagcttcagtaaatctcgcacgacatattggagagtgtcccaatttgtttcctcagatactgaagactctttttgagatcatgctctttgaggatgctggtaatcagtggagtctgagtcgaccaatactgagcctgataatgaccagtgaacagatgttcagtgaactcagagcgcacatattagcatcacagactgtggaccagcaacaacgcctttcacagtgcttcgataagctgatgacggatgtcaataggaacttggaacctaagaatcgtgacagattcactcaaaacctgacagcatttagacgtgattttcgactgaagtaacagctccttggtaccagctatcagtttgaaggtgttcctgcatgatgtaaatactccagttaccttcttttttggaaccacctttctgtgggttgagaaaagaagagcttgtccttaggtttgccttggattggctgaagatggtcttgttgatgcatgtggtagtgaaagcagctgtaaatttcatagcatgtcattttaatcagaatggtgaaaggtggagattgtttcttttgttttttattttatattgcatccctttagcatgtacagcaaaattggtgctagaacaggggtggctgtttgcccaatttgttaagtgggaggcagtcatctcagatataattcatttgttaagaagtcaacgaggtaaaggatgtaaatgattccgttggctttgctgaatatgaaagttgaacagtaagaaggatggctcagttgcatccgctgtgcagattgaactgttaatgataacaatttcttttttttttgtctctgtttggtattgatactctgcag

SEQ ID NO: 58696 - DNA, 3139 bp, Zea Mays
gaaaagatagctgtagacatccccggaagaaatggtcccgtgcgtgcgctcactcctttgctgtttttcttctctccgttcaccttgcgtgcgcgacatctagggcgaccgccgccgccgccgccgccctacgcccagcagcccaggtcttcgtcgcgccctttgccggctacgagcacccaccacaccagatcactgtaatccaggctgaattgtggctggtattggcgatataagcattcgttagctgtttaaattgtgtcttttgtctttgattaagcgtcattggaaaggctgtcatgagaaaactcttttgttcaaacgtttctctcctgtaatatgaatgtactgtgacaatccttcatcctatgctagaatcacatattttagcttctaagctccttacagttctttacaagtttcttattcaaccgaatacctaatgcattaattcggtgcttgtgacaagcattcatgcaaattcgtggatattaattcagaacctggtggcatattaatcttggatacttggtcaactgcaaacttgaagattcattttcatgcaatcaatggagagcctagcgcaattagaggtgttgtgtgaaaagctttataattctagagactcggctgagcgagcgcatgcagaaagcaccctcaagtgcttctcagagaacagcgagtacatttcgcagtgccaatacatattggacaatgcctcaactccatatgccctgatgctggcgagttcaagcttgctgaagcaagtttctgaccgcagtctttctttgatgctccgtctcgatatacggaattatgtcataaactatcttggcacaagggggcctaaattgcagaactttgtcattgtgtccttaattcagctggtctgtcgaattacaaaatttggatggtttgatgatgacagattcagagagactgtcaaggaagcgactgattttttaggtcttgcttcccaggatcattatttcataggcttgaagatactaaacaatctcgttacagaaatgaatcagccaaaccccgcgatgcctttgacgcttcataggaaaattgcgggttcattcaaggatcagtttcttctgcagatcttccaaatttcgttaacctcactaaaccaactgaagagtgaagctccggatgactttggacatattcctcttgaccttgccttgaagtgcttatcttttgactttgttggttctccggtggacgaaagctctgaagaatttggaacagtgcagcttcctgcatcttggaggcctcttcttcaagatccttccacactccaaatcttttttgattactacaaagtcaatgacatacgggtttcaaaagaggccttggagtgtctggttcgacttgcttctgtcaggcgcagtatttttgtggaggatcctgcaaggtcccagtttctttctcatctgatgctaggcaccaaggagatacttctaactggccaaggactttcatggaaccacttcaacaggttgcattaaacctggaggcaactcctgatgctgcttttcggactgatgtcgctaagcgtgcatttgttggttggatgagagatctacgtggcatagctatggcaaccaacagccgcaagacatatggcctcctatttgactggttgtatccatctcgcatgccacttctgctgagagccatctcactttgcactgatgaaccagaggtcaccacacccttgctcaagttcacgtatgaatttgttttgaacaaagctcaaagactgacatttgattcatcatcaccaaatgggatccttttattccgagaggttagcaagataatcgtggcttacgggtcacgaattctattgcttcctaatggcacagacatttatggaagtaaatacaaaggcatatggatctcactgactgttctttcaagggctttgtgtgggaattatgtcaattttggcgtatttgagctctatggtgacagagcacttgctgatgcccttgatatatctctgaagatgaccctctcagttccattatctgatatattggcattcaaaaagctgtcgaaagcgtactttgggtatatggaagttctgttcaacaaccatatcaagtttgttctcaatttggacacaaacacattcatacatattgtcagctcactcgaatctggcttaaaaggtctagatgcagggatatcatcacagtgcgcttctgccatcgacaacctggcagccttttactttaataacattacatctggtgactcacctccatcaccagcttcagtaaatctcgcacgacatattggagagtgtcccaatttgtttcctcagatactgaagactctttttgagatcatgctctttgaggatgctggtaatcagtggagtctgagtcgaccaatactgagcctgataatgaccagtgaacagatgttcagtgaactcagagcgcacatattagcatcacagactgtggaccagcaacaacgcctttcacagtgcttcgataagctgatgacggatgtcaataggaacttggaacctaagaatcgtgacagattcactcaaaacctgacagcatttagacgtgattttcgactgaagtaacagctccttggtaccagctatcagtttgaaggtgttcctgcatgatgtaaatactccagttaccttcttttttggaaccacctttctgtgggttgagaaaagaagagcttgtccttaggtttgccttggattggctgaagatggtcttgttgatgcatgtggtagtgaaagcagctgtaaatttcatagcatgtcattttaatcagaatggtgaaaggtggagattgtttcttttgttttttattttatattgcatccctttagcatgtacagcaaaattggtgctagaacaggggtggctgtttgcccaatttgttaagtgggaggcagtcatctcagatataattcatttgttaagaagtcaacgaggtaaaggatgtaaatgattccgttggctttgctgaatatgaaagttgaacagtaagaaggatggctcagttgcatccgctgtgcagattgaactgttaatgataacaatttcttttttttttgtctctgtttggtattgatactctgcag

SEQ ID NO: 58697 - DNA, 4327 bp, Zea Mays
gaaaagatagctgtagacatccccggaagaaatggtcccgtgcgtgcgctcactcctttgctgtttttcttctctccgttcaccttgcgtgcgcgacatctagggcgaccgccgccgccgccgccgccctacgcccagcagcccaggtcttcgtcgcgccctttgccggctacgagcacccaccacaccagatcactgtaatccaggctgaattgtggctggtattggcgatataagcattcgttagctgtttaaattgtgtcttttgtctttgattaagcgtcattggaaaggctgtcatgagaaaactcttttgttcaaacgtttctctcctgtaatatgaatgtactgtgacaatccttcatcctatgctagaatcacatattttagcttctaagctccttacagttctttacaagtttcttattcaaccgaatacctaatgcattaattcggtgcttgtgacaagcattcatgcaaattcgtggatattaattcagaacctggtggcatattaatcttggatacttggtcaactgcaaacttgaagattcattttcatgcaatcaatggagagcctagcgcaattagaggtgttgtgtgaaaagctttataattctagagactcggctgagcgagcgcatgcagaaagcaccctcaagtgcttctcagagaacagcgagtacatttcgcagtgccaatacatattggacaatgcctcaactccatatgccctgatgctggcgagttcaagcttgctgaagcaagtttctgaccgcagtctttctttgatgctccgtctcgatatacggaattatgtcataaactatcttggcacaagggggcctaaattgcagaactttgtcattgtgtccttaattcagctggtctgtcgaattacaaaatttggatggtttgatgatgacagattcagagagactgtcaaggaagcgactgattttttaggtcttgcttcccaggatcattatttcataggcttgaagatactaaacaatctcgttacagaaatgaatcagccaaaccccgcgatgcctttgacgcttcataggaaaattgcgggttcattcaaggatcagtttcttctgcagatcttccaaatttcgttaacctcactaaaccaactgaagagtgaagctccggatgactttggacatattcctcttgaccttgccttgaagtgcttatcttttgactttgttggttctccggtggacgaaagctctgaagaatttggaacagtgcagcttcctgcatcttggaggcctcttcttcaagatccttccacactccaaatcttttttgattactacaaagtcaatgacatacgggtttcaaaagaggccttggagtgtctggttcgacttgcttctgtcaggcgcagtatttttgtggaggatcctgcaaggtcccagtttctttctcatctgatgctaggcaccaaggagatacttctaactggccaaggacttgctgatcatgacaattaccatgagttctgccgtcttttgggacgtttcaaagtgaattaccagctggcagagcttttgaatgttgagttttatggtgagtggattggtctagtagctgaatttacaactagatccttgttgtcatggcagtgggccagcaacagtgtctactaccttctaagtctttggtcaaggctggtgacatccgtgccttacttgaaaggtgaaacaccaagtcttcttgatgaaactgttcccaagatcacagaaggttttatcacttccagaattaattctgttcaggccatccttgctgacaactcactggaaaatcctttggatagtgtggaagttctccaggaccagctggagtttcttcctttcctttgcagattccagtaccaaagtagtagtctgtacatcataaacatcatggaacctcttctgcaagcttatacggtccagattacccgctcctggtgatgctgatgagctgtctgtcattgaaggccaaattgcatggatggttcacataattgcggccattgtcaaagttaggcaggtaacaggtgttagtcaagaaacacaagagttgattgacgcagaactctctgcccgtgtactacagttgataagtgtgactgatacaggagcgcacacacagagatatcaagaattaagtaagcaaaggcttgaccgagctattctcatttttgtacaaagtttcagaaggtcatatgtaggagaccaagctatgcattcttcaaagcagttgtatggaagattgtctgagcttctaggacttaatgaccatttaattctactcaatgtgattgttggcaaaattgctacaaatatgaagtgctatgctgagagtgaggatgttattgatcatactctgtccctgttccttgacttggcaactgggtaaagttgtgactatgtttttccagttttttttctcatttatgcgtgatgactgttcatattttttttcttgccaagtcagctatatgactggaaagctgctgcttaagctggagagtgtaaaattcatcattgcaaatcattctccagagaatttcccatttcttgcagaatacaaatgttcacgtagtagaactacgttctattacatccttggctccttagtcttcatggaagatagccctgtgaaattcaggactttcatggaaccacttcaacaggttgcattaaacctggaggcaactcctgatgctgcttttcggactgatgtcgctaagcgtgcatttgttggttggatgagagatctacgtggcatagctatggcaaccaacagccgcaagacatatggcctcctatttgactggttgtatccatctcgcatgccacttctgctgagagccatctcactttgcactgatgaaccagaggtcaccacacccttgctcaagttcacgtatgaatttgttttgaacaaagctcaaagactgacatttgattcatcatcaccaaatgggatccttttattccgagaggttagcaagataatcgtggcttacgggtcacgaattctattgcttcctaatggcacagacatttatggaagtaaatacaaaggcatatggatctcactgactgttctttcaagggctttgtgtgggaattatgtcaattttggcgtatttgagctctatggtgacagagcacttgctgatgcccttgatatatctctgaagatgaccctctcagttccattatctgatatattggcattcaaaaagctgtcgaaagcgtactttgggtatatggaagttctgttcaacaaccatatcaagtttgttctcaatttggacacaaacacattcatacatattgtcagctcactcgaatctggcttaaaaggtctagatgcagggatatcatcacagtgcgcttctgccatcgacaacctggcagccttttactttaataacattacatctggtgactcacctccatcaccagcttcagtaaatctcgcacgacatattggagagtgtcccaatttgtttcctcagatactgaagactctttttgagatcatgctctttgaggatgctggtaatcagtggagtctgagtcgaccaatactgagcctgataatgaccagtgaacagatgttcagtgaactcagagcgcacatattagcatcacagactgtggaccagcaacaacgcctttcacagtgcttcgataagctgatgacggatgtcaataggaacttggaacctaagaatcgtgacagattcactcaaaacctgacagcatttagacgtgattttcgactgaagtaacagctccttggtaccagctatcagtttgaaggtgttcctgcatgatgtaaatactccagttaccttcttttttggaaccacctttctgtgggttgagaaaagaagagcttgtccttaggtttgccttggattggctgaagatggtcttgttgatgcatgtggtagtgaaagcagctgtaaatttcatagcatgtcattttaatcagaatggtgaaaggtggagattgtttcttttgttttttattttatattgcatccctttagcatgtacagcaaaattggtgctagaacaggggtggctgtttgcccaatttgttaagtgggaggcagtcatctcagatataattcatttgttaagaagtcaacgaggtaaaggatgtaaatgattccgttggctttgctgaatatgaaagttgaacagtaagaaggatggctcagttgcatccgctgtgcagattgaactgttaatgataacaatttcttttttttttgtctctgtttggtattgatactctgcag

SEQ ID NO: 58698 - DNA, 4045 bp, Zea Mays
gaaaagatagctgtagacatccccggaagaaatggtcccgtgcgtgcgctcactcctttgctgtttttcttctctccgttcaccttgcgtgcgcgacatctagggcgaccgccgccgccgccgccgccctacgcccagcagcccaggtcttcgtcgcgccctttgccggctacgagcacccaccacaccagatcactgtaatccaggctgaattgtggctgaacctggtggcatattaatcttggatacttggtcaactgcaaacttgaagattcattttcatgcaatcaatggagagcctagcgcaattagaggtgttgtgtgaaaagctttataattctagagactcggctgagcgagcgcatgcagaaagcaccctcaagtgcttctcagagaacagcgagtacatttcgcagtgccaatacatattggacaatgcctcaactccatatgccctgatgctggcgagttcaagcttgctgaagcaagtttctgaccgcagtctttctttgatgctccgtctcgatatacggaattatgtcataaactatcttggcacaagggggcctaaattgcagaactttgtcattgtgtccttaattcagctggtctgtcgaattacaaaatttggatggtttgatgatgacagattcagagagactgtcaaggaagcgactgattttttaggtcttgcttcccaggatcattatttcataggcttgaagatactaaacaatctcgttacagaaatgaatcagccaaaccccgcgatgcctttgacgcttcataggaaaattgcgggttcattcaaggatcagtttcttctgcagatcttccaaatttcgttaacctcactaaaccaactgaagagtgaagctccggatgactttggacatattcctcttgaccttgccttgaagtgcttatcttttgactttgttggttctccggtggacgaaagctctgaagaatttggaacagtgcagcttcctgcatcttggaggcctcttcttcaagatccttccacactccaaatcttttttgattactacaaagtcaatgacatacgggtttcaaaagaggccttggagtgtctggttcgacttgcttctgtcaggcgcagtatttttgtggaggatcctgcaaggtcccagtttctttctcatctgatgctaggcaccaaggagatacttctaactggccaaggacttgctgatcatgacaattaccatgagttctgccgtcttttgggacgtttcaaagtgaattaccagctggcagagcttttgaatgttgagttttatggtgagtggattggtctagtagctgaatttacaactagatccttgttgtcatggcagtgggccagcaacagtgtctactaccttctaagtctttggtcaaggctggtgacatccgtgccttacttgaaaggtgaaacaccaagtcttcttgatgaaactgttcccaagatcacagaaggttttatcacttccagaattaattctgttcaggccatccttgctgacaactcactggaaaatcctttggatagtgtggaagttctccaggaccagctggagtttcttcctttcctttgcagattccagtaccaaagtagtagtctgtacatcataaacatcatggaacctcttctgcaagcttatacggaaaggtccagattacccgctcctggtgatgctgatgagctgtctgtcattgaaggccaaattgcatggatggttcacataattgcggccattgtcaaagttaggcagtcaagaaacacaagagttgattgacgcagaactctctgcccgtgtactacagttgataagtgtgactgatacaggagcgcacacacagagatatcaagaattaagtaagcaaaggcttgaccgagctattctcatttttgtacaaagtttcagaaggtcatatgtaggagaccaagctatgcattcttcaaagcagttgtatggaagattgtctgagcttctaggacttaatgaccatttaattctactcaatgtgattgttggcaaaattgctacaaatatgaagtgctatgctgagagtgaggatgttattgatcatactctgtccctgttccttgacttggcaactggctatatgactggaaagctgctgcttaagctggagagtgtaaaattcatcattgcaaatcattctgtaaagtcttccgcttcccactaacttttatttattttccatcgctgcactcagttttagagataactcttttttattattcttccagccagagaatttcccatttcttgcagaatacaaatgttcacgtagtagaactacgttctattacatccttggctccttagtcttcatggaagatagccctgtgaaattcaggactttcatggaaccacttcaacaggttgcattaaacctggaggcaactcctgatgctgcttttcggactgatgtcgctaagcgtgcatttgttggttggatgagagatctacgtggcatagctatggcaaccaacagccgcaagacatatggcctcctatttgactggttgtatccatctcgcatgccacttctgctgagagccatctcactttgcactgatgaaccagaggtcaccacacccttgctcaagttcacgtatgaatttgttttgaacaaagctcaaagactgacatttgattcatcatcaccaaatgggatccttttattccgagaggttagcaagataatcgtggcttacgggtcacgaattctattgcttcctaatggcacagacatttatggaagtaaatacaaaggcatatggatctcactgactgttctttcaagggctttgtgtgggaattatgtcaattttggcgtatttgagctctatggtgacagagcacttgctgatgcccttgatatatctctgaagatgaccctctcagttccattatctgatatattggcattcaaaaagctgtcgaaagcgtactttgggtatatggaagttctgttcaacaaccatatcaagtttgttctcaatttggacacaaacacattcatacatattgtcagctcactcgaatctggcttaaaaggtctagatgcagggatatcatcacagtgcgcttctgccatcgacaacctggcagccttttactttaataacattacatctggtgactcacctccatcaccagcttcagtaaatctcgcacgacatattggagagtgtcccaatttgtttcctcagatactgaagactctttttgagatcatgctctttgaggatgctggtaatcagtggagtctgagtcgaccaatactgagcctgataatgaccagtgaacagatgttcagtgaactcagagcgcacatattagcatcacagactgtggaccagcaacaacgcctttcacagtgcttcgataagctgatgacggatgtcaataggaacttggaacctaagaatcgtgacagattcactcaaaacctgacagcatttagacgtgattttcgactgaagtaacagctccttggtaccagctatcagtttgaaggtgttcctgcatgatgtaaatactccagttaccttcttttttggaaccacctttctgtgggttgagaaaagaagagcttgtccttaggtttgccttggattggctgaagatggtcttgttgatgcatgtggtagtgaaagcagctgtaaatttcatagcatgtcattttaatcagaatggtgaaaggtggagattgtttcttttgttttttattttatattgcatccctttagcatgtacagcaaaattggtgctagaacaggggtggctgtttgcccaatttgttaagtgggaggcagtcatctcagatataattcatttgttaagaagtcaacgaggtaaaggatgtaaatgattccgttggctttgctgaatatgaaagttgaacagtaagaaggatggctcagttgcatccgctgtgcagattgaactgttaatgataacaatttcttttttttttgtctctgtttggtattgatactctgcag

SEQ ID NO: 58699 - DNA, 4245 bp, Zea Mays
gaaaagatagctgtagacatccccggaagaaatggtcccgtgcgtgcgctcactcctttgctgtttttcttctctccgttcaccttgcgtgcgcgacatctagggcgaccgccgccgccgccgccgccctacgcccagcagcccaggtcttcgtcgcgccctttgccggctacgagcacccaccacaccagatcactgtaatccaggctgaattgtggctggtattggcgatataagcattcgttagctgtttaaattgtgtcttttgtctttgattaagcgtcattggaaaggctgtcatgagaaaactcttttgttcaaacgtttctctcctgtaatatgaatgtactgtgacaatccttcatcctatgctagaatcacatattttagcttctaagctccttacagttctttacaagtttcttattcaaccgaatacctaatgcattaattcggtgcttgtgacaagcattcatgcaaattcgtggatattaattcagaacctggtggcatattaatcttggatacttggtcaactgcaaacttgaagattcattttcatgcaatcaatggagagcctagcgcaattagaggtgttgtgtgaaaagctttataattctagagactcggctgagcgagcgcatgcagaaagcaccctcaagtgcttctcagagaacagcgagtacatttcgcagtgccaatacatattggacaatgcctcaactccatatgccctgatgctggcgagttcaagcttgctgaagcaagtttctgaccgcagtctttctttgatgctccgtctcgatatacggaattatgtcataaactatcttggcacaagggggcctaaattgcagaactttgtcattgtgtccttaattcagctggtctgtcgaattacaaaatttggatggtttgatgatgacagattcagagagactgtcaaggaagcgactgattttttaggcttcccaggatcattatttcataggcttgaagatactaaacaatctcgttacagaaatgaatcagccaaaccccgcgatgcctttgacgcttcataggaaaattgcgggttcattcaaggatcagtttcttctgcagatcttccaaatttcgttaacctcactaaaccaactgaagagtgaagctccggatgactttggacatattcctcttgaccttgccttgaagtgcttatcttttgactttgttggttctccggtggacgaaagctctgaagaatttggaacagtgcagcttcctgcatcttggaggcctcttcttcaagatccttccacactccaaatcttttttgattactacaaagtcaatgacatacgggtttcaaaagaggccttggagtgtctggttcgacttgcttctgtcaggcgcagtatttttgtggaggatcctgcaaggtcccagtttctttctcatctgatgctaggcaccaaggagatacttctaactggccaaggacttgctgatcatgacaattaccatgagttctgccgtcttttgggacgtttcaaagtgaattaccagctggcagagcttttgaatgttgagttttatggtgagtggattggtctagtagctgaatttacaactagatccttgttgtcatggcagtgggccagcaacagtgtctactaccttctaagtctttggtcaaggctggtgacatccgtgccttacttgaaaggtgaaacaccaagtcttcttgatgaaactgttcccaagatcacagaaggttttatcacttccagaattaattctgttcaggccatccttgctgacaactcactggaaaatcctttggatagtgtggaagttctccaggaccagctggagtttcttcctttcctttgcagattccagtaccaaagtagtagtctgtacatcataaacatcatggaacctcttctgcaagcttatacggaaaggtccagattacccgctcctggtgatgctgatgagctgtctgtcattgaaggccaaattgcatggatggttcacataattgcggccattgtcaaagttaggcaggtaacaggtgttagtcaagaaacacaagagttgattgacgcagaactctctgcccgtgtactacagttgataagtgtgactgatacaggagcgcacacacagagatatcaagaattaagtaagcaaaggcttgaccgagctattctcatttttgtacaaagtttcagaaggtcatatgtaggagaccaagctatgcattcttcaaagcagttgtatggaagattgtctgagcttctaggacttaatgaccatttaattctactcaatgtgattgttggcaaaattgctacaaatatgaagtgctatgctgagagtgaggatgttattgatcatactctgtccctgttccttgacttggcaactggctatatgactggaaagctgctgcttaagctggagagtgtaaaattcatcattgcaaatcattctccagagaatttcccatttcttgcagaatacaaatgttcacgtagtagaactacgttctattacatccttggctccttagtcttcatggaagatagccctgtgaaattcaggactttcatggaaccacttcaacaggttgcattaaacctggaggcaactcctgatgctgcttttcggactgatgtcgctaagcgtgcatttgttggttggatgagagatctacgtggcatagctatggcaaccaacagccgcaagacatatggcctcctatttgactggttgtatccatctcgcatgccacttctgctgagagccatctcactttgcactgatgaaccagaggtcaccacacccttgctcaagttcacgtatgaatttgttttgaacaaagctcaaagactgacatttgattcatcatcaccaaatgggatccttttattccgagaggttagcaagataatcgtggcttacgggtcacgaattctattgcttcctaatggcacagacatttatggaagtaaatacaaaggcatatggatctcactgactgttctttcaagggctttgtgtgggaattatgtcaattttggcgtatttgagctctatggtgacagagcacttgctgatgcccttgatatatctctgaagatgaccctctcagttccattatctgatatattggcattcaaaaagctgtcgaaagcgtactttgggtatatggaagttctgttcaacaaccatatcaagtttgttctcaatttggacacaaacacattcatacatattgtcagctcactcgaatctggcttaaaaggtctagatgcagggatatcatcacagtgcgcttctgccatcgacaacctggcagccttttactttaataacattacatctggtgactcacctccatcaccagcttcagtaaatctcgcacgacatattggagagtgtcccaatttgtttcctcagatactgaagactctttttgagatcatgctctttgaggatgctggtaatcagtggagtctgagtcgaccaatactgagcctgataatgaccagtgaacagatgttcagtgaactcagagcgcacatattagcatcacagactgtggaccagcaacaacgcctttcacagtgcttcgataagctgatgacggatgtcaataggaacttggaacctaagaatcgtgacagattcactcaaaacctgacagcatttagacgtgattttcgactgaagtaacagctccttggtaccagctatcagtttgaaggtgttcctgcatgatgtaaatactccagttaccttcttttttggaaccacctttctgtgggttgagaaaagaagagcttgtccttaggtttgccttggattggctgaagatggtcttgttgatgcatgtggtagtgaaagcagctgtaaatttcatagcatgtcattttaatcagaatggtgaaaggtggagattgtttcttttgttttttattttatattgcatccctttagcatgtacagcaaaattggtgctagaacaggggtggctgtttgcccaatttgttaagtgggaggcagtcatctcagatataattcatttgttaagaagtcaacgaggtaaaggatgtaaatgattccgttggctttgctgaatatgaaagttgaacagtaagaaggatggctcagttgcatccgctgtgcagattgaactgttaatgataacaatttcttttttttttgtctctgtttggtattgatactctgcag

SEQ ID NO: 58700 - DNA, 3619 bp, Zea Mays
gaaaagatagctgtagacatccccggaagaaatggtcccgtgcgtgcgctcactcctttgctgtttttcttctctccgttcaccttgcgtgcgcgacatctagggcgaccgccgccgccgccgccgccctacgcccagcagcccaggtcttcgtcgcgccctttgccggctacgagcacccaccacaccagatcactgtaatccaggctgaattgtggctgggaattatgtcataaactatcttggcacaagggggcctaaattgcagaactttgtcattgtgtccttaattcagctggtctgtcgaattacaaaatttggatggtttgatgatgacagattcagagagactgtcaaggaagcgactgattttttaggtcttgcttcccaggatcattatttcataggcttgaagatactaaacaatctcgttacagaaatgaatcagccaaaccccgcgatgcctttgacgcttcataggaaaattgcgggttcattcaaggatcagtttcttctgcagatcttccaaatttcgttaacctcactaaaccaactgaagagtgaagctccggatgactttggacatattcctcttgaccttgccttgaagtgcttatcttttgactttgttggttctccggtggacgaaagctctgaagaatttggaacagtgcagcttcctgcatcttggaggcctcttcttcaagatccttccacactccaaatcttttttgattactacaaagtcaatgacatacgggtttcaaaagaggccttggagtgtctggttcgacttgcttctgtcaggcgcagtatttttgtggaggatcctgcaaggtcccagtttctttctcatctgatgctaggcaccaaggagatacttctaactggccaaggacttgctgatcatgacaattaccatgagttctgccgtcttttgggacgtttcaaagtgaattaccagctggcagagcttttgaatgttgagttttatggtgagtggattggtctagtagctgaatttacaactagatccttgttgtcatggcagtgggccagcaacagtgtctactaccttctaagtctttggtcaaggctggtgacatccgtgccttacttgaaaggtgaaacaccaagtcttcttgatgaaactgttcccaagatcacagaaggttttatcacttccagaattaattctgttcaggccatccttgctgacaactcactggaaaatcctttggatagtgtggaagttctccaggaccagctggagtttcttcctttcctttgcagattccagtaccaaagtagtagtctgtacatcataaacatcatggaacctcttctgcaagcttatacggaaaggtccagattacccgctcctggtgatgctgatgagctgtctgtcattgaaggccaaattgcatggatggttcacataattgcggccattgtcaaagttaggcaggtaacaggtgttagtcaagaaacacaagagttgattgacgcagaactctctgcccgtgtactacagttgataagtgtgactgatacaggagcgcacacacagagatatcaagaattaagtaagcaaaggcttgaccgagctattctcatttttgtacaaagtttcagaaggtcatatgtaggagaccaagctatgcattcttcaaagttgtatggaagattgtctgagcttctaggacttaatgaccatttaattctactcaatgtgattgttggcaaaattgctacaaatatgaagtgctatgctgagagtgaggatgttattgatcatactctgtccctgttccttgacttggcaactggctatatgactggaaagctgctgcttaagctggagagtgtaaaattcatcattgcaaatcattctccagagaatttcccatttcttgcagaatacaaatgttcacgtagtagaactacgttctattacatccttggctccttagtcttcatggaagatagccctgtgaaattcaggactttcatggaaccacttcaacaggttgcattaaacctggaggcaactcctgatgctgcttttcggactgatgtcgctaagcgtgcatttgttggttggatgagagatctacgtggcatagctatggcaaccaacagccgcaagacatatggcctcctatttgactggttgtatccatctcgcatgccacttctgctgagagccatctcactttgcactgatgaaccagaggtcaccacacccttgctcaagttcacgtatgaatttgttttgaacaaagctcaaagactgacatttgattcatcatcaccaaatgggatccttttattccgagaggttagcaagataatcgtggcttacgggtcacgaattctattgcttcctaatggcacagacatttatggaagtaaatacaaaggcatatggatctcactgactgttctttcaagggctttgtgtgggaattatgtcaattttggcgtatttgagctctatggtgacagagcacttgctgatgcccttgatatatctctgaagatgaccctctcagttccattatctgatatattggcattcaaaaagctgtcgaaagcgtactttgggtatatggaagttctgttcaacaaccatatcaagtttgttctcaatttggacacaaacacattcatacatattgtcagctcactcgaatctggcttaaaaggtctagatgcagggatatcatcacagtgcgcttctgccatcgacaacctggcagccttttactttaataacattacatctggtgactcacctccatcaccagcttcagtaaatctcgcacgacatattggagagtgtcccaatttgtttcctcagatactgaagactctttttgagatcatgctctttgaggatgctggtaatcagtggagtctgagtcgaccaatactgagcctgataatgaccagtgaacagactgtggaccagcaacaacgcctttcacagtgcttcgataagctgatgacggatgtcaataggaacttggaacctaagaatcgtgacagattcactcaaaacctgacagcatttagacgtgattttcgactgaagtaacagctccttggtaccagctatcagtttgaaggtgttcctgcatgatgtaaatactccagttaccttcttttttggaaccacctttctgtgggttgagaaaagaagagcttgtccttaggtttgccttggattggctgaagatggtcttgttgatgcatgtggtagtgaaagcagctgtaaatttcatagcatgtcattttaatcagaatggtgaaaggtggagattgtttcttttgttttttattttatattgcatccctttagcatgtacagcaaaattggtgctagaacaggggtggctgtttgcccaatttgttaagtgggaggcagtcatctcagatataattcatttgttaagaagtcaacgaggtaaaggatgtaaatgattccgttggctttgctgaatatgaaagttgaacagtaagaaggatggctcagttgcatccgctgtgcagattgaactgttaatgataacaatttcttttttttttgtctctgtttggtattgatactctgcag

SEQ ID NO: 58701 - DNA, 4095 bp, Zea Mays
gaaaagatagctgtagacatccccggaagaaatggtcccgtgcgtgcgctcactcctttgctgtttttcttctctccgttcaccttgcgtgcgcgacatctagggcgaccgccgccgccgccgccgccctacgcccagcagcccaggtcttcgtcgcgccctttgccggctacgagcacccaccacaccagatcactgtaatccaggctgaattgtggctggtattggcgatataagcattcgttagctgtttaaattgtgtcttttgtctttgattaagcgtcattggaaaggctgtcatgagaaaactcttttgttcaaacgtttctctcctgtaatatgaataacctggtggcatattaatcttggatacttggtcaactgcaaacttgaagattcattttcatgcaatcaatggagagcctagcgcaattagaggtgttgtgtgaaaagctttataattctagagactcggctgagcgagcgcatgcagaaagcaccctcaagtgcttctcagagaacagcgagtacatttcgcagtgccaatacatattggacaatgcctcaactccatatgccctgatgctggcgagttcaagcttgctgaagcaagtttctgaccgcagtctttctttgatgctccgtctcgatatacggaattatgtcataaactatcttggcacaagggggcctaaattgcagaactttgtcattgtgtccttaattcagctggtctgtcgaattacaaaatttggatggtttgatgatgacagattcagagagactgtcaaggaagcgactgattttttaggtcttgcttcccaggatcattatttcataggcttgaagatactaaacaatctcgttacagaaatgaatcagccaaaccccgcgatgcctttgacgcttcataggaaaattgcgggttcattcaaggatcagtttcttctgcagatcttccaaatttcgttaacctcactaaaccaactgaagagtgaagctccggatgactttggacatattcctcttgaccttgccttgaagtgcttatcttttgactttgttggttctccggtggacgaaagctctgaagaatttggaacagtgcagcttcctgcatcttggaggcctcttcttcaagatccttccacactccaaatcttttttgattactacaaagtcaatgacatacgggtttcaaaagaggccttggagtgtctggttcgacttgcttctgtcaggcgcagtatttttgtggaggatcctgcaaggtcccagtttctttctcatctgatgctaggcaccaaggagatacttctaactggccaaggacttgctgatcatgacaattaccatgagttctgccgtcttttgggacgtttcaaagtgaattaccagctggcagagcttttgaatgttgagttttatggtgagtggattggtctagtagctgaatttacaactagatccttgttgtcatggcagtgggccagcaacagtgtctactaccttctaagtctttggtcaaggctggtgacatccgtgccttacttgaaaggtgaaacaccaagtcttcttgatgaaactgttcccaagatcacagaaggttttatcacttccagaattaattctgttcaggccatccttgctgacaactcactggaaaatcctttggatagtgtggaagttctccaggaccagctggagtttcttcctttcctttgcagattccagtaccaaagtagtagtctgtacatcataaacatcatggaacctcttctgcaagcttatacggaaaggtccagattacccgctcctggtgatgctgatgagctgtctgtcattgaaggccaaattgcatggatggttcacataattgcggccattgtcaaagttaggcaggtaacaggtgttagtcaagaaacacaagagttgattgacgcagaactctctgcccgtgtactacagttgataagtgtgactgatacaggagcgcacacacagagatatcaagaattaagtaagcaaaggcttgaccgagctattctcatttttgtacaaagtttcagaaggtcatatgtaggagaccaagctatgcattcttcaaagcagttgtatggaagattgtctgagcttctaggacttaatgaccatttaattctactcaatgtgattgttggcaaaattgctacaaatatgaagtgctatgctgagagtgaggatgttattgatcatactctgtccctgttccttgacttggcaactggctatatgactggaaagctgctgcttaagctggagagtgtaaaattcatcattgcaaatcattctccagagaatttcccatttcttgcagaatacaaatgttcacgtagtagaactacgttctattacatccttggctccttagtcttcatggaagatagccctgtgaaattcaggactttcatggaaccacttcaacaggttgcattaaacctggaggcaactcctgatgctgcttttcggactgatgtcgctaagcgtgcatttgttggttggatgagagatctacgtggcatagctatggcaaccaacagccgcaagacatatggcctcctatttgactggttgtatccatctcgcatgccacttctgctgagagccatctcactttgcactgatgaaccagaggtcaccacacccttgctcaagttcacgtatgaatttgttttgaacaaagctcaaagactgacatttgattcatcatcaccaaatgggatccttttattccgagaggttagcaagataatcgtggcttacgggtcacgaattctattgcttcctaatggcacagacatttatggaagtaaatacaaaggcatatggatctcactgactgttctttcaagggctttgtgtgggaattatgtcaattttggcgtatttgagctctatggtgacagagcacttgctgatgcccttgatatatctctgaagatgaccctctcagttccattatctgatatattggcattcaaaaagctgtcgaaagcgtactttgggtatatggaagttctgttcaacaaccatatcaagtttgttctcaatttggacacaaacacattcatacatattgtcagctcactcgaatctggcttaaaaggtctagatgcagggatatcatcacagtgcgcttctgccatcgacaacctggcagccttttactttaataacattacatctggtgactcacctccatcaccagcttcagtaaatctcgcacgacatattggagagtgtcccaatttgtttcctcagatactgaagactctttttgagatcatgctctttgaggatgctggtaatcagtggagtctgagtcgaccaatactgagcctgataatgaccagtgaacagatgttcagtgaactcagagcgcacatattagcatcacagactgtggaccagcaacaacgcctttcacagtgcttcgataagctgatgacggatgtcaataggaacttggaacctaagaatcgtgacagattcactcaaaacctgacagcatttagacgtgattttcgactgaagtaacagctccttggtaccagctatcagtttgaaggtgttcctgcatgatgtaaatactccagttaccttcttttttggaaccacctttctgtgggttgagaaaagaagagcttgtccttaggtttgccttggattggctgaagatggtcttgttgatgcatgtggtagtgaaagcagctgtaaatttcatagcatgtcattttaatcagaatggtgaaaggtggagattgtttcttttgttttttattttatattgcatccctttagcatgtacagcaaaattggtgctagaacaggggtggctgtttgcccaatttgttaagtgggaggcagtcatctcagatataattcatttgttaagaagtcaacgaggtaaaggatgtaaatgattccgttggctttgctgaatatgaaagttgaacagtaagaaggatggctcagttgcatccgctgtgcagattgaactgttaatgataacaatttcttttttttttgtctctgtttggtattgatactctgcag

SEQ ID NO: 58702 - DNA, 4100 bp, Zea Mays
gaaaagatagctgtagacatccccggaagaaatggtcccgtgcgtgcgctcactcctttgctgtttttcttctctccgttcaccttgcgtgcgcgacatctagggcgaccgccgccgccgccgccgccctacgcccagcagcccaggtcttcgtcgcgccctttgccggctacgagcacccaccacaccagatcactgtaatccaggctgaattgtggctggtattggcgatataagcattcgttagctgtttaaattgtgtcttttgtctttgattaagcgtcattggaaaggctgtcatgagaaaactcttttgttcaaacgtttctctcctgtaatatgaatcattcatgcaaattcgtggatattaattcagaacctggtggcatattaatcttggatacttggtcaactgcaaacttgaagattcattttcatgcaatcaatggagagcctagcgcaattagaggtgttgtgtgaaaagctttataattctagagactcggctgagcgagcgcatgcagaaagcaccctcaagtgcttctcagagaacagcgagtacatttcgcagtgccaatacatattggacaatgcctcaactccatatgccctgatgctggcgagttcaagcttgctgaagcaagtttctgaccgcagtctttctttgatgctccgtctcgatatacggaattatgtcataaactatcttggcacaagggggcctaaattgcagaactttgtcattgtgtccttaattcagctggtctgtcgaattacaaaatttggatggtttgatgatgacagattcagagagactgtcaaggaagcgactgattttttaggtcttgcttcccaggatcattatttcataggcttgaagatactaaacaatctcgttacagaaatgaatcagccaaaccccgcgatgcctttgacgcttcataggaaaattgcgggttcattcaaggatcagtttcttctgcagatcttccaaatttcgttaacctcactaaaccaactgaagagtgaagctccggatgactttggacatattcctcttgaccttgccttgaagtgcttatcttttgactttgttggttctccggtggacgaaagctctgaagaatttggaacagtgcagcttcctgcatcttggaggcctcttcttcaagatccttccacactccaaatcttttttgattactacaaagtcaatgacatacgggtttcaaaagaggccttggagtgtctggttcgacttgcttctgtcaggcgcagtatttttgtggaggatcctgcaaggtcccagtttctttctcatctgatgctaggcaccaaggagatacttctaactggccaaggacttgctgatcatgacaattaccatgagttctgccgtcttttgggacgtttcaaagtgaattaccagctggcagagcttttgaatgttgagttttatggtgagtggattggtctagtagctgaatttacaactagatccttgttgtcatggcagtgggccagcaacagtgtctactaccttctaagtctttggtcaaggctggtgacatccgtgccttacttgaaaggtgaaacaccaagtcttcttgatgaaactgttcccaagatcacagaaggttttatcacttccagaattaattctgttcaggccatccttgctgacaactcactggaaaatcctttggatagtgtggaagttctccaggaccagctggagtttcttcctttcctttgcagattccagtaccaaagtagtagtctgtacatcataaacatcatggaacctcttctgcaagcttatacggaaaggtccagattacccgctcctggtgatgctgatgagctgtctgtcattgaaggccaaattgcatggatggttcacataattgcggccattgtcaaagttaggcagtcaagaaacacaagagttgattgacgcagaactctctgcccgtgtactacagttgataagtgtgactgatacaggagcgcacacacagagatatcaagaattaagtaagcaaaggcttgaccgagctattctcatttttgtacaaagtttcagaaggtcatatgtaggagaccaagctatgcattcttcaaagcagttgtatggaagattgtctgagcttctaggacttaatgaccatttaattctactcaatgtgattgttggcaaaattgctacaaatatgaagtgctatgctgagagtgaggatgttattgatcatactctgtccctgttccttgacttggcaactggctatatgactggaaagctgctgcttaagctggagagtgtaaaattcatcattgcaaatcattctccagagaatttcccatttcttgcagaatacaaatgttcacgtagtagaactacgttctattacatccttggctccttagtcttcatggaagatagccctgtgaaattcaggactttcatggaaccacttcaacaggttgcattaaacctggaggcaactcctgatgctgcttttcggactgatgtcgctaagcgtgcatttgttggttggatgagagatctacgtggcatagctatggcaaccaacagccgcaagacatatggcctcctatttgactggttgtatccatctcgcatgccacttctgctgagagccatctcactttgcactgatgaaccagaggtcaccacacccttgctcaagttcacgtatgaatttgttttgaacaaagctcaaagactgacatttgattcatcatcaccaaatgggatccttttattccgagaggttagcaagataatcgtggcttacgggtcacgaattctattgcttcctaatggcacagacatttatggaagtaaatacaaaggcatatggatctcactgactgttctttcaagggctttgtgtgggaattatgtcaattttggcgtatttgagctctatggtgacagagcacttgctgatgcccttgatatatctctgaagatgaccctctcagttccattatctgatatattggcattcaaaaagctgtcgaaagcgtactttgggtatatggaagttctgttcaacaaccatatcaagtttgttctcaatttggacacaaacacattcatacatattgtcagctcactcgaatctggcttaaaaggtctagatgcagggatatcatcacagtgcgcttctgccatcgacaacctggcagccttttactttaataacattacatctggtgactcacctccatcaccagcttcagtaaatctcgcacgacatattggagagtgtcccaatttgtttcctcagatactgaagactctttttgagatcatgctctttgaggatgctggtaatcagtggagtctgagtcgaccaatactgagcctgataatgaccagtgaacagatgttcagtgaactcagagcgcacatattagcatcacagcaacaacgcctttcacagtgcttcgataagctgatgacggatgtcaataggaacttggaacctaagaatcgtgacagattcactcaaaacctgacagcatttagacgtgattttcgactgaagtaacagctccttggtaccagctatcagtttgaaggtgttcctgcatgatgtaaatactccagttaccttcttttttggaaccacctttctgtgggttgagaaaagaagagcttgtccttaggtttgccttggattggctgaagatggtcttgttgatgcatgtggtagtgaaagcagctgtaaatttcatagcatgtcattttaatcagaatggtgaaaggtggagattgtttcttttgttttttattttatattgcatccctttagcatgtacagcaaaattggtgctagaacaggggtggctgtttgcccaatttgttaagtgggaggcagtcatctcagatataattcatttgttaagaagtcaacgaggtaaaggatgtaaatgattccgttggctttgctgaatatgaaagttgaacagtaagaaggatggctcagttgcatccgctgtgcagattgaactgttaatgataacaatttcttttttttttgtctctgtttggtattgatactctgcag

SEQ ID NO: 58703 - DNA, 3985 bp, Zea Mays
gaaaagatagctgtagacatccccggaagaaatggtcccgtgcgtgcgctcactcctttgctgtttttcttctctccgttcaccttgcgtgcgcgacatctagggcgaccgccgccgccgccgccgccctacgcccagcagcccaggtcttcgtcgcgccctttgccggctacgagcacccaccacaccagatcactgtaatccaggctgaattgtggctggtattggcgatataagcattcgttagctgtttaaattgtgtcttttgtctttgattaagcgtcattggaaaggctgtcatgagaaaactcttttgttcaaacgtttctctcctgtaatatgaatgtactgtgacaatccttcatcctatgctagaatcacatattttagcttctaagctccttacagttctttacaagtttcttattcaaccgaatacctaatgcattaattcggtgcttgtgacaagcattcatgcaaattcgtggatattaattcagaacctggtggcatattaatcttggatacttggtcaactgcaaacttgaagattcattttcatgcaatcaatggagagcctagcgcaattagaggtgttgtgtgaaaagctttataattctagagactcggctgagcgagcgcatgcagaaagcaccctcaagtgcttctcagagaacagcgagtacatttcgcagtgccaatacatattggacaatgcctcaactccatatgccctgatgctggcgagttcaagcttgctgaagcaagtttctgaccgcagtctttctttgatgctccgtctcgatatacggaattatgtcataaactatcttggcacaagggggcctaaattgcagaactttgtcattgtgtccttaattcagctggtctgtcgaattacaaaatttggatggtttgatgatgacagattcagagagactgtcaaggaagcgactgattttttaggtcttgcttcccaggatcattatttcataggcttgaagatactaaacaatctcgttacagaaatgaatcagccaaaccccgcgatgcctttgacgcttcataggaaaattgcgggttcattcaaggatcagtttcttctgcagatcttccaaatttcgttaacctcactaaaccaactgaagagtgaagctccggatgactttggacatattcctcttgaccttgccttgaagtgcttatcttttgactttgttggttctccggtggacgaaagctctgaagaatttggaacagtgcagcttcctgcatcttggaggcctcttcttcaagatccttccacactccaaatcttttttgattactacaaagtcaatgacatacgggtttcaaaagaggccttggagtgtctggttcgacttgcttctgtcaggcgcagtatttttgtggaggatcctgcaaggtcccagtttctttctcatctgatgctaggcaccaaggagatacttctaactggccaaggacttgctgatcatgacaattaccatgagttctgccgtcttttgggacgtttcaaagtgaattaccagctggcagagcttttgaatgttgagttttatggtgagtggattggtctagtagctgaatttacaactagatccttgttgtcatggcagtgggccagcaacagtgtctactaccttctaagtctttggtcaaggctggtgacatccgtgccttacttgaaaggtgaaacaccaagtcttcttgatgaaactgttcccaagatcacagaaggttttatcacttccagaattaattctgttcaggccatccttgctgacaactcactggaaaatcctttggatagtgtggaagttctccaggaccagctggagtttcttcctttcctttgcagattccagtaccaaagtagtagtctgtacatcataaacatcatggaacctcttctgcaagcttatacggaaaggtccagattacccgctcctggtgatgctgatgagctgtctgtcattgaaggccaaattgcatggatggttcacataattgcggccattgtcaaagttaggcaggtaacaggtgttagtcaagaaacacaagagttgattgacgcagaactctctgcccgtgtactacagttgataagtgtgactgatacaggagcgcacacacagagatatcaagaattaagtaagcaaaggcttgaccgagctattctcatttttgtacaaagtttcagaaggtcatatgtaggagaccaagctatgcattcttcaaagttgtatggaagattgtctgagcttctaggacttaatgaccatttaattctactcaatgtgattgttggcaaaattgctacaaatatgaagtgctatgctgagagtgaggatgttattgatcatactctgtccctgttccttgacttggcaactggctatatgactggaaagctgctgcttaagctggagagtgtaaaattcatcattgcaaatcattctccagagaatttcccatttcttgcagaatacaaatgttcacgtagtagaactacgttctattacatccttggctccttagtcttcatggaagatagccctgtgaaattcaggactttcatggaaccacttcaacaggttgcattaaacctggaggcaactcctgatgctgcttttcggactgatgtcgctaagcgtgcatttgttggttggatgagagatctacgtggcatagctatggcaaccaacagccgcaagacatatggcctcctatttgactggttgtatccatctcgcatgccacttctgctgagagccatctcactttgcactgatgaaccagaggtcaccacacccttgctcaagttcacgtatgaatttgttttgaacaaagctcaaagactgacatttgattcatcatcaccaaatgggatccttttattccgagaggttagcaagataatcgtggcttacgggtcacgaattctattgcttcctaatggcacagacatttatggaagtaaatacaaaggcatatggatctcactgactgttctttcaagggctttgtgtgggaattatgtcaattttggcgtatttgagctctatggtgacagagcacttgctgatgcccttgatatatctctgaagatgaccctctcagttccattatctgatatattggcattcaaaaagctgtcgaaagcgtactttgggtatatggaagttctgttcaacaaccatatcaagtttgttctcaatttggacacaaacacattcatacatattgtcagctcactcgaatctggcttaaaaggtctagatgcagggatatcatcacagtgcgcttctgccatcgacaacctggcagccttttactttaataacattacatctggtgactcacctccatcaccagcttcagtaaatctcgcacgacatattggagagtgtcccaatttgtttcctcagatactgaagactctttttgagatcatgctctttgaggatgctggtaatcagtggagtctgagtcgaccaatactgagcctgataatgaccagtgaacagatgttcagtgaactcagagcgcacatattagcatcacaggttgtgtggtgcaattgcaatgcggcactgcgcattgtagctgcttgctggtaggagatagtggtcttgttgcttgccggagcttgtactggcctacctggaggtgcagacatgcaatgcagcagagaatttcttgagcctagggccccagctgtggaggtttcatattgccattcctgtgtttacgagtaatagtcagatcgtcatgttttgtttgtttgattatgttgatttcttgtttttacgatgctctttaaaccccatgcaatctgtttgctgttgaccggcgggtggtggtggtgtaaaaacagatcacccagtcaattaggtcttttgatgtttgcacttattcgacgagacagctgtgtttggatcagcttctttggagattgtgg

SEQ ID NO: 58704 - DNA, 3709 bp, Zea Mays
gaaaagatagctgtagacatccccggaagaaatggtcccgtgcgtgcgctcactcctttgctgtttttcttctctccgttcaccttgcgtgcgcgacatctagggcgaccgccgccgccgccgccgccctacgcccagcagcccaggtcttcgtcgcgccctttgccggctacgagcacccaccacaccagatcactgtaatccaggctgaattgtggctgaacctggtggcatattaatcttggatacttggtcaactgcaaacttgaagattcattttcatgcaatcaatggagagcctagcgcaattagaggtgttgtgtgaaaagctttataattctagagactcggctgagcgagcgcatgcagaaagcaccctcaagtgcttctcagagaacagcgagtacatttcgcagtgccaatacatattggacaatgcctcaactccatatgccctgatgctggcgagttcaagcttgctgaagcaagtttctgaccgcagtctttctttgatgctccgtctcgatatacggaattatgtcataaactatcttggcacaagggggcctaaattgcagaactttgtcattgtgtccttaattcagctggtctgtcgaattacaaaatttggatggtttgatgatgacagattcagagagactgtcaaggaagcgactgattttttaggtcttgcttcccaggatcattatttcataggcttgaagatactaaacaatctcgttacagaaatgaatcagccaaaccccgcgatgcctttgacgcttcataggaaaattgcgggttcattcaaggatcagtttcttctgcagatcttccaaatttcgttaacctcactaaaccaactgaagagtgaagctccggatgactttggacatattcctcttgaccttgccttgaagtgcttatcttttgactttgttggttctccggtggacgaaagctctgaagaatttggaacagtgcagcttcctgcatcttggaggcctcttcttcaagatccttccacactccaaatcttttttgattactacaaagtcaatgacatacgggtttcaaaagaggccttggagtgtctggttcgacttgcttctgtcaggcgcagtatttttgtggaggatcctgcaaggtcccagtttctttctcatctgatgctaggcaccaaggagatacttctaactggccaaggacttgctgatcatgacaattaccatgagttctgccgtcttttgggacgtttcaaagtgaattaccagctggcagagcttttgaatgttgagttttatggtgagtggattggtctagtagctgaatttacaactagatccttgttgtcatggcagtgggccagcaacagtgtctactaccttctaagtctttggtcaaggctggtgacatccgtgccttacttgaaaggtgaaacaccaagtcttcttgatgaaactgttcccaagatcacagaaggttttatcacttccagaattaattctgttcaggccatccttgctgacaactcactggaaaatcctttggatagtgtggaagttctccaggaccagctggagtttcttcctttcctttgcagattccagtaccaaagtagtagtctgtacatcataaacatcatggaacctcttctgcaagcttatacggaaaggtccagattacccgctcctggtgatgctgatgagctgtctgtcattgaaggccaaattgcatggatggttcacataattgcggccattgtcaaagttaggcaggtaacaggtgttagtcaagaaacacaagagttgattgacgcagaactctctgcccgtgtactacagttgataagtgtgactgatacaggagcgcacacacagagatatcaagaattaagtaagcaaaggcttgaccgagctattctcatttttgtacaaagtttcagaaggtcatatgtaggagaccaagctatgcattcttcaaagcagttgtatggaagattgtctgagcttctaggacttaatgaccatttaattctactcaatgtgattgttggcaaaattgctacaaatatgaagtgctatgctgagagtgaggatgttattgatcatactctgtccctgttccttgacttggcaactggctatatgactggaaagctgctgcttaagctggagagtgtaaaattcatcattgcaaatcattctccagagaatttcccatttcttgcagaatacaaatgttcacgtagtagaactacgttctattacatccttggctccttagtcttcatggaagatagccctgtgaaattcaggactttcatggaaccacttcaacaggttgcattaaacctggaggcaactcctgatgctgcttttcggactgatgtcgctaagcgtgcatttgttggttggatgagagatctacgtggcatagctatggcaaccaacagccgcaagacatatggcctcctatttgactggttgtatccatctcgcatgccacttctgctgagagccatctcactttgcactgatgaaccagaggtcaccacacccttgctcaagttcacgtatgaatttgttttgaacaaagctcaaagactgacatttgattcatcatcaccaaatgggatccttttattccgagaggttagcaagataatcgtggcttacgggtcacgaattctattgcttcctaatggcacagacatttatggaagtaaatacaaaggcatatggatctcactgactgttctttcaagggctttgtgtgggaattatgtcaattttggcgtatttgagctctatggtgacagagcacttgctgatgcccttgatatatctctgaagatgaccctctcagttccattatctgatatattggcattcaaaaagctgtcgaaagcgtactttgggtatatggaagttctgttcaacaaccatatcaagtttgttctcaatttggacacaaacacattcatacatattgtcagctcactcgaatctggcttaaaaggtctagatgcagggatatcatcacagtgcgcttctgccatcgacaacctggcagccttttactttaataacattacatctggtgactcacctccatcaccagcttcagtaaatctcgcacgacatattggagagtgtcccaatttgtttcctcagatactgaagactctttttgagatcatgctctttgaggatgctggtaatcagtggagtctgagtcgaccaatactgagcctgataatgaccagtgaacagatgttcagtgaactcagagcgcacatattagcatcacaggttgtgtggtgcaattgcaatgcggcactgcgcattgtagctgcttgctggtaggagatagtggtcttgttgcttgccggagcttgtactggcctacctggaggtgcagacatgcaatgcagcagagaatttcttgagcctagggccccagctgtggaggtttcatattgccattcctgtgtttacgagtaatagtcagatcgtcatgttttgtttgtttgattatgttgatttcttgtttttacgatgctctttaaaccccatgcaatctgtttgctgttgaccggcgggtggtggtggtgtaaaaacagatcacccagtcaattaggtcttttgatgtttgcacttattcgacgagacagctgtgtttggatcagcttctttggagattgtgg

SEQ ID NO: 58705 - DNA, 3955 bp, Zea Mays
cgtgcgctcactcctttgctgtttttcttctctccgttcaccttgcgtgcgcgacatctagggcgaccgccgccgccgccgccgccctacgcccagcagcccaggtcttcgtcgcgccctttgccggctacgagcacccaccacaccagaacctggtggcatattaatcttggatacttggtcaactgcaaacttgaagattcattttcatgcaatcaatggagagcctagcgcaattagaggtgttgtgtgaaaagctttataattctagagactcggctgagcgagcgcatgcagaaagcaccctcaagtgcttctcagagaacagcgagtacatttcgcagtgccaatacatattggacaatgcctcaactccatatgccctgatgctggcgagttcaagcttgctgaagcaagtttctgaccgcagtctttctttgatgctccgtctcgatatacggaattatgtcataaactatcttggcacaagggggcctaaattgcagaactttgtcattgtgtccttaattcagctggtctgtcgaattacaaaatttggatggtttgatgatgacagattcagagagactgtcaaggaagcgactgattttttaggtcttgcttcccaggatcattatttcataggcttgaagatactaaacaatctcgttacagaaatgaatcagccaaaccccgcgatgcctttgacgcttcataggaaaattgcgggttcattcaaggatcagtttcttctgcagatcttccaaatttcgttaacctcactaaaccaactgaagagtgaagctccggatgactttggacatattcctcttgaccttgccttgaagtgcttatcttttgactttgttggttctccggtggacgaaagctctgaagaatttggaacagtgcagcttcctgcatcttggaggcctcttcttcaagatccttccacactccaaatcttttttgattactacaaagtcaatgacatacgggtttcaaaagaggccttggagtgtctggttcgacttgcttctgtcaggcgcagtatttttgtggaggatcctgcaaggtcccagtttctttctcatctgatgctaggcaccaaggagatacttctaactggccaaggacttgctgatcatgacaattaccatgagttctgccgtcttttgggacgtttcaaagtgaattaccagctggcagagcttttgaatgttgagttttatggtgagtggattggtctagtagctgaatttacaactagatccttgttgtcatggcagtgggccagcaacagtgtctactaccttctaagtctttggtcaaggctggtgacatccgtgccttacttgaaaggtgaaacaccaagtcttcttgatgaaactgttcccaagatcacagaaggttttatcacttccagaattaattctgttcaggccatccttgctgacaactcactggaaaatcctttggatagtgtggaagttctccaggaccagctggagtttcttcctttcctttgcagattccagtaccaaagtagtagtctgtacatcataaacatcatggaacctcttctgcaagcttatacggaaaggtccagattacccgctcctggtgatgctgatgagctgtctgtcattgaaggccaaattgcatggatggttcacataattgcggccattgtcaaagttaggcagtcaagaaacacaagagttgattgacgcagaactctctgcccgtgtactacagttgataagtgtgactgatacaggagcgcacacacagagatatcaagaattaagtaagcaaaggcttgaccgagctattctcatttttgtacaaagtttcagaaggtcatatgtaggagaccaagctatgcattcttcaaagcagttgtatggaagattgtctgagcttctaggacttaatgaccatttaattctactcaatgtgattgttggcaaaattgctacaaatatgaagtgctatgctgagagtgaggatgttattgatcatactctgtccctgttccttgacttggcaactgggtaaagttgtgactatgtttttccagttttttttctcatttatgcgtgatgactgttcatattttttttcttgccaagtcagctatatgactggaaagctgctgcttaagctggagagtgtaaaattcatcattgcaaatcattctccagagaatttcccatttcttgcagaatacaaatgttcacgtagtagaactacgttctattacatccttggctccttagtcttcatggaagatagccctgtgaaattcaggactttcatggaaccacttcaacaggttgcattaaacctggaggcaactcctgatgctgcttttcggactgatgtcgctaagcgtgcatttgttggttggatgagagatctacgtggcatagctatggcaaccaacagccgcaagacatatggcctcctatttgactggttgtatccatctcgcatgccacttctgctgagagccatctcactttgcactgatgaaccagaggtcaccacacccttgctcaagttcacgtatgaatttgttttgaacaaagctcaaagactgacatttgattcatcatcaccaaatgggatccttttattccgagaggttagcaagataatcgtggcttacgggtcacgaattctattgcttcctaatggcacagacatttatggaagtaaatacaaaggcatatggatctcactgactgttctttcaagggctttgtgtgggaattatgtcaattttggcgtatttgagctctatggtgacagagcacttgctgatgcccttgatatatctctgaagatgaccctctcagttccattatctgatatattggcattcaaaaagctgtcgaaagcgtactttgggtatatggaagttctgttcaacaaccatatcaagtttgttctcaatttggacacaaacacattcatacatattgtcagctcactcgaatctggcttaaaaggtctagatgcagggatatcatcacagtgcgcttctgccatcgacaacctggcagccttttactttaataacattacatctggtgactcacctccatcaccagcttcagtaaatctcgcacgacatattggagagtgtcccaatttgtttcctcagatactgaagactctttttgagatcatgctctttgaggatgctggtaatcagtggagtctgagtcgaccaatactgagcctgataatgaccagtgaacagatgttcagtgaactcagagcgcacatattagcatcacagcaacaacgcctttcacagtgcttcgataagctgatgacggatgtcaataggaacttggaacctaagaatcgtgacagattcactcaaaacctgacagcatttagacgtgattttcgactgaagtaacagctccttggtaccagctatcagtttgaaggtgttcctgcatgatgtaaatactccagttaccttcttttttggaaccacctttctgtgggttgagaaaagaagagcttgtccttaggtttgccttggattggctgaagatggtcttgttgatgcatgtggtagtgaaagcagctgtaaatttcatagcatgtcattttaatcagaatggtgaaaggtggagattgtttcttttgttttttattttatattgcatccctttagcatgtacagcaaaattggtgctagaacaggggtggctgtttgcccaatttgttaagtgggaggcagtcatctcagatataattcatttgttaagaagtcaacgaggtaaaggatgtaaatgattccgttggctttgctgaatatgaaagttgaacagtaagaaggatggctcagttgcatccgctgtgcagattgaactgttaatgataacaatttcttttttttttgtctctgtttggtattgatactctgcag

SEQ ID NO: 58706 - DNA, 3805 bp, Zea Mays
agcagcccaggtcttcgtcgcgccctttgccggctacgagcacccaccacaccagaacctggtggcatattaatcttggatacttggtcaactgcaaacttgaagattcattttcatgcaatcaatggagagcctagcgcaattagaggtgttgtgtgaaaagctttataattctagagactcggctgagcgagcgcatgcagaaagcaccctcaagtgcttctcagagaacagcgagtacatttcgcagtgccaatacatattggacaatgcctcaactccatatgccctgatgctggcgagttcaagcttgctgaagcaagtttctgaccgcagtctttctttgatgctccgtctcgatatacggaattatgtcataaactatcttggcacaagggggcctaaattgcagaactttgtcattgtgtccttaattcagctggtctgtcgaattacaaaatttggatggtttgatgatgacagattcagagagactgtcaaggaagcgactgattttttaggtcttgcttcccaggatcattatttcataggcttgaagatactaaacaatctcgttacagaaatgaatcagccaaaccccgcgatgcctttgacgcttcataggaaaattgcgggttcattcaaggatcagtttcttctgcagatcttccaaatttcgttaacctcactaaaccaactgaagagtgaagctccggatgactttggacatattcctcttgaccttgccttgaagtgcttatcttttgactttgttggttctccggtggacgaaagctctgaagaatttggaacagtgcagcttcctgcatcttggaggcctcttcttcaagatccttccacactccaaatcttttttgattactacaaagtcaatgacatacgggtttcaaaagaggccttggagtgtctggttcgacttgcttctgtcaggcgcagtatttttgtggaggatcctgcaaggtcccagtttctttctcatctgatgctaggcaccaaggagatacttctaactggccaaggacttgctgatcatgacaattaccatgagttctgccgtcttttgggacgtttcaaagtgaattaccagctggcagagcttttgaatgttgagttttatggtgagtggattggtctagtagctgaatttacaactagatccttgttgtcatggcagtgggccagcaacagtgtctactaccttctaagtctttggtcaaggctggtgacatccgtgccttacttgaaaggtgaaacaccaagtcttcttgatgaaactgttcccaagatcacagaaggttttatcacttccagaattaattctgttcaggccatccttgctgacaactcactggaaaatcctttggatagtgtggaagttctccaggaccagctggagtttcttcctttcctttgcagattccagtaccaaagtagtagtctgtacatcataaacatcatggaacctcttctgcaagcttatacggaaaggtccagattacccgctcctggtgatgctgatgagctgtctgtcattgaaggccaaattgcatggatggttcacataattgcggccattgtcaaagttaggcaggtaacaggtgttagtcaagaaacacaagagttgattgacgcagaactctctgcccgtgtactacagttgataagtgtgactgatacaggagcgcacacacagagatatcaagaattaagtaagcaaaggcttgaccgagctattctcatttttgtacaaagtttcagaaggtcatatgtaggagaccaagctatgcattcttcaaagcagttgtatggaagattgtctgagcttctaggacttaatgaccatttaattctactcaatgtgattgttggcaaaattgctacaaatatgaagtgctatgctgagagtgaggatgttattgatcatactctgtccctgttccttgacttggcaactggctatatgactggaaagctgctgcttaagctggagagtgtaaaattcatcattgcaaatcattctccagagaatttcccatttcttgcagaatacaaatgttcacgtagtagaactacgttctattacatccttggctccttagtcttcatggaagatagccctgtgaaattcaggactttcatggaaccacttcaacaggttgcattaaacctggaggcaactcctgatgctgcttttcggactgatgtcgctaagcgtgcatttgttggttggatgagagatctacgtggcatagctatggcaaccaacagccgcaagacatatggcctcctatttgactggttgtatccatctcgcatgccacttctgctgagagccatctcactttgcactgatgaaccagaggtcaccacacccttgctcaagttcacgtatgaatttgttttgaacaaagctcaaagactgacatttgattcatcatcaccaaatgggatccttttattccgagaggttagcaagataatcgtggcttacgggtcacgaattctattgcttcctaatggcacagacatttatggaagtaaatacaaaggcatatggatctcactgactgttctttcaagggctttgtgtgggaattatgtcaattttggcgtatttgagctctatggtgacagagcacttgctgatgcccttgatatatctctgaagatgaccctctcagttccattatctgatatattggcattcaaaaagctgtcgaaagcgtactttgggtatatggaagttctgttcaacaaccatatcaagtttgttctcaatttggacacaaacacattcatacatattgtcagctcactcgaatctggcttaaaaggtctagatgcagggatatcatcacagtgcgcttctgccatcgacaacctggcagccttttactttaataacattacatctggtgactcacctccatcaccagcttcagtaaatctcgcacgacatattggagagtgtcccaatttgtttcctcagatactgaagactctttttgagatcatgctctttgaggatgctggtaatcagtggagtctgagtcgaccaatactgagcctgataatgaccagtgaacagatgttcagtgaactcagagcgcacatattagcatcacagactgtggaccagcaacaacgcctttcacagtgcttcgataagctgatgacggatgtcaataggaacttggaacctaagaatcgtgacagattcactcaaaacctgacagcatttagacgtgattttcgactgaagtaacagctccttggtaccagctatcagtttgaaggtgttcctgcatgatgtaaatactccagttaccttcttttttggaaccacctttctgtgggttgagaaaagaagagcttgtccttaggtttgccttggattggctgaagatggtcttgttgatgcatgtggtagtgaaagcagctgtaaatttcatagcatgtcattttaatcagaatggtgaaaggtggagattgtttcttttgttttttattttatattgcatccctttagcatgtacagcaaaattggtgctagaacaggggtggctgtttgcccaatttgttaagtgggaggcagtcatctcagatataattcatttgttaagaagtcaacgaggtaaaggatgtaaatgattccgttggctttgctgaatatgaaagttgaacagtaagaaggatggctcagttgcatccgctgtgcagattgaactgttaatgataacaatttcttttttttttgtctctgtttggtattgatactctgcag

SEQ ID NO: 58707 - DNA, 1236 bp, Zea Mays
aagatgttcaccagcagcaaagggcagcaaggtgtgccacgtcggcagaaaaccccctcactcacatctcatcctgaattcctggcactatcccctaccagccaaccatcgcaagatgtttgtttccattccatcggtggcacgagacaggagacgccaaggccatagctagagcctagagcagcagcagaggcttgacctgaagctccacccgccatggcattcacgcccgctacggcctgctgcaaggcttccctggcgctggcaccgcgggcgtcgccccgcggcccggcggcctgcgcgcaggcggcgctcctctgcacgccctccacctccgtgttccgcggcctccgggcgcccgcatccgccgcgccggccccgcgccggcgccgctcggcggcgtccacgggcatagtctgcggcaaggtacgtggcctcgggaatggcgtgcgtgcgtgcgggaatccgtgttccacacatggcggtgattggtttggtagccgtggtcgtctcctcgttgcaggtcgccaagggcagcgtgccgccgaacttcaccctcaaggaccagaacggcaagcccgtgtcgctgaacaagttcaagggcaagcccgtcgtggtttacttctaccccgccgacgagacgcccggatgcacaaagcagggactcgtacgagaagttcaagaaggccggggcggaggtgatcggcatcagcggcgacgacgcggcgtcgcacaaggcgttcgcgcagaagtaccggctgccgttcacgctgctgagcgacgaggggaaccgcgtgcgcaaggagtggggcgtcccctcggacctgttcgggacgctgccggggcgccagacgtacgtgctggacaagcagggcgtcgtgcagtacgtctacaacaaccagttccagcccgagaagcacatcggcgagacgctcaagatcctgcagaccctctgatccgatcaacctcctcactgttctgggccatgctctgcattcgtcgctgtaaaagtaccggactatgtagtagtgtagtgtatgtaaccaagagctgatgacctgatgttttgttccatccttcagtgagtctatctatcacacgattctggctcgtttgatcgaccagcatcttcctgtttgtcatggtcagtttcacttgtattacaactgtacttttggtcgacagtctcagatgttgtagctcgttcaacccaaaccggtcaggattgtgatcgat

SEQ ID NO: 58708 - DNA, 644 bp, Zea Mays
tcggcttatatgcatagtacttctttaaatgggccatgcggcccatttcctgcggtggcggcggcttgtgtgtgcaaactcctgtacggcgtctcacgcctcaccccaactcgctcccttccccgtgcttcccgccgtcgtggagaggtcacgcggctggttcccgccgcttccggacggttcggccttccagcttccccttgagttcaccacgttttgtgacggttccgagggaggaggatcagctgccgcgatgttcctcaggatctctcgtctcggggcgcggcttctgcgcgagtctggagcggagacgagagctggaaatttgctaagcagtccaggcattttgtatcaagctcatcttaaccagcattcgaccagagtgcggaatgtccttttctcaactgcaacaagtggtgatcaggatgaaagcagtcaggcaaaggataagtaagtgcatttgtgtcttgttcatggtttttaaagcggtaaggcgaggcaaggcgttggacctccgcctggacgcctaggcgacgccttaagaacagtgattatgtttcatcctctatatataactaaatttgaactccttggttgttttgtatcttggaaccaggtatcagattagcccagttccttctaac

SEQ ID NO: 58709 - DNA, 738 bp, Zea Mays
tcggcttatatgcatagtacttctttaaatgggccatgcggcccatttcctgcggtggcggcggcttgtgtgtgcaaactcctgtacggcgtctcacgcctcaccccaactcgctcccttccccgtgcttcccgccgtcgtggagaggtcacgcggctggttcccgccgcttccggacggttcggccttccagcttccccttgagttcaccacgttttgtgacgcaagctagctgaaccctactgattgctctcccagcgcacggtggttgttgcgctgattcgttgtcttgtgagctgttctagggttccgagggaggaggatcagctgccgcgatgttcctcaggatctctcgtctcggggcgcggcttctgcgcgagtctggagcggagacgagagctggaaatttgctaagcagtccaggcattttgtatcaagctcatcttaaccagcattcgaccagagtggtgacttctactcggaatgtccttttctcaactgcaacaagtggtgatcaggatgaaagcagtcaggcaaaggataagtaagtgcatttgtgtcttgttcatggtttttaaagcggtaaggcgaggcaaggcgttggacctccgcctggacgcctaggcgacgccttaagaacagtgattatgtttcatcctctatatataactaaatttgaactccttggttgttttgtatcttggaaccaggtatcagattagcccagttccttctaac

SEQ ID NO: 58710 - DNA, 342 bp, Zea Mays
atgcctaagttggcgacgacggtctccatgtacgatgaagagctgatcgtggtctccgtagctgaggaagacggcgataaccttttagctgtagaggtctactcaggatcagcagcagctgcctgctcctcatcaaggagctggtggtcagctagcaacaaacaattttacactggccccaagtgcaaggaacaagccaggaagaacgatctaggatccaaagagggacgaagacgcagcaggcagagctcagtagcaccaaatggccccaagtgcgtcgcagtgttcagcagccacttacctcgcacagcagcggatggatggaaaaggaatgtgaattga

SEQ ID NO: 58711 - DNA, 1558 bp, Zea Mays
aggaaagcccagataattacacactagcttcacggtgaaggcagtcggggtcacaattcacaactcccaacccaatccagcccagcaatcaacaattcccccggtcgttttcacttgacatcccccgtcccatagatcgccggcgatggctccggccgttgccgcggcggcgtcggcggcgatgaggcaggcactgcgggaccggcagatcctcgatgccgtgggcactggcgctgcggcgctctcgctggcaggctcctccttcatcgtgatctgctacctcctcttccgcgagctccgcaagttctccttcaagctcgtcttctacctagccgtctcggatatgttttgcagcttattcactatattgggggggccatcgaatgcattttactgctttgcacatgactacagtgctcatttcttctgtgtggcttcttttctatggacaaccaccatatcattcactctgcatcgcacagttgtaaaacacaaaactgatgttgaagaatttggatctattttccacttatatgtgtggggaacttcactatctaccactgtattacgttcgataggaagtgactacggaagaccaggcacctggtgctggattcagcagggaagcatggcaaaggcatgtgatcttttgtgttgttttagttttttccttgattattacacaaacattagtagtatgtgccacttcttcgagagttatgttaagtgaagttcggtttattacgttaaagacaatttttgtataagctcatctatgtttgaattctaagggagttttatacaatttatatggaatttccaacatatttttcttggactatgaaaagtcactatcctcagctagacaatgaatttaaactgaaattccaattttgtcaccagaatagaaattctttcactaaattgaccttacttgcaggtcctacatttaataaccttttatcttccactttggggtgccattttgtacaatgggtttacatactatgaagtaaaccgcatgctgaataatgcaacgcagatggctgctggcataagtgatcaatcaaatcagtctgacattagggcaggcaggaaggcatttaaccgatggggttattaccctctaattctaatcggttcatgggcgtttgcaactatcaatcgtctttatgactttgccaatccagggcacaggatagtctggctctcgtttcttgatgttgggttcgctggacttatgggcctattcaattccattgcttatgggctaaactcttctgtgcgccgagctattgcagagagaatcgacacgttcctacctgagagaataaaaaggagcctccctgctttgtcaaggctgaggagtcaacaggaaaatgaactcacttctcttatcgttgagggtaactgatatgtaatggaatttccatgcacacgaagccttttttttgtttatctgttcgttcttcaatctccaacaagggaatgcaacatcactgtaagagcagtgggttagtaacacgtcgaattggtccgacgaatctctagaaacgtc

SEQ ID NO: 58712 - DNA, 1312 bp, Zea Mays
aggaaagcccagataattacacactagcttcacggtgaaggcagtcggggtcacaattcacaactcccaacccaatccagcccagcaatcaacaattcccccggtcgttttcacttgacatcccccgtcccatagatcgccggcgatggctccggccgttgccgcggcggcgtcggcggcgatgaggcaggcactgcgggaccggcagatcctcgatgccgtgggcactggcgctgcggcgctctcgctggcaggctcctccttcatcgtgatctgctacctcctcttccgcgagctccgcaagttctccttcaagctcgtcttctacctagccgtctcggatatgttttgcagcttattcactatattgggcctaccagaatgaagatatgcagaatcagttatgcttattattcaattcatggccaaggggccatcgaatgcattttactgctttgcacatgactacagtgctcatttcttctgtgtggcttcttttctatggacaaccaccatatcattcactctgcatcgcacagttgtaaaacacaaaactgatgttgaagaatttggatctattttccacttatatgtgtggggaacttcactatctaccactgtattacgttcgataggaagtgactacggaagaccaggcacctggtgctggattcagcagggaagcatggcaaaggtcctacatttaataaccttttatcttccactttggggtgccattttgtacaatgggtttacatactatgaagtaaaccgcatgctgaataatgcaacgcagatggctgctggcataagtgatcaatcaaatcagtctgacattagggcaggcaggaaggcatttaaccgatggggttattaccctctaattctaatcggttcatgggcgtttgcaactatcaatcgtctttatgactttgccaatccagggcacaggatagtctggctctcgtttcttgatgttgggttcgctggacttatgggcctattcaattccattgcttatgggctaaactcttctgtgcgccgagctattgcagagagaatcgacacgttcctacctgagagaataaaaaggagcctccctgctttgtcaaggctgaggagtcaacaggaaaatgaactcacttctcttatcgttgagggtaactgatatgtaatggaatttccatgcacacgaagccttttttttgtttatctgttcgttcttcaatctccaacaagggaatgcaacatcactgtaagagcagtgggttagtaacacgtcgaattggtccgacgaatctctagaaacgtc

SEQ ID NO: 58713 - DNA, 1825 bp, Zea Mays
aggaaagcccagataattacacactagcttcacggtgaaggcagtcggggtcacaattcacaactcccaacccaatccagcccagcaatcaacaattcccccggtcgttttcacttgacatcccccgtcccatagatcgccggcgatggctccggccgttgccgcggcggcgtcggcggcgatgaggcaggcactgcgggaccggcagatcctcgatgccgtgggcactggcgctgcggcgctctcgctggcaggctcctccttcatcgtgatctgctacctcctcttccgcgagctccgcaagttctccttcaagctcgtcttctacctagccgtctcggatatgttttgcagcttattcactatattgggggggccatcgaatgcattttactgctttgcacatgactacagtgctcatttcttctgtgtggcttcttttctatggacaaccaccatatcattcactctgcatcgcacagttgtaaaacacaaaactgatgttgaagaatttggatctattttccacttatatgtgtggggaacttcactatctaccactgtattacgttcgataggaagtgactacggaagaccaggcacctggtgctggattcagcagggaagcatggcaaaggtcctacatttaataaccttttatcttccactttggggtgccattttgtacaatgggtttacatactatgaagtaaaccgcatgctgaataatgcaacgcagatggctgctggcataagtgatcaatcaaatcagtctgacattagggcaggcaggaaggcatttaaccgatggggttattaccctctaattctaatcggttcatgggcgtttgcaactatcaatcgtctttatgactttgccaatccagggcacaggatagtctggctctcgtttcttgatgttgggttcgctggacttatggtgagtctattaatgcttgtttttttatactaaattgctgaaatagcataccatgaacttttctataaaaactcaggctacctacatatggtgggcataatttatagtaaaggggcttgaataagaggcctccacattgcttcatttttttctcctgtccctgcaagtaattagctctgaatgagtgaatgggaaggctaaaggtctgaccactcttgtgcttttcttatggaaatgggtacatgaaatatatgtgtgtcttcaatccttcattatcataagcaatacttcctccaccttctagctttcttccagatgcaccaattataagtccatgataactataatgcacctttttgctttgttcttccatgcctacccctacttaaatgcacacatccatttatttttcctatattggatatgaagttattcatgtaagtgttttgtttgattgacaccaaactatattccatggttcgcttctctctctctctctctgtctctctctctctcttttttttttttgtgtgtgtgtgtggatattttgacgtttcctgttttatctagggcctattcaattccattgcttatgggctaaactcttctgtgcgccgagctattgcagagagaatcgacacgttcctacctgagagaataaaaaggagcctccctgctttgtcaaggctgaggagtcaacaggaaaatgaactcacttctcttatcgttgagggtaactgatatgtaatggaatttccatgcacacgaagccttttttttgtttatctgttcgttcttcaatctccaacaagggaatgcaacatcactgtaagagcagtgggttagtaacacgtcgaattggtccgacgaatctctagaaacgtc

SEQ ID NO: 58714 - DNA, 1506 bp, Zea Mays
ccagaatgaagatatgcagaatcagttatgcttattattcaattcatggccaaggggccatcgaatgcattttactgctttgcacatgactacagtgctcatttcttctgtgtggcttcttttctatggacaaccaccatatcattcactctgcatcgcacagttgtaaaacacaaaactgatgttgaagaatttggatctattttccacttatatgtgtggggaacttcactatctaccactgtattacgttcgataggaagtgactacggaagaccaggcacctggtgctggattcagcagggaagcatggcaaaggtcctacatttaataaccttttatcttccactttggggtgccattttgtacaatgggtttacatactatgaagtaaaccgcatgctgaataatgcaacgcagatggctgctggcataagtgatcaatcaaatcagtctgacattagggcaggcaggaaggcatttaaccgatggggttattaccctctaattctaatcggttcatgggcgtttgcaactatcaatcgtctttatgactttgccaatccagggcacaggatagtctggctctcgtttcttgatgttgggttcgctggacttatggtgagtctattaatgcttgtttttttatactaaattgctgaaatagcataccatgaacttttctataaaaactcaggctacctacatatggtgggcataatttatagtaaaggggcttgaataagaggcctccacattgcttcatttttttctcctgtccctgcaagtaattagctctgaatgagtgaatgggaaggctaaaggtctgaccactcttgtgcttttcttatggaaatgggtacatgaaatatatgtgtgtcttcaatccttcattatcataagcaatacttcctccaccttctagctttcttccagatgcaccaattataagtccatgataactataatgcacctttttgctttgttcttccatgcctacccctacttaaatgcacacatccatttatttttcctatattggatatgaagttattcatgtaagtgttttgtttgattgacaccaaactatattccatggttcgcttctctctctctctctctgtctctctctctctcttttttttttttgtgtgtgtgtgtggatattttgacgtttcctgttttatctagggcctattcaattccattgcttatgggctaaactcttctgtgcgccgagctattgcagagagaatcgacacgttcctacctgagagaataaaaaggagcctccctgctttgtcaaggctgaggagtcaacaggaaaatgaactcacttctcttatcgttgagggtaactgatatgtaatggaatttccatgcacacgaagccttttttttgtttatctgttcgttcttcaatctccaacaagggaatgcaacatcactgtaagagcagtgggttagtaacacgtcgaattggtccgacgaatctctagaaacgtc

SEQ ID NO: 58715 - DNA, 541 bp, Zea Mays
accggaccgagagtgctacggcgtcaatcctttctatcctcgtcgtgcccagcttctcttccctcttttcccctcactgatgaaccctagccgccgtctccatgccggatcccgcacccgagcctgccctcgccggcgccggcgctgctggacacgagtcttcagggtctatgtcaatggtgttggatccaagcggagtagcttgaacggtccgtgcttgctaaccagtgttgtgatccatccatatgggctcatccttcagaatgaaccaacaatgaagaagagtaaatgagtgcttttcaatcgtagcatatcgagaagccgctaaagatgtttgcatattaaagaaaaatacatgagccattgcgacatgtatatgtgacaatgaaaagaatggcatttgcaattcaatgtacaacaaagtaccttgtcaacatcggaaaccccactcggtttctcatggagaaaattttccatgtagtctaagaaaatcgagcattatgtttttatattgttccatctgctcatgagtgaattgcat

SEQ ID NO: 58716 - DNA, 611 bp, Zea Mays
accggaccgagagtgctacggcgtcaatcctttctatcctcgtcgtgcccagcttctcttccctcttttcccctcactgatgaaccctagccgccgtctccatgccggatcccgcacccgagcctgccctcgccggcgccggcgctgctgtgtgcagcccctcgcctcaacattcagttcacagattttcagttcagtgatattcaactgaaactggatggacacgagtcttcagggtctatgtcaatggtgttggatccaagcggagtagcttgaacggtccgtgcttgctaaccagtgttgtgatccatccatatgggctcatccttcagaatgaaccaacaatgaagaagagtaaatgagtgcttttcaatcgtagcatatcgagaagccgctaaagatgtttgcatattaaagaaaaatacatgagccattgcgacatgtatatgtgacaatgaaaagaatggcatttgcaattcaatgtacaacaaagtaccttgtcaacatcggaaaccccactcggtttctcatggagaaaattttccatgtagtctaagaaaatcgagcattatgtttttatattgttccatctgctcatgagtgaattgcat

SEQ ID NO: 58717 - DNA, 1173 bp, Zea Mays
accggaccgagagtgctacggcgtcaatcctttctatcctcgtcgtgcccagcttctcttccctcttttcccctcactgatgaaccctagccgccgtctccatgccggatcccgcacccgagcctgccctcgccggcgccggcgctgctgtgtgcagcccctcgcctcaacattcagttcacagattttcagttcagtgatattcaactgaaactggatggtaagttttcagtgaccatgttgaggcgaacaacagttcatgtcactgaaaatagaatgaccatgcatttttcatagaatggccatattcagttcacagaaataaatggaccgcagttcacagattagaattcagttcacagattacaaccggaattcagttcacacagattaaatggactgcagttcacacagcagttcatagattagaattcagcggctagggttgccatgctgcctgtgccgtacaccatcacacagctagagctagttcaattccctttcccttcccgttgtcacccctctgttcagtccacaccacaccctcctcaaccgcaccgtcgtcgtctagccgactagcggcgggagctatagcttcgacgagccgacgacaaacaccaacaggaggggaaaggagggaagagaagctagggcctagggagggaggagagctgctgggagacgacgacgagaagactggcgccgtaacgctagccgtccgtgacctgcgcctgatagaccttactgaaagatcgcaaggctaacaacgacgactgctgatggacacgagtcttcagggtctatgtcaatggtgttggatccaagcggagtagcttgaacggtccgtgcttgctaaccagtgttgtgatccatccatatgggctcatccttcagaatgaaccaacaatgaagaagagtaaatgagtgcttttcaatcgtagcatatcgagaagccgctaaagatgtttgcatattaaagaaaaatacatgagccattgcgacatgtatatgtgacaatgaaaagaatggcatttgcaattcaatgtacaacaaagtaccttgtcaacatcggaaaccccactcggtttctcatggagaaaattttccatgtagtctaagaaaatcgagcattatgtttttatattgttccatctgctcatgagtgaattgcat

SEQ ID NO: 58718 - DNA, 1606 bp, Zea Mays
accggaccgagagtgctacggcgtcaatcctttctatcctcgtcgtgcccagcttctcttccctcttttcccctcactgatgaaccctagccgccgtctccatgccggatcccgcacccgagcctgccctcgccggcgccggcgctgctgtgtgcagcccctcgcctcaacattcagttcacagattttcagttcagtgatattcaactgaaactggatggtaagttttcagtgaccatgttgaggcgaacaacagttcatgtcactgaaaatagaatgaccatgcatttttcatagaatggccatattcagttcacagaaataaatggaccgcagttcacagattagaattcagttcacagattacaaccggaattcagttcacacagattaaatggactgcagttcacacagcagttcatagattagaattcagcggctagggttgccatgctgcctgtgccgtacaccatcacacagctagagctagttcaattccctttcccttcccgttgtcacccctctgttcagtccacaccacaccctcctcaaccgcaccgtcgtcgtctagccgactagcggcgggagctatagcttcgacgagccgacgacaaacaccaacaggaggggaaaggagggaagagaagctagggcctagggagggaggagagctgctgggagacgacgacgagaagactggcgccgtaacgctagccgtccgtgacctgcgcctgatagaccttactgaaagatcgcaaggctaacaacgacgactgctgatggtatttttctattatggcaaagagaagacttgtatcctttctattttgataaacatgtgtacaccgaattgaagctcagttctgtaggaggtgactcatttccgttgaacatattcatcgacgccactcgtgttttgttcatcgacattaattctatacacgatgcttgggtttagaatacatgtgtttggtaggctaagttgtacaatactgattcctccatttgtttaccaatctgaagttgacagtaccaagttaaattcaccacgaaccgtccagacaacacccacacacaacattccaagtagcaaaatatctattacaaccaatatgatcaagttcatggtttctataaaccaacatgatctggtcttcttacttttgtccttgctagagtctcgacctaagaaacgcttcgatgttgtgcttccaggacacgagtcttcagggtctatgtcaatggtgttggatccaagcggagtagcttgaacggtccgtgcttgctaaccagtgttgtgatccatccatatgggctcatccttcagaatgaaccaacaatgaagaagagtaaatgagtgcttttcaatcgtagcatatcgagaagccgctaaagatgtttgcatattaaagaaaaatacatgagccattgcgacatgtatatgtgacaatgaaaagaatggcatttgcaattcaatgtacaacaaagtaccttgtcaacatcggaaaccccactcggtttctcatggagaaaattttccatgtagtctaagaaaatcgagcattatgtttttatattgttccatctgctcatgagtgaattgcat

SEQ ID NO: 58719 - DNA, 3144 bp, Zea Mays
gtgcacaagcacaacacaacggccaccaccggaccaccggccctcgcaggtcgcgcaaccatttcccttggaaaacaacgcgcccacccgagcccggccggccccaaccactccaaccaaaccaaagcccaaacccgctttcccccgaaacccaggccctcgcgtcgtttgatgcgattccggcggcgatcgtcagcgcctccaacaccacccgctcccccgtcctagcgtgcgttcgggcgatctcccctctcgcggcgggcatggctggcgttggcggcggggcgcgcagctcagacagggcgggggcggcgcgctcgcccaccaccaccaccaccaccaccaccacggcgatccagtccaccatccagtcgatcaaggaggtcgtcgtcggccactccgacgccgacatcttggacaccctccgcgagtctaacatggaccccaacgagacggcgcagaagctgctgaatcaagatccatttcacgaagtgaaaagaaaaagggacaagaagaaagagagtgctggccagaagagctttgctgatagtactggacaagttgaccagaaccctcaatggatgaggccacatacccacaggatggaaaatgatcaaagaagacttcccaatcagggtcagatgtcaggcccaagtcatgaatttcgggttgtgagggacaacagatttcaacatggtgtggtggagaacagaccagagcccggacacaaaggttcagcagatgtacaaatgtctgataggagcactgttgttcagtccgctcgaaacctctcacctgctacaacctcagacggccagatcacacatcaaaatgctatgcagaactcacaatctgacataactcaagggaagagggatggtcaaggtactacacagaagcacgcgaagccatatctgaagaactctcagaatgagcagcactttccaggttctgacccagctcatgggtcagccacagttagaattgctggtggaactgttggacctactcgacgtcatgttggagttattaattctagtaggcaatttgttggccgttcaggttctcagatgcatgcaccaggtggttcttcctatgcaaatattcagagggggagttttacctcagtaggggcatctgggcgttactcagcttttatgtcaagaaacattcaacaaaacctgagggctgatacaacatttcgtggaaggcccactggtagatcttttattgcacaaaatgtcaacaggtatcaccagggccctactaccaaccaaaaagtacaccctattaaggagtggaagccaaaattgacaaagaagtcacccaccatcgatgcagaaaacagtatagctgatgctgcatctccttcagcaagcaactgtgaaaatgccaacacaacagatgtaaatgggttgcctgaaaaactttcacaagctaacttgcatgaggtggagcatgttattattccggaacatcttcgtgtaccagaatatgagcagacaaagttaaggtttggcagtttcacacctgatttggatttggaacaagtacctgatttgaccccacaagacactgagcaaccagaacatgtacaagaaccagttcaacaggtcagtgaaggcgatagtttggatgatggacatgatgacatggatgagcaagctagatcttcacaacacctgtcctcatcaacagctgagatttccttgtccccatctgaggatagtgatcaaatgagtgggcaagtagagaatgatgatgggctgggcttagttcagagtgacactccagttggagcagcagatggtgacagtacccagatcacctcgactttgactgctttttcggcttatggtcataaagatcctaatattcatacaaccaatgaggcccagctatatggactggtggagcctaatgtacatccacaagcattagcttcctcttctcagggatacccttcagaaaatccagaagcagataatgctgtgcaagtcttcaggatgccagattctaatgttcactcacaagttctcccgtccacatctgaggccctaaatccacagatcgtgagcaacagccctgttccgatctcttcacagcagcagcatatctctcagcaacaagctgcaacacagatgtaccctcaaatgcatgtgcaacattttccaaattttatgccatatcgccaactctattcaccagtttatcccatgcctatgccaaactattcgccaaatgtcccttatccatcaaatggaaatagttatcttcaaatgcccagtggaggttcgcatttaactgcaggaagcgtaaaatatggagtttcacagtataaaccagtcccatctggtaacccttctggctacggaaattacactcatccagctggttttacaatgggttctcctggtgttattggagctgcagttggtgttgatgatgtcaataggatgaagtacaaggacaacatttatgcctcaactccacaggtcgagacatctgacatctggattcagacagctagagagatgccaccattgcaggttccttcatattacaacataccaggtcaagcaacacctggtgcttttgtgccaaatccagcaaatgcatctttcaatgctacatctcaatcccctcatgcgcagttcccaggcttgtaccatcctcagcaacctccctctattgtaagtccgcaccccatggtgcatcaacaggtgccatcggccattggtcccaatgttggggtcggggtggcagctccaggcccacaagttggggcatatcagcaacgacaaattggtcatatgaattggagacccagcttttgaagaaggtttcttaattatctgtaattaggggggtcacaagagcctttatgtaacatcagtaggctccttttgacgggaagcacctttgtttttagtgcagctctttctgatctatttaagctataacaaggtttttgttagcttttccttcccccaggtgaattcaatgtcccatctgaactggtatgtagattgtgatttaaacattgggcaagatctcgcacgagcaccaaggttgagtgccttccattttgttctattgttttgttttttaatctaagttgtgtaggttgcgtgccttccattt

SEQ ID NO: 58720 - DNA, 3104 bp, Zea Mays
gtgcacaagcacaacacaacggccaccaccggaccaccggccctcgcaggtcgcgcaaccatttcccttggaaaacaacgcgcccacccgagcccggccggccccaaccactccaaccaaaccaaagcccaaacccgctttcccccgaaacccaggccctcgcgtcgtttgatgcgattccggcggcgatcgtcagcgcctccaacaccacccgctcccccgtcctagcgtgcgttcgggcgatctcccctctcgcggcgggcatggctggcgttggcggcggggcgcgcagctcagacagggcgggggcggcgcgctcgcccaccaccaccaccaccaccaccaccacggcgatccagtccaccatccagtcgatcaaggaggtcgtcgtcggccactccgacgccgacatcttggacaccctccgcgagtctaacatggaccccaacgagacggcgcagaagctgctgaatcaagatccatttcacgaagtgaaaagaaaaagggacaagaagaaagagagtgctggccagaagagctttgctgatagtactggacaagttgaccagaaccctcaatggatgaggccacatacccacaggatggaaaatgatcaaagaagacttcccaatcagggtcagatgtcaggcccaagtcatgaatttcgggttgtgagggacaacagatttcaacatggtgtggtggagaacagaccagagcccggacacaaaggttcagcagatgtacaaatgtctgataggagcactgttgttcagtccgctcgaaacctctcacctgctacaacctcagacggccagatcacacatcaaaatgctatgcagaactcacaatctgacataactcaagggaagagggatggtcaaggtactacacagaagcacgcgaagccatatctgaagaactctcagaatgagcagcactttccaggttctgacccagctcatgggtcagccacagttagaattgctggtggaactgttggacctactcgacgtcatgttggagttattaattctagtaggcaatttgttggccgttcaggttctcagatgcatgcaccaggtggttcttcctatgcaaatattcagagggggagttttacctcagtaggggcatctgggcgttactcagcttttatgtcaagaaacattcaacaaaacctgagggctgatacaacatttcgtggaaggcccactggtagatcttttattgcacaaaatgtcaacaggtatcaccagggccctactaccaaccaaaaagcagtacaccctattaaggagtggaagccaaaattgacaaagaagtcacccaccatcgatgcagaaaacagtatagctgatgctgcatctccttcagcaagcaactgtgaaaatgccaacacaacagatgtaaatgggttgcctgaaaaactttcacaagctaacttgcatgaggtggagcatgttattattccggaacatcttcgtgtaccagaatatgagcagacaaagttaaggtttggcagtttcacacctgatttggatttggaacaagtacctgatttgaccccacaagacactgagcaaccagaacatgtacaagaaccagttcaacaggtcagtgaaggcgatagtttggatgatggacatgatgacatggatgagcaagctagatcttcacaacacctgtcctcatcaacagctgagatttccttgtccccatctgaggatagtgatcaaatgagtgggcaagtagagaatgatgatgggctgggcttagttcagagtgacactccagttggagcagcagatggtgacagtacccagatcacctcgactttgactgctttttcggcttatggtcataaagatcctaatattcatacaaccaatgaggcccagctatatggactggtggagcctaatgtacatccacaagcattagcttcctcttctcagggatacccttcagaaaatccagaagcagataatgctgtgcaagtcttcaggatgccagattctaatgttcactcacaagttctcccgtccacatctgaggccctaaatccacagatcgtgagcaacagccctgttccgatctcttcacagcagcagcatatctctcagcaacaagctgcaacacagatgtaccctcaaatgcatgtgcaacattttccaaattttatgccatatcgccaactctattcaccagtttatcccatgcctatgccaaactattcgccaaatgtcccttatccatcaaatggaaatagttatcttcaaatgcccagtggaggttcgcatttaactgcaggaagcgtaaaatatggagtttcacagtataaaccagtcccatctggtaacccttctggctacggaaattacactcatccagctggttttacaatgggttctcctggtgttattggagctgcagttggtgttgatgatgtcaataggatgaagtacaaggacaacatttatgcctcaactccacaggtcgagacatctgacatctggattcagacagctagagagatgccaccattgcaggttccttcatattacaacataccaggtcaagcaacacctggtgcttttgtgccaaatccagcaaatgcatctttcaatgctacatctcaatcccctcatgcgcagttcccaggcttgtaccatcctcagcaacctccctctattgtaagtccgcaccccatggtgcatcaacaggtgccatcggccattggtcccaatgttggggtcggggtggcagctccaggcccacaagttggggcatatcagcaacgacaaattggtcatatgaattggagacccagcttttgaagaaggtttcttaattatctgtaattaggggggtcacaagagcctttatgtaacatcagtaggctccttttgacgggaagcacctttgtttttagtgcagctctttctgatctatttaagctataacaaggtttttgttagcttttccttcccccaggtgaattcaatgtcccatctgaactggtatgtagattgtgatttaaacattgggcaagatctcgcacgagcaccaagttcaaatgggcatgacggagcaaattacgg

SEQ ID NO: 58721 - DNA, 597 bp, Zea Mays
tcggctttttccggccggcccacgccgcgagcaccccagccagcctcacgcgccccgcgccccaaaaccctagcgccgcctcctgcgcgcgctcgcccagctgcccagcaccgtgcccagccgccgcggcgcctcgcccaccactctctctctccctctcccccctattcccccacgacgtcgtgactacctccactacgatccttcccctgcttatggagatgacagttccaagcatactccaacatctctctccctacacgcacaactagccatggccgcgcggccactgcaacccgtgcgagcacaccctgcgatgcacgagtgttgctctgcacaaccgctcgacggtcgtcccccagagcttccccatgatgcgcgtcgtgaagcccctcgacgaagaccctaggaacacctgcaggggtcggccatcgtgcacagatcgtgattcgtttctgagcttcgaggaatcgacggtcaagcttcaacgaccaaatgacccagttcttcgagttccacgagattgaagaccctgagcatatgtttggtgaaggcaagtgtcccttgacctatctctgtcctatacattctttaatt

SEQ ID NO: 58722 - DNA, 533 bp, Zea Mays
agcaccgtgcccagccgccgcggcgcctcgcccaccactctctctctccctctcccccctattcccccacgacgtcgtgactacctccactacgatccttcccctgcttatggagatgacagttccaagcatactccaacatctctctccctacacgcacaactagccatggccgcgcggccactgcaacccgtgcgagcacaccctgcgatgcacgagtgttgctctgcacaaccgctcgacggtcgtcccccagagcttccccatgatgcgcgtcgtgaagcccctcgacgaagaccctaggaacacctgcaggggtcggccatcgtgcacaggttgtcagcattgcaaccactgctcaggagaagatgaagtcgtggaaggagactttcaggagttccaagactacgacgagttctaggcgtgggttagcggcaacccccagtcggctgcctgtgaaggccgcgtttatctacgtttcgtttttgcactttgattatttgtaaagactatgtggatgtctcagacttatg

SEQ ID NO: 58723 - DNA, 566 bp, Zea Mays
agcaccgtgcccagccgccgcggcgcctcgcccaccactctctctctccctctcccccctattcccccacgacgtcgtgactacctccactacgatccttcccctgcttatggagatgacagttccaagcatactccaacatctctctccctacacgcacaactagccatggccgcgcggccactgcaacccgtgcgagcacaccctgcgatgcacgagtgttgctctgcacaaccgctcgacggtcgtcccccagagcttccccatgatgcgcgtcgtgaagcccctcgacgaagaccctaggaacacctgcaggggtcggccatcgtgcacagagcacttagaagaagaagttgaagtggaagtggaagaggagtcagctcctcaatctgaggtttctccaactgaacgtgctccggaaggtctttcagaaggtgccctagcagggtttactgcaattgcaatatcctagtagaagagtctggctctcctcctcatcaagaatggctccccctaagtagacgccccatatgcgggttggaccacgaggagtgcccaagcatcag

SEQ ID NO: 58724 - DNA, 415 bp, Zea Mays
agcaccgtgcccagccgccgcggcgcctcgcccaccactctctctctccctctcccccctattcccccacgacgtcgtgactacctccactacgatccttcccctgcttatggagatgacagttccaagcatactccaacatctctctccctacacgcacaactagccatggccgcgcggccactgcaacccgtgcgagcacaccctgcgatgcacgagtgttgctctgcacaaccgctcgacggtcgtcccccagagcttccccatgatgcgcgtcgtgaagcccctcgacgaagaccctaggaacacctgcaggggtcggccatcgtgcacaggttgtcagcattgcaaccactgctcaggcgaagatgaagctgtggaaggagacttccaggagttccaagattacgacgag

SEQ ID NO: 58725 - DNA, 692 bp, Zea Mays
aagaactccactaatcgctaatcacaaagctagctgctttccacaatccacagtatcgtcgcgcgcagagagcatcacgtacgtcgcatcgccgccttccattcgatcgtcatcggcagcgagcgcaatgggaaacgtggaggcgacgccgtcgtccgtcgccccccatgtggaccgtccggagcgacgtacgacgtagagaaggagttgtgcagcgaggtcgtgaacttcacgacctacgccgcgccgtcgcagagggcaccgtcacgcggcaacgatatctttaggccgacttttgagagtttgttgggctgacggatagcaagaatttaaagactataagaagaatcaaggatttgaagactacatgaagaagcagctcgaggagttggagagatggtacctctcgcactttacggtggattgccatcagttgggccgtcaagaagaaggaagtggatgtcatctccataaaggatttcacactttttggctcgacgtcgtttgtgccccaggtggcctaccgacctcgggcatcatcttcacctctattcaactctatgtcgtctagagccgtcttgggtggcctgccaacctccaagacgatcataggatcttacccctcccgagggcaagaatcatgttatacatttatgatgtgttcctcaacttaatttcttaactcctagttg

SEQ ID NO: 58726 - DNA, 738 bp, Zea Mays
ctaaagcttatcctcgacctttcgttctcacccacagcctagcaccatcttgtcttgcccacgagagaagcaaactcaagatccacatcgcctaatcgccttgcgtcagtgcttctgcttgctgtctgccgcggctgcacggatgagagaaccaccgctagctgcgaggaggcgcacaaaaaagacgtcgaggctgccgctgtcccacatgtatttgtatattttcttcatggtcgagatttgcaggtacctcgtggagtagaggaactgttcagctcgagcgagtatacaattgtaaactcgtgttaagttactgaagcgattcgataactggactttaggatcatcatgcatgtatctttagtgcatgagagcataggattccagcaaattcaaatttcttgcagctgcacctcacttttaactccaaaggtgtgctctgtgttgctttgaagtcacttgtaacttcttcatatcgtttgtccctaagcagactgtcaaagtgctcaaaaaaagatttaaaattgaaaaacatatcattcacctgttcaccctcaagatgggactctacgccaggatggtcctcgaaaccatccgcttctctagcaccagggcgcatcatcggcaggcgttgagttgagagattaggggagcaaaaactttattattgtaggcgttgatttgagagaatgaatacatcatgatgtgtggggaaaagaaaggatgagaaaaggcggg

SEQ ID NO: 58727 - DNA, 798 bp, Zea Mays
ctaaagcttatcctcgacctttcgttctcacccacagcctagcaccatcttgtcttgcccacgagagaagcaaactcaagatccacatcgcctaatcgccttgcgtcagtgcttctgcttgctgtctgccgcggctgcacggatgagagaaccaccgctagctgcgaggaggcgcacaaaaaagacgtcgaggctgccgctgtcccacatgtatttgtatattttcttcatggtcgagatttgcaggtacctcgtggagtagaggaactgttcagctcgagcgagtatacaattgtaaactcgtgttaagttactgaagcgattcgataactggactttaggatcatcatgcatgtatctttagtgcatgagagcataggattccagcaaattcaaatttcttgcagctgcacctcacttttaactccaaaggtgtgctctgtgttgctttgaagtcacttgtaacttcttcatatcgtttgtccctaagcagactgtcaaagtgctcaaaaaaagttttattcaatggatgcatccaggttctaggagagaatcatgagtaaacttgttggcaggatttaaaattgaaaaacatatcattcacctgttcaccctcaagatgggactctacgccaggatggtcctcgaaaccatccgcttctctagcaccagggcgcatcatcggcaggcgttgagttgagagattaggggagcaaaaactttattattgtaggcgttgatttgagagaatgaatacatcatgatgtgtggggaaaagaaaggatgagaaaaggcggg

SEQ ID NO: 58728 - DNA, 900 bp, Zea Mays
ctaaagcttatcctcgacctttcgttctcacccacagcctagcaccatcttgtcttgcccacgagagaagcaaactcaagatccacatcgcctaatcgccttgcgtcagtgcttctgcttgctgtctgccgcggctgcacggatgagagaagttgcatccttctgactctgttgctcgccttcagacacccgtccgtcgcctctaacaccggtgcgttgtttggtcttccctgtgagttcgcagccaccgctagctgcgaggaggcgcacaaaaaagacgtcgaggctgccgctgtcccacatgtatttgtatattttcttcatggtcgagatttgcaggtacctcgtggagtagaggaactgttcagattctgcagctcgagcgagtatacaattgtaaactcgtgttaagttactgaagcgattcgataactggactttaggatcatcatgcatgtatctttagtgcatgagagcataggattccagcaaattcaaatttcttgcagctgcacctcacttttaactccaaaggtgtgctctgtgttgctttgaagtcacttgtaacttcttcatatcgtttgtccctaagcagactgtcaaagtgctcaaaaaaagttttattcaatggatgcatccaggttctaggagagaatcatgagtaaacttgttggcaggatttaaaattgaaaaacatatcattcacctgttcaccctcaagatgggactctacgccaggatggtcctcgaaaccatccgcttctctagcaccagggcgcatcatcggcaggcgttgagttgagagattaggggagcaaaaactttattattgtaggcgttgatttgagagaatgaatacatcatgatgtgtggggaaaagaaaggatgagaaaaggcggg

SEQ ID NO: 58729 - DNA, 1964 bp, Zea Mays
cacgtccacggccactcccgcttgctattgctagtcgtttccgcctcctccacttgccgcgcaccgccacggccgtggcgcggcgccgccgtggccgggcggtatgaagaggctgtagaagcagagcggtggcctgcaggtgtgcgcgaacgccgggctcctcagcccgctcggaggccgctcgcggcgccgtgcgaggctgacgctgtacgcggtcgcggtcgcggtcgccttcgccgcgttcaccgcctacgtcgccttcgccttgcccccctccgcgggcgctgcaagtgaagtttcaggcagtggttcggctgctggaaatggcagcactgtaaagcctcatgctggagatgctgttcgggccgggagggagcaggggttctgcaaacggcggagataccgtggctgatctgaataatggttcagatgctcctcagacctcccaggaaatcgaaatggcgatgcaagccataaagcagatgcaagctctagtttggggaagagtaaagatatagatgctgtgacgacgaccgagagtacagatgctcctcaaccagacagtggaagtggagatgcaaggcacgaagaaccgcctgggaagttctagtccggcaaagagcagtgctggagatggcgaagttgagggcagtagtagtgttgttccagctagtaatcaaactggtagtcaggccttgccagggcagaaagatgctggatctcccagtcccagcaacaacaagcagacagttgtagcatctcccaatgtgaagaggaatccggaacagaccgggcgccaagctgctcccggcaggagcagtggtgcagcgaataatccgaaaggaaatgctgctgctgctggttcatcagagaaccattcggcggcgcaaggaaactcctcgagatctggaaataacagcaagggtagcaggtcatcagtagagcaggatggcggttctggttggaatgggaagaaagccgattggttcagcgaagtggctagttgcgatatgttccatggggattgggtcagggatgactcgtaccctctctacccggagggatcatgcccttacttacatcgacgagccctttgactgctacctcaacgggcggcgagatcttgctttaccagaagctccgctggcaacccagtggatgcagtatcccgagattgaacccaacggacatgttggagaggctgagaggaaaaagctaggcttgctttcgttagtgattcactcaacaggaacgaacatgtgggagtccctcgtgtgtattctgtggagttgtgtccaggacaagctagggaaggtttttgaggcatccggcaggcgtgagtttaagaccgaaggctcatactctttcctgttcacggtattatactctttcgcatctccactacgtacgtcgtacgcagtggggggcaatggaactcaggtggcagctgtgacaaggagagcgagccgataaccaacgaacagtacctctcgaccacctacccggcgaagatgagcgtcctggactggaggacgtgatccgcaggacgacaactccggtggtttacctcagcataacgagaatgagcgactacagaaaggacgcgcacccttccatctaccgcaagcagcacaaggacctgagcagcgaggagaggtacttgcaggactgcagccactggtgccttcctggagtaccaccggattcctggagcgagctgctttacgctcagcttttgatcaggcagcatcaaattattgtaaagtcgacatggtgatcaaagtaaggtcgacatgggaactgaggattctcctaaatccatatatagagagtaaagttgtccagcgagtgctgcctcccagtgagtgtagagtgtacccacacaaatttatctctagggtggatgcctaactgtttatacggttgtaaaacggttctgtataggcttgcgcactagctagcgc

SEQ ID NO: 58730 - DNA, 1915 bp, Zea Mays
ggcgccgccgtggccgggcggtatgaagaggctgtagaagcagagcggtggcctgcaggtgtgcgcgaacgccgggctcctcagcccgctcggaggccgctcgcggcgccgtgcgaggctgacgctgtacgcggtcgcggtcgcggtcgccttcgccgcgttcaccgcctacgtcgccttcgccttgcccccctccgcgggcgctgcaagtgaagtttcaggcagtggttcggctgctggaaatggcagcactgtaaagcctcatgctggagatgctgttcgggccgggagggagcaggggttctgcaaacggcggagataccgtggctgatctgaataatggttcagatgctcctcagacctcccaggaaatcgaaatggcgatgcaagccataaagcagatgcaagctctagtttggggaagagtaaagatatagatgctgtgacgacgaccgagagtacagatgctcctcaaccagacagtggaagtggagatgcaaggcacgaagaaccgcctgggaagttctagtccggcaaagagcagtgctggagatggcgaagttgagggcagtagtagtgttgttccagctagtaatcaaactggtagtcaggccttgccagggcagaaagatgctggatctcccagtcccagcaacaacaagcagacagttgtagcatctcccaatgtgaagaggaatccggaacagaccgggcgccaagctgctcccggcaggagcagtggtgcagcgaataatccgaaaggaaatgctgctgctgctggttcatcagagaaccattcggcggcgcaaggaaactcctcgagatctggaaataacagcaagggtagcaggtcatcagtagagcaggatggcggttctggttggaatgggaagaaagccgattggttcagcgaagtggctagttgcgatatgttccatggggattgggtcagggatgactcgtaccctctctacccggagggatcatgcccttacttacatcgacgagccctttgactgctacctcaacgggcggcgagatcttgctttaccagaagctccgctggcaacccagtggatgcagtatcccgaggatcatcatcgtatctgtgccatatatttcagattgaacccaacggacatgttggagaggctgagaggaaaaagctaggcttgctttcgttagtgattcactcaacaggaacgaacatgtgggagtccctcgtgtgtattctgtggagttgtgtccaggacaagctagggaaggtttttgaggcatccggcaggcgtgagtttaagaccgaaggctcatactctttcctgttcacggtattatactctttcgcatctccactacgtacgtcgtacgcagtggggggcaatggaactcaggtggcagctgtgacaaggagagcgagccgataaccaacgaacagtacctctcgaccacctacccggcgaagatgagcgtcctggactggaggacgtgatccgcaggacgacaactccggtggtttacctcagcataacgagaatgagcgactacagaaaggacgcgcacccttccatctaccgcaagcagcacaaggacctgagcagcgaggagaggtacttgcaggactgcagccactggtgccttcctggagtaccaccggattcctggagcgagctgctttacgctcagcttttgatcaggcagcatcaaattattgtaaagtcgacatggtgatcaaagtaaggtcgacatgggaactgaggattctcctaaatccatatatagagagtaaagttgtccagcgagtgctgcctcccagtgagtgtagagtgtacccacacaaatttatctctagggtggatgcctaactgtttatacggttgtaaaacggttctgtataggcttgcgcactagctagcgc

SEQ ID NO: 58731 - DNA, 1099 bp, Zea Mays
agccgttgcttttgccccaaatccccacctctctcctcccaaatgccccgaattaacgcggtcatttcctctcccataattaatgcggccgttacgctctcgcctcgctacccccagtcccccacccccacacgcaccactgccatcaccccatttcaaactcgaaccacatcgcgccgtgagtccgaaaagatccccgcctcgagcatcgatcgaccggaaggagaaggcaagacgccgggacgttctctgaatcggaggcgaggcggggaggggatagaatcggatggtggaggctggcgcgagcttcatggataaggtcgaggcggcggcggacgacgtcgtcatcgacggggcgggcgtgggcgtcggggacgcaggggaggaggaggaggaggagatggcgcccgtggagcccctcccggagcctctcgacgactgcgggcccgtcgcgtggcccatgccggacttctgccctctcacgatcgatggggcgctgaaggagtcgttcctggagactctacggaaggacgcggcggaggtcgagcggcctgcgcgagaaggggcggaggagggggaggaagcgctcagcccggactcgcggccgtcgagcagcaagcgccaccgcgcgggcaccgcctcgccgtcgtccaggagcagcccctaccgcaacatcctgcacgtgttccagcagtgcaggcaggacgccgtcggggagactcccaccaagaattactgaagcagacgagcgcaacggggcaggatcaggccgcggcgcgatgtcacggccacggcttttcgccgcttgcttgctcaagaataacgcttgccatgttcgtttagtagccagccgtttgcacattgttcttggtgtggctgaaaaggggtaggggagttcttaattcttgtgtaaacatcggatatagaagttacaggacctcagtaaaaaacgtcatgagaaatgcaacttgataattttcactagttaggctagttcgagcagcttacttattcttatcttatatttcaaactccactttgtaacactttataaacaatgagtgttttacaagatcatatacatgatctactactatag

SEQ ID NO: 58732 - DNA, 2343 bp, Zea Mays
cgcccagaatgttccgacgcgttcgatttctaatcaacggagcaccggcctccacccctcgttgagcactctccctccacagtcttgccccagaaccttctcgatgcttctctcgccctcgctcgcgaggccgcgacccatccctcgtacgaggtcggcccctttctccttctgccgcccgcaccaaccctccgccaacactgccctgcttgcaccaaccctccgccctaggtccccgcccagcctgcgccaaccctgcgccctcgagctccctgcctcgcccagctcgtggaggtgagcagatgcttcaacatttaatccaccctccttcaactccctggccacggcgatggcggcgcgccggtgcatggccggctcgaggcgggattggatgaattgaggaccggataggtacacgatggagtgggatgcacggacgttgaggtgagatggccaaagcagaaggcgtcgtcacacccgcagtcggagcacaacagacaatgggagtggtggcacgccggagattggagacactcatcgtccatggaatggggcacacagtagcggacgagggagggccatagtagaaggtgtctgcgctgaagatctttggctcccatctcgccggctgcagcgaggcgccatgctttgagggttgctccgccatgcagatgctctccgacatccacttccagcgcgcctgggtccagggtgtgatcctgcctgtcagcaaactacaacaaagctggcgaacgacccttgaggaaatgataggtcctgtgtcgtcgaccttttcgtcgtgccaaaataagcagagagacgattctggcggccaggtatgctggctctaaatggttcttttgatcctgctttatgtttgcatcgctctcacattgtcgaaatagtattcaatttaataaaaaaactcaacaccagcatgtgtaagacatgctctgtgcatatagaagaaacgcaggtggataaaactcccatagatagcgacatagttaaccacaagagatttaggctggttttgtgcttgtcctttggcatgagacaaaaagggatatttttaaacaacacacaatattattcaattatgttctatgattctattattcttaattgtcttgaagcgtgactatatgcatagaagttattccctccgttgtaaatacatggcacattttttctgcaataaattacatgacactttattttttgtcctaaatcaatcttctaaaactgaccaagttattaggaaaatgtattagcatctacaggttcaaataaatgcattatcaaagacatattttgtggagagtttaataaaactaatttgatgttgtcgatgttgttggtttggtgcattctcctatacatttcatcaaagataaaaaaatttaaagtaagacaaagctaactataatttggtccagggagtattacgtttgtgttctataaatggtaggttgttttcttacttttttgtttgcactgactgatgactgtccttgtgatatagggatgtatgtaatgattatttgtgtatacattgcagcagagttcagagacacttatctagctatcaaggaaccatttgtcaatatacccgatgacaaaataagggaggcgctcaaagttgtcttagacccaagaaaccaacctctgcttattcattgtaagagaggcaagcaccgaactggttgtttggtcgggtgcttgaggaagctgcagaaatggtgcttgtcttcagtcttcgacgagtaccatcgctttgccgctgcgaaagcgcgaatcactgaccagagattcatggagctgttcgacgtctcaagcttgaagcacctgacaccctcacattgttaaccccaaggcgcgtgatcgcttgatcccccccaacttctagtacatctccaaggctatcttcctgcagctactgaaccgattcagccgtgaataattttggaaccccctagagtccatgaggtagtgatgaaaccattgcagaacattcgtgcttgagaggtttagtttcccccctgcttagcgcactggagagcctgagaaccagactgctgcggtcgatttgcgaggggttctcttttttggtagctctcgcgaggaattcgccattgtttttgggtactgaagcagcatgtactcgagcagcttctgaggaggaatgaactactctctaagtgcaaaaaaggcgtgtctcttcttgcacgagtgtggttagggatactgcatattaacaagaggttgaaatagcatgataattgcctatttaagcctcaattagcccccaaaaaaataagaaatatttatcttgcatttctc

SEQ ID NO: 58733 - DNA, 1465 bp, Zea Mays
acccatccctcgtacgaggtcggcccctttctccttctgccgcccgcaccaaccctccgccaacactgccctgcttgcaccaaccctccgccctaggtccccgcccagcctgcgccaaccctgcgccctcgagctccctgcctcgcccagctcgtggaggtgagcagatgcttcaacatttaatccaccctccttcaactccctggccacggcgatggcggcgcgccggtgcatggccggctcgaggcgggattggatgaattgaggaccggataggtacacgatggagtgggatgcacggacgttgaggtgagatggccaaagcagaaggcgtcgtcacacccgcagtcggagcacaacagacaatgggagtggtggcacgccggagattggagacactcatcgtccatggaatggggcacacagtagcggacgagggagggccatagtagaaggtgtctgcgctgaagatctttggctcccatctcgccggctgcagcgaggcgccatgctttgagggttgctccgccatgcagatgctctccgacatccacttccagcgcgcctgggtccagggtgtgatcctgcctgtcagcaaactacaacaaagctggcgaacgacccttgaggaaatgataggtcctgtgtcgtcgaccttttcgtcgtgccaaaataagcagagagacgattctggcggccagagttcagagacacttatctagctatcaagacgtcgactcgatatctctggaaagttctcagttgtggaaacgctaataggtaaagtggttcagagagcgacatctcctaggtcgcgtgtatggcgggaggaaggttctgtgtcatcgtcgctgagcgattatttggtgtcttcttccagagagtgtaagactcttttcctctcccttccccctctctccccttctctctcttatacttccgccgcagcgtgttcacccggaccttggagacgtgtgcgaagatggatggtgtggtgcctgtccggcgacgcgtagttcaccgtacaacagtatatgttccctctcattgtcctgcagcctctccagcagacgaccaccattcactcccggtcgctcacctctggcgcggacgggtagcggacgttgaggtccgcctctcacccagccacgccacatctgtcgccgccgtcgacggtggccatggacaccggctgtgaagtttctagaggcaacaagacgtagtaccgacaagaaggatcgaggagcgtgcagaacaaggaggttcgcgatgcgtccaaggcaagactgtgtcgtcatgatgtagccgttgattggaaatctgacgcctagatatatttgagccgacgtggacaatgttatagtcgtcgtttccttacggcttaataggtgcaattactatggctcgacaataagaaatacttagaatgagtcaaaattcttagaatttcaaatataaaataaat

SEQ ID NO: 58734 - DNA, 1519 bp, Zea Mays
acccatccctcgtacgaggtcggcccctttctccttctgccgcccgcaccaaccctccgccaacactgccctgcttgcaccaaccctccgccctaggtccccgcccagcctgcgccaaccctgcgccctcgagctccctgcctcgcccagctcgtggaggtgagcagatgcttcaacatttaatccaccctccttcaactccctggccacggcgatggcggcgcgccggtgcatggccggctcgaggcgggattggatgaattgaggaccggataggtacacgatggagtgggatgcacggacgttgaggtgagatggccaaagcagaaggcgtcgtcacacccgcagtcggagcacaacagacaatgggagtggtggcacgccggagattggagacactcatcgtccatggaatggggcacacagtagcggacgagggagggccatagtagaaggtgtctgcgctgaagatctttggctcccatctcgccggctgcagcgaggcgccatgctttgagggttgctccgccatgcagatgctctccgacatccacttccagcgcgcctgggtccagggtgtgatcctgcctgtcagcaaactacaacaaagctggcgaacgacccttgaggaaatgataggtcctgtgtcgtcgaccttttcgtcgtgccaaaataagcagagagacgattctggcggccagggatgtatgtaatgattatttgtgtatacattgcagcagagttcagagacacttatctagctatcaaggaaccatttgtcaatatacccgatgacaaaataagggaggcgctcaaagttgtcttagacccaagaaaccaacctctgcttattcattgtaagagaggcaagcaccgaactggttgtttggtcgggtgcttgaggaagctgcagaaatggtgcttgtcttcagtcttcgacgagtaccatcgctttgccgctgcgaaagcgcgaatcactgaccagagattcatggagctgttcgacgtctcaagcttgaagcacctgacaccctcacattgttaaccccaaggcgcgtgatcgcttgatcccccccaacttctagtacatctccaaggctatcttcctgcagctactgaaccgattcagccgtgaataattttggaaccccctagagtccatgaggtagtgatgaaaccattgcagaacattcgtgcttgagaggtttagtttcccccctgcttagcgcactggagagcctgagaaccagactgctgcggtcgatttgcgaggggttctcttttttggtagctctcgcgaggaattcgccattgtttttgggtactgaagcagcatgtactcgagcagcttctgaggaggaatgaactactctctaagtgcaaaaaaggcgtgtctcttcttgcacgagtgtggttagggatactgcatattaacaagaggttgaaatagcatgataattgcctatttaagcctcaattagcccccaaaaaaataagaaatatttatcttgcatttctc

SEQ ID NO: 58735 - DNA, 1480 bp, Zea Mays
acccatccctcgtacgaggtcggcccctttctccttctgccgcccgcaccaaccctccgccaacactgccctgcttgcaccaaccctccgccctaggtccccgcccagcctgcgccaaccctgcgccctcgagctccctgcctcgcccagctcgtggaggtgagcagatgcttcaacatttaatccaccctccttcaactccctggccacggcgatggcggcgcgccggtgcatggccggctcgaggcgggattggatgaattgaggaccggataggtacacgatggagtgggatgcacggacgttgaggtgagatggccaaagcagaaggcgtcgtcacacccgcagtcggagcacaacagacaatgggagtggtggcacgccggagattggagacactcatcgtccatggaatggggcacacagtagcggacgagggagggccatagtagaaggtgtctgcgctgaagatctttggctcccatctcgccggctgcagcgaggcgccatgctttgagggttgctccgccatgcagatgctctccgacatccacttccagcgcgcctgggtccagggtgtgatcctgcctgtcagcaaactacaacaaagctggcgaacgacccttgaggaaatgataggtcctgtgtcgtcgaccttttcgtcgtgccaaaataagcagagagacgattctggcggccagagttcagagacacttatctagctatcaaggaaccatttgtcaatatacccgatgacaaaataagggaggcgctcaaagttgtcttagacccaagaaaccaacctctgcttattcattgtaagagaggcaagcaccgaactggttgtttggtcgggtgcttgaggaagctgcagaaatggtgcttgtcttcagtcttcgacgagtaccatcgctttgccgctgcgaaagcgcgaatcactgaccagagattcatggagctgttcgacgtctcaagcttgaagcacctgacaccctcacattgttaaccccaaggcgcgtgatcgcttgatcccccccaacttctagtacatctccaaggctatcttcctgcagctactgaaccgattcagccgtgaataattttggaaccccctagagtccatgaggtagtgatgaaaccattgcagaacattcgtgcttgagaggtttagtttcccccctgcttagcgcactggagagcctgagaaccagactgctgcggtcgatttgcgaggggttctcttttttggtagctctcgcgaggaattcgccattgtttttgggtactgaagcagcatgtactcgagcagcttctgaggaggaatgaactactctctaagtgcaaaaaaggcgtgtctcttcttgcacgagtgtggttagggatactgcatattaacaagaggttgaaatagcatgataattgcctatttaagcctcaattagcccccaaaaaaataagaaatatttatcttgcatttctc

SEQ ID NO: 58736 - DNA, 1499 bp, Zea Mays
acccatccctcgtacgaggtcggcccctttctccttctgccgcccgcaccaaccctccgccaacactgccctgcttgcaccaaccctccgccctaggtccccgcccagcctgcgccaaccctgcgccctcgagctccctgcctcgcccagctcgtggaggtgagcagatgcttcaacatttaatccaccctccttcaactccctggccacggcgatggcggcgcgccggtgcatggccggctcgaggcgggattggatgaattgaggaccggataggtacacgatggagtgggatgcacggacgttgaggtgagatggccaaagcagaaggcgtcgtcacacccgcagtcggagcacaacagacaatgggagtggtggcacgccggagattggagacactcatcgtccatggaatggggcacacagtagcggacgagggagggccatagtagaaggtgtctgcgctgaagatctttggctcccatctcgccggctgcagcgaggcgccatgctttgagggttgctccgccatgcagatgctctccgacatccacttccagcgcgcctgggtccagcaaactacaacaaagctggcgaacgacccttgaggaaatgataggtcctgtgtcgtcgaccttttcgtcgtgccaaaataagcagagagacgattctggcggccagggatgtatgtaatgattatttgtgtatacattgcagcagagttcagagacacttatctagctatcaaggaaccatttgtcaatatacccgatgacaaaataagggaggcgctcaaagttgtcttagacccaagaaaccaacctctgcttattcattgtaagagaggcaagcaccgaactggttgtttggtcgggtgcttgaggaagctgcagaaatggtgcttgtcttcagtcttcgacgagtaccatcgctttgccgctgcgaaagcgcgaatcactgaccagagattcatggagctgttcgacgtctcaagcttgaagcacctgacaccctcacattgttaaccccaaggcgcgtgatcgcttgatcccccccaacttctagtacatctccaaggctatcttcctgcagctactgaaccgattcagccgtgaataattttggaaccccctagagtccatgaggtagtgatgaaaccattgcagaacattcgtgcttgagaggtttagtttcccccctgcttagcgcactggagagcctgagaaccagactgctgcggtcgatttgcgaggggttctcttttttggtagctctcgcgaggaattcgccattgtttttgggtactgaagcagcatgtactcgagcagcttctgaggaggaatgaactactctctaagtgcaaaaaaggcgtgtctcttcttgcacgagtgtggttagggatactgcatattaacaagaggttgaaatagcatgataattgcctatttaagcctcaattagcccccaaaaaaataagaaatatttatcttgcatttctc

SEQ ID NO: 58737 - DNA, 1952 bp, Zea Mays
acccatccctcgtacgaggtcggcccctttctccttctgccgcccgcaccaaccctccgccaacactgccctgcttgcaccaaccctccgccctaggtccccgcccagcctgcgccaaccctgcgccctcgagctccctgcctcgcccagctcgtggaggtgagcagatgcttcaacatttaatccaccctccttcaactccctggccacggcgatggcggcgcgccggtgcatggccggctcgaggcgggattggatgaattgaggaccggataggtacacgatggagtgggatgcacggacgttgaggtgagatggccaaagcagaaggcgtcgtcacacccgcagtcggagcacaacagacaatgggagtggtggcacgccggagattggagacactcatcgtccatggaatggggcacacagtagcggacgagggagggccatagtagaaggtgtctgcgctgaagatctttggctcccatctcgccggctgcagcgaggcgccatgctttgagggttgctccgccatgcagatgctctccgacatccacttccagcgcgcctgggtccagggtgtgatcctgcctgtcagcaaactacaacaaagctggcgaacgacccttgaggaaatgataggtcctgtgtcgtcgaccttttcgtcgtgccaaaataagcagagagacgattctggcggccagggatgtatgtaatgattatttgtgtatacattgcagcagagttcagagacacttatctagctatcaagagaccacccacctgcgctgcgcctcggttttacggcccttccctcaccgccccgcgcgagcgaagccatgaagcttgaggtcatgcccaagcagcgggtgctggaggcggagcagagggaggaggccatggagatgagtggcctggacctgtggaagcacgagaagcccccaaggatctgctccttgcccccgccgctcccggcgccgccagcgtgcgacgaggcggcgctcgtgccgccgctcaacttcgccatggtcgacgacggcatattccgctccggcttcccggagaccgccaatttccggttcctcaagtccctcaacctccgctccatcgtgtacctgtgcccggagccgtacccagagacgaacacggagttcctcgagaagaacgggatcaggctccaccagttcggaatcgaggggcgaaaggaaccatttgtcaatatacccgatgacaaaataagggaggcgctcaaagttgtcttagacccaagaaaccaacctctgcttattcattgtaagagaggcaagcaccgaactggttgtttggtcgggtgcttgaggaagctgcagaaatggtgcttgtcttcagtcttcgacgagtaccatcgctttgccgctgcgaaagcgcgaatcactgaccagagattcatggagctgttcgacgtctcaagcttgaagcacctgacaccctcacattgttaaccccaaggcgcgtgatcgcttgatcccccccaacttctagtacatctccaaggctatcttcctgcagctactgaaccgattcagccgtgaataattttggaaccccctagagtccatgaggtagtgatgaaaccattgcagaacattcgtgcttgagaggtttagtttcccccctgcttagcgcactggagagcctgagaaccagactgctgcggtcgatttgcgaggggttctcttttttggtagctctcgcgaggaattcgccattgtttttgggtactgaagcagcatgtactcgagcagcttctgaggaggaatgaactactctctaagtgcaaaaaaggcgtgtctcttcttgcacgagtgtggttagggatactgcatattaacaagaggttgaaatagcatgataattgcctatttaagcctcaattagcccccaaaaaaataagaaatatttatcttgcatttctc

SEQ ID NO: 58738 - DNA, 1001 bp, Zea Mays
cttccttcccttgtaccttccttctttctgaaatatcaaacatccccaatcactatggacagaggttcagagaagaaaaaaaaacaagaaataacaacaacaatggaaattatcgttctctttatcatttctgtttctactagatgggccagcagttgctccgtgtcaatctgaaaacaataggacactataacaccaataattacattgttttgattgagttgttgttgggcattcagaatcacaatcttgggacaactgcgcagagttatctgattcttggtggagcagcagctgcagtaccgataaaaaagggaataaaaattgctacaatgtcaatctcctttttttgcaggtcattaaaaatgcatgacattttcaattagaggctatgagaagagttacttccgtatatgcaaactctacttgcttgttgcgtggccacatactttctctacaggaaaagaggattggaatatgcacaacacaaatagaaaatcaaggaggtggatgacccttttttcactaaataaaaaaagatttggggaacgaaccagtgcgaaagcagaaaagtaaactaaaatgcactgaacaaaaatgttgaagtagcaccaaaagattttcggtattccatttttgaagaatatgcggctccgcaaacgacgataccacaattagcaaacagaggaggatctcatccacaaagaacacgaaccctaaaaccatgaagtcgagcaaacgctgaacaaaacgattcaagaaatgggatctgaacatgataaacaatatctgcagtagccgtgggggaaaaatgaacccaagcgcagattagaacacgaagactgaaggagtgcgaagatggaggaagcgcggactggaacacgaagactgaaggagtgaaaatggaggaagctggatcttccgcgagatttttttggataaagaagcggcggagggattgagtaggaggaagcggcaaagagagcgaggaccaagaggac

SEQ ID NO: 58739 - DNA, 1653 bp, Zea Mays
acacatttcacctactctccacacagttcacacccaacacttgagctcacacaatcacgctacagagcgcagagctgcacgctccaccggcgaactcacctcggccgccctcctctgccagatagcctccctctactattcaagcccaaaccctaaatcctcggttcccaaatggcgacgccgccgactgcgctgctgttgctcctcgcggcggcagcggcattccacggcgcgacggcgaagacgacgatcgagccgtgctctggcgcggacgcgtgcccggctcttctgggctacaagctctacgcggacatgaaggtgtccgaggtggcggcgctcttcggcgccgacccggcagcggtactggctgccaacgcgctggacttcgcctctccaggcgccgccaaccgcatcctccccgcgggaacacccctccgcgtgcccacccgctgcgcctgcgccgacggcgtccgcaagtccgtcgccatccgctacgccgcccggccttccgacacgctcggctccatctccgaggtcgtcttcgccggcctcccctcggccgaccagatccgcaccgccaacgggctcgccgccgaggaccccgacgcgccgctcaacccgggccaggagctcgtcatcccgctcccctgcgtctgcttcaactccaccgacaacaacctccccgctgtgtacctctcctatgtcgtgcaggtcggggacaccgtggaatccatcgccgccagccacacaaccaccgtcactgatatcagcaatgtgaacgccatggggagccccattgtcgcaccaggcgacatccttgccataccattgtctgcttgcgcctcagcatttcctaactctgcttcggactatggattgcttgtggcaaatggaacctatgcactgactgctggtaactgtgtggagtgcagttgtgggccagcgaatctcaatttgtattgcacaccgtcttcactatcagcatcatgttcaagtatgcaatgctctaatagcagcttaattcttggtaatgtgactgcacaacccaccactggtggctgcagtgtctcatcttgcaactatgatggctatgtcaatggaaccattgcaacatcgctatcctcaggtcttcaacccatgtgtccaggacctggagatgctggtggtgccaccccaggaggttccagcctttctccatcaaatgagcctgctgggaacagctcacaagcggctgcgataaatcaaccatgccgtttcctcctcattttcattctttctgtgacattgtccttgcgggtgtggattcctgtgtagagtattgttttttttaaaaaaataactatgtagagtatttgttggctgtatttgtattgagcgtggaaggccttattggggccaggtggaacctgaatgaagaatgcagtagcctgtcttcgttagtgtccggtgaaactttggtatgattttggtttctccagaatttgtatatgaataagcctatctccagaatctatccatcaaggcagtagcacgagatagagatggtaaggttcatggtccccatgggggcaccaagcttattgcctagagcttattgcctagtgcggctgctagtatgcatctcccattagtcctgcaaaaacgaaaaaaaaa

SEQ ID NO: 58740 - DNA, 2809 bp, Zea Mays
acacatttcacctactctccacacagttcacacccaacacttgagctcacacaatcacgctacagagcgcagagctgcacgctccaccggcgaactcacctcggccgccctcctctgccagatagcctccctctactattcaagcccaaaccctaaatcctcggttcccaaatggcgacgccgccgactgcgctgctgttgctcctcgcggcggcagcggcattccacggcgcgacggcgaagacgacgatcgagccgtgctctggcgcggacgcgtgcccggctcttctgggctacaagctctacgcggacatgaaggtgtccgaggtggcggcgctcttcggcgccgacccggcagcggtactggctgccaacgcgctggacttcgcctctccaggcgccgccaaccgcatcctccccgcgggaacacccctccgcgtgcccacccgctgcgcctgcgccgacggcgtccgcaagtccgtcgccatccgctacgccgcccggccttccgacacgctcggctccatctccgaggtcgtcttcgccggcctcccctcggccgaccagatccgcaccgccaacgggctcgccgccgaggaccccgacgcgccgctcaacccgggccaggagctcgtcatcccgctcccctgcgtctgcttcaactccaccgacaacaacctccccgctgtgtacctctcctatgtcgtgcaggtcggggacaccgtggaatccatcgccgccagccacacaaccaccgtcactgatatcagcaatgtgaacgccatggggagccccattgtcgcaccaggcgacatccttgccataccattgtctgcttgcgcctcagcatttcctaactctgcttcggactatggattgcttgtggcaaatggaacctatgcactgactgctggtaactgtgtggagtgcagttgtgggccagcgaatctcaatttgtattgcacaccgtcttcactatcagcatcatgttcaagtatgcaatgctctaatagcagcttaattcttggtaatgtgactgcacaacccaccactggtggctgcagtgtctcatcttgcaactatgatggctatgtcaatggaaccattgcaacatcgctatcctcaggtcttcaacccatgtgtccaggtacttgtgcaatcttcagttctagtgtccttcatatttagctactggagtgctgatgcagtaaatttcagtgttttactcttttgttcaaagttccttttcaacaccatcattgacttgtccaaagctgcatttttgaaacattcgtcaataaatgtattgtctagtcacaacctataagattttttaggtgtgtgcctcctttttagaagagagaataaaggacggccccgatgtataattaagtgtaaagaaaaatattcatgtcctagaatattaatatagaagcaaacatagttctgatcttcttatgtcaaatctatgatggtatttcctttttttatattggtagttgccctcaatcttgttttagttagtatcagattatccctgcctaaccctatctaccttgctttaaaggttctatatacttctttatttgaggtagtatcaaaggaaaccctgttaaataaatgaagtgatggttatttaactaaattatcaagggcacctttgaaacattcgtcaatatttgtattgtctagtcacaacctataatattttttaggtatgtgcctcctttttagaagagagaataaaggatgaacctgatgtatgatttcaagtgtaaaaaaaagatattcatgttccagaatattattctagccctttggtttggatttaaagcgaacatagttctgaactccttgtatcaaatttatgatggtatttcctttttttattggtaggttgccctcaatcttgtttcagttagtatcagattatccctgcctaacactacttaccttgctttaaaggttctgtatagtttctggaacatcattgacattataatacgtggattaaggcattaaccaaataaacatgatgtctagaaatgtgaagctttcactttgttctcaatgtatttcggtatagcaaacaataggaactgtaccgacagaattttgttagatggatgctgttgtttcatttgcccggtgctattcatcatgagttcctctgtttcgatctttactggtgtctgttctttcaatcactttgaccatgattacaggaccgcatcaatttcccccactcacggcggtgccaactgcggcaaaccatgggtcttattctccatcacctgcaccaggacctggagatgctggtggtgccaccccaggaggttccagcctttctccatcaaatgagcctgctgggaacagctcacaagcggctgcgataaatcaaccatgccgtttcctcctcattttcattctttctgtgacattgtccttgcgggtgtggattcctgtgtagagtattgttttttttaaaaaaataactatgtagagtatttgttggctgtatttgtattgagcgtggaaggccttattggggccaggtggaacctgaatgaagaatgcagtagcctgtcttcgttagtgtccggtgaaactttggtatgattttggtttctccagaatttgtatatgaataagcctatctccagaatctatccatcaaggcagtagcacgagatagagatggtaaggttcatggtccccatgggggcaccaagcttattgcctagagcttattgcctagtgcggctgctagtatgcatctcccattagtcctgcaaaaacgaaaaaaaaa

SEQ ID NO: 58741 - DNA, 774 bp, Zea Mays
aaacttccgaagacaagatttgatgatcaaagtgacaaggttacatcaccctatggcaatactgtgcatcataatgaaaatgctacaacgggccagtttgcattcaccacttcagaagctggaaactaccttgcatgtttctggatagacagcgtggagaaaggatcaggaacatctctaaatcttgattggaagatagggattgctgcaaaggactgggatactattgctaagaaagagaaaattgagggcgtagaactagagcttaggaaacttgaagctgcagtcgagtccatccatcataacttgctgtatctcaaagcaagggaagctgacatgcgaacagtgagcgagagaacgaattctagagttgcctggttcagcatcctgtcattgggagtctgcgttgccgtctctgtgctgcagctgtggcaccttcaagggttcttccggaagaagaagctcatttaaattcacgttttatcagtgtgtacttcccgtgttaaataccttaggaggacaattgtcaaatttatttcaaaaggaaactcgtatgatggacaaaacatgtctttgatacatgacttgaaactagcaacctatattccgtggaattgaggtcgaccttccatcttgattgccttgcagctgccggtaaataatgagtgctacgttcaatttttctcattatctgccatacttcaaatcgagatttttactctttatccttgtatctgattgttattaataattaaataataattactgtagaaa

SEQ ID NO: 58742 - DNA, 1842 bp, Zea Mays
cttcgctagacagtagacacacaggagatctgcaagtcaaccgaacagacattcgctggaagctctgctcggagtgaggtcgctgcgcatctaccacacgatgccgccgcctctccgctgtctccttctcgccttcgtcgtcgtcctctccggcttcccccgtctcgcccaccccttcacggctctcgagtctgaccagatcgcccgcttccaggaatacctccgcatccgaactgcgcacccatcccccgactacgccggcgccagcgccttcctcctacactacgccgcttcgctcggtctccacaccaccacgctccacttcaccccgtgcaagaccaagcccctgctcctcctcacctggcgaggctccgatccctccctcccctccgtgctcctcaactcccacatggactccgtccccgcggagcccgagcactgggcgcaccctccattcgccgcgcaccgcgacccgaccacgggccgcatctacgcgcgcggcgcacaggacgacaagtgcctccccgtccagtacctcgaggcgatccggggcctgcaggccgcggggttcgctcccgcccgcaccatccacatctcgcttgtccccgacgaggagatcggcggcgcggatgggttcgacaagttcgcccgatcggaggagttccgcgccctcaacatcgggtttatgctcgacgaggggcaggcgtcgccgacggacgtgttcagagtcttttacgcggacaggctggtgtggaggctcgtcgtgaaggcggcgggggcgccagggcatgggtcgaggatgttggacggcgccgccgttgacaatttgatggattgcgtggagaccatcgctgcgttcagggatgcgcagttcaggatggtgaagtccggggagaagggtcctggggaggtggtctcagtcaaccctgtgtacatgaaggccggcataccaagccccacgggtttcgtgatgaacatgcaaccttcagaagcggaggtcggctttgacctccgccttcctccaaccgaagacatcgagcagatcaagcggagggtcgaagaggaatgggcaccatctcacaaaaacctgacctacgagctggtgcagaaaggtccggcgacggatgtgtccggacgtcccgtatccacagcgacgaacgcgtcgaacccgtggtggctgacgttcgagagggccatcgcctccgcgggtggggagctgtctaagcctgagatcctgtcttcgaccacggactcacgctttgcgcggcagctgggcatccctgccctcgggttttctccgatgaccaggacgcccatactgctacatgaccataacgagtttctggaagacagagtgttcctgaggggcatccaagtgtacgaacatgtcatcagagcactaagctcgttccaaggctgattcgtaaaaaaaaaagaaaagaagaaggaaaagtggcagtgctgttgcgtggagtgtaacatagcaggttttgtaataattggttcagtcacaaacacgccaaaggaaacattccgaaactattgggatctgtgaaactgttgttgtgggaagaagactagcagctgggtcgtgtgatgagctgattgatgttcgggcttgttgcttgatatatctccaataatgcgtatatcccagacgttcaacacttgaaagtgcaagcgcggcttaggccttaaaaagaggagtttcatgacacacttaccaaaatcgtcaagatgaatggctgtgttcggtctgcgtgactgatcgaaccacgtcgaccttgcacgagcacacgggttcgtgtgcgtccctgtgagtaggaagaaccggagccgcgg

SEQ ID NO: 58743 - DNA, 498 bp, Zea Mays
atgaccaagatgtacatccacaaaaggcaagacatcatctgtgacgtgttcagactgcaggctaagaaggacctaacggaggttacccacaaggtctacttcgatgtcgagattgacagcaagcccgcaggtcggattgtcatggggctttttgggaagactgttcctaagacagcagagaacttccgagctctttgcacagggtttctggattgtttttacttgagtctggaacgacaggaatggaagcatacgagttactgttggcccagcatacgacaggaatggaagcaacaacaggaatggaagcaagaaggcacagagaggcagaggctgtacctagaatcagcaatgccagaagccaagtcatggccatcaccagttttatcagctgagcctcctaatatcttcctcgcaacctgtctggtagctgaggacccaccttttgagagtggcgttggcgaccttgcacgctacatcgaagtgcatagtctgtaa

SEQ ID NO: 58744 - DNA, 2603 bp, Zea Mays
ctcagttctcacacattcatcgcgccgcttctgagcctggtcacacagattcgcactgtacatagcgagacagcagaagccaaggaagctgagagagcagagaatgctctatagttcagactagaaagaaaagcagtgcagggccacaggggaagagggagccccgcccaagatcgcaaaggcaaagtggcagacaaccatggaggtggagccaccaccagctgccgcggtcgctgtagcagcagcgcttctgaaatgccgcggcaacggtggcggcggggagccaactctcgaggccttcggtaaggcgcggtcgaggagcccgagcagcgcggccgccgcggggcctccacaagaaccggacggcacccccggccctagtcgccgccgcggggaggaggaggagtcgctgcggcgcgggctcgcggctgctcaggcgcgggcacgggcgcggcggaaggcggggcacgccacgccgtcgccgtcctggaagctggagccgtcgccgccgcggccggaggatgaggcgctggcggaggcggattcgggagcggggaggaggggcgcgccggccgcgtcggcgcggcagctgggcgccaccttgtgggagatccaagacgtcatccgggccaccggcgcgggccgacggatccgacgccgcgggcggagggcgcccaccgcggatgcggatcggccacggagttcaggtggctttggagcacaaattccagcttcagtcatggagcatgagaagttacatgaagaaagatgtcactcaagacagcctctttctcctgcaagtttcactagctcagttggagcaaccacaataaaccttatcagcccaactcggtctttggattgcaatgccagatttaggcaggcaggtactgatattaaaacgtcaacagagctattgaaagttctcaatcgaatatggagcttggaagaacagcatgcagctgatgtgtcagcaatgaagggactgaaacgagagttgcatcatgcccaggcatgcattcaagaacttatgcaagagaggcagcagtatcatcaggaaattgattcactagccaggcaagccaccgaagacaaaatggctcgaaggagcaaggaccaagagaagatgagagcagcccttcgttccctgcaagaggagcttgaagatgagagacgtctaaggaaacattctgagactctccataggaagctaggcaaagagctatccgagatgaaatcagcattttgcaaggctgtgaaggctctggagaaagagaagaagacaacctgcctgttggaagacctttgtgatgagtttgcgagaggaatcagaaactacgaggaggaagtcaggttgttaaagcaaaaacacgtaaaggagtatgaacttaagtttgacaagtctgtagttcatatttcagaagcatggcttgacgagcgaatgcagatgcaaaagactaatatgagggaatattcgtccgggaaaacctcaatcacagagcggctgagcagtgagattgagggttttctccatcatgctaaaaggccaggtaattccaagaatgataacttagacaatggtaacgaaaagcgtgatgcgagtctgtgccggcagtcccttgagtcagtccatctgaatggagccactagtgtccctcggctagctgaagacgacgacgatggcagttctattgccagtgacctgcattgctttgaactgaacacgcatggaggcaccattaggaatcatgagcttgcaggagctcgaaggagggttacaggctgcatgcattcaccaatgcgaaggctggaatattccaacggcgtatctgtagaaggttcgccgatgtcaaatgtgccaccttgcccgaagaaagaaaagacgaggtctggcgtcagcagacagcacttcatcacatcagcaccagaaactagctcacgcaatgacgctagccttgctcctgctgcagatgagcagaacgagactgtcatgacccaggtctctaggcgactacgtgatgacctgctgaagatcaaatcagaggctcctcagcatgcatatctaggacagaaatcaaaccagccccggacaaatgagtttcatgaatacagtccagcaccagcaccagcacgtcgtcatctgaataacccagcccagtccttggactgcgagatctctgaacccccagctcatcagctcacaggcacaaaggagaacagtcttaaggtgaaactgctgcaagcaaggctagaggggcagcacgctcggctgagcgcgtcagtgttccccctgatcagcacaagaaggaagtgatgccactcgtgagcttccatgatttcgatccgcaacacagagttgcaattgtaagatagctgaatattgttagctcgaggcaattggactcggtgtgaatcctagatccagccgcgtatgttgtagatttgatctgctaactgccagactagaatccaatcaagatggacacggcaatcagatcttgtaacttctgtacagtaatgatttgctgttggtagtttccaatctgtctgtaatgatgcctgactgactttctaatcggctattatgacagttctttgtgatc

SEQ ID NO: 58745 - DNA, 2894 bp, Zea Mays
cacacattcatcgcgccgcttctgagcctggtcacacagattcgcactgtacatagcgagacagcagaagccaaggaagctgagagagcagagaatgctctatagttcagactagaaagaaaagcagtgcagggccacaggggaagagggagccccgcccaagatcgcaaaggcaaagtggcagacaaccatggaggtggagccaccaccagctgccgcggtcgctgtagcagcagcgcttctgaaatgccgcggcaacggtggcggcggggagccaactctcgaggccttcggtaaggcgcggtcgaggagcccgagcagcgcggccgccgcggggcctccacaagaaccggacggcacccccggccctagtcgccgccgcggggaggaggaggagtcgctgcggcgcgggctcgcggctgctcaggcgcgggcacgggcgcggcggaaggcggggcacgccacgccgtcgccgtcctggaagctggagccgtcgccgccgcggccggaggatgaggcgctggcggaggcggattcgggagcggggaggaggggcgcgccggccgcgtcggcgcggcagctgggcgccaccttgtgggagatccaagacgtcatccgggccaccggcgcgggccgacggatccgacgccgcgggcggagggcgcccaccgcggatgcggatcggccacggagttcaggtggctttggagcacaaattccagcttcagtcatggagcatgagaagttacatgaagaaagatgtcactcaagacagcctctttctcctgcaagtttcactagctcagttggagtatgtatccattcactccctctagagacttcttggtttactttggtgttttacttacagcattagttacaaatgccagttcttctgatattccctccctcttctgtctcgtgcttgtcaatataacaagttatggactgcattgtacttgtccaaatgcttgtccattctatcatcatgtgcactgtttttattgtgtcacacttgtgatgccattgcatattattagttccaagttctgcatctcgagacacttttgcattaatacatgtttcttaaaaacatctaatcatttgacaggcaaccacaataaaccttatcagcccaactcggtctttggattgcaatgccagatttaggcaggcaggtactgatattaaaacgtcaacagagctattgaaagttctcaatcgaatatggagcttggaagaacagcatgcagctgatgtgtcagcaatgaagggactgaaacgagagttgcatcatgcccaggcatgcattcaagaacttatgcaagagaggcagcagtatcatcaggaaattgattcactagccaggcaagccaccgaagacaaaatggctcgaaggagcaaggaccaagagaagatgagagcagcccttcgttccctgcaagaggagcttgaagatgagagacgtctaaggaaacattctgagactctccataggaagctaggcaaagagctatccgagatgaaatcagcattttgcaaggctgtgaaggctctggagaaagagaagaagacaacctgcctgttggaagacctttgtgatgagtttgcgagaggaatcagaaactacgaggaggaagtcaggttgttaaagcaaaaacacgtaaaggagtatgaacttaagtttgacaagtctgtagttcatatttcagaagcatggcttgacgagcgaatgcagatgcaaaagactaatatgagggaatattcgtccgggaaaacctcaatcacagagcggctgagcagtgagattgagggttttctccatcatgctaaaaggccaggtaattccaagaatgataacttagacaatggtaacgaaaagcgtgatgcgagtctgtgccggcagtcccttgagtcagtccatctgaatggagccactagtgtccctcggctagctgaagacgacgacgatggcagttctattgccagtgacctgcattgctttgaactgaacacgcatggaggcaccattaggaatcatgagcttgcaggagctcgaaggagggttacaggctgcatgcattcaccaatgcgaaggctggaatattccaacggcgtatctgtagaaggttcgccgatgtcaaatgtgccaccttgcccgaagaaagaaaagacgaggtctggcgtcagcagacagcacttcatcacatcagcaccagaaactagctcacgcaatgacgctagccttgctcctgctgcagatgagcagaacgagactgtcatgacccaggtctctaggcgactacgtgatgacctgctgaagatcaaatcagaggctcctcagcatgcatatctaggacagaaatcaaaccagccccggacaaatgagtttcatgaatacagtccagcaccagcaccagcacgtcgtcatctgaataacccagcccagtccttggactgcgagatctctgaacccccagctcatcagctcacaggcacaaaggagaacagtcttaaggtgaaactgctgcaagcaaggctagaggggcagcacgctcggctgagcgcgtcagtgttccccctgatcagcacaagaaggaagtgatgccactcgtgagcttccatgatttcgatccgcaacacagagttgcaattgtaagatagctgaatattgttagctcgaggcaattggactcggtgtgaatcctagatccagccgcgtatgttgtagatttgatctgctaactgccagactagaatccaatcaagatggacacggcaatcagatcttgtaacttctgtacagtaatgatttgctgttggtagtttccaatctgtctgtaatgatgcctgactgactttctaatcggctattatgacagttctttgtgatc

SEQ ID NO: 58746 - DNA, 2304 bp, Zea Mays
cgcagtagcggacggacgcggcgccgtcacaggcaacacaactgagatgggatcggcggcgacggacttccttaggggcgagctgcgacgacggcctcccctaggtgcgagcagcgtcggatcccagaggcgcgtgtagcgggcgacggctcccttagggcgtgagcgacgacatgtttttatgctattctgtatacatatttatgccaacgtcaatatgtgtttacgacatatatttcagtcaatggttgcgcttccatctattgtatatttatgatatttctattcacattttacgcaaacgtttatagatttgtaagcattatctcgttacctaacccaatgtgtatatagggtttctaacatttacgttagctcggtgtttacggtcaaaactgagatgtcttacactcaaaactgaatgtttttacgatcgaacatggagatgcgtccaaacagtgacccgcatgccaatttttaagtagtgtatcgtaatgcataaatactttcaccgtgcagcataattagtatcaatatatatcataaacagtctgtaacgagcctagctacatggctgttgtagagatcatattttatggacgaaataaagcatttaaatcagattttttgtttccatgcatgccaatccatttcttttcaacgcatatttttaccatcctaaatttgtgcgcatgcagcaagaaacatattttttacgcggtgtaccacactataaatatctacaccgtgtagcataattagtatcagtatatgtcataatctgattccaacgagcatagctacatggttgttggagagatcctatttttatgaacgaaatttaccatttaaatcagtttttttggtttccatgcatgccaatttattttctttcaacgcacattctttgccatcctaaatttgtgtgcatgcaataggaaactgattttttacacggtgtaccacactgcataaatatctaaatcgtgtagcataattagtatcaatatatatcataaactggttctaacgagcctagctgcatgattgtttgtagagattctatatttatgggggaaataaaacatttaaatcagattttttgtttccatgcatgtcaatccatttcctctcaacggacattcttgtcatcctaaatttgtgcacatgtaacaagaaactaatttttatgtgacttacagtattgcataaatatctacattgtgtaacataattagtatcaatatatatcataaaatattttaacgagattagctacatggctgttatagagatcctatatttatggacagaataaagcattcaaatcagatttttttgtttctatgcatgtcaatccatctcctaaattgtgtgcatgtcttccaattttgttgcgcatgcaaatgaaaacaaaaggtgtgcatgcagtgatgggcgtgggggtggaggcgaccaggctggtctggtctggtggtgcaggggacggctggggctggtctggtcggatgttgcaggggtggctggggcttccactatatatatatatatatatatatcaggcaatatgtccctaatcaatcactaccatatatagctggcaggccataggccatgcactagccataaatacagtaatctgtccatatacacagtaatatgtctagcaaagtcaaatccttcaacctcctgtagtgctgcaagtacttcagatgaactgcattgtagtatcaaaccaaactgtcttattagacccatacattatttctaggaatagaacacactgaattaagtagaatgatcagttactgcaaccacatgaaatatctttaaaaaaaattaaaagccttaacggaactgcaagctatgatgttttttttgtgatataaactgtattttcagtcttcaagttaagaaatgactaacacatactcattatcagcatcatttatagtttttcagaaataatatatgacatgttcttgctgccccatatattatttttcagtattcatcaaaatactacatcacatatcatatattcagcatgagcaagagcacatactaatttccttgctatatatgattaacataagaaacattttcaaaaatgtatattccataccaatcaccacatcaaaattcaagaaggcacatgtcgggattagggttacggagatcgtacgagtgataggtttggggtctacggccaggaccccggcgcttggcctccgttgggctgttggtggagaaggtgcggtactgttgggggtgaatagtagatgagttggtgggaagcacggg

SEQ ID NO: 58747 - DNA, 1776 bp, Zea Mays
ctcaagacagcctctttctcctgcaagtttcactagctcagttggaatttaggcaggcaggtactgatattaaaacgtcaacagagctattgaaagttctcaatcgaatatggagcttggaagaacagcatgcagctgatgtgtcagcaatgaagggactgaaacgagagttgcatcatgcccaggcatgcattcaagaacttatgcaagagaggcagcagtatcatcaggaaattgattcactagccaggcaagccaccgaagacaaaatggctcgaaggagcaaggaccaagagaagatgagagcagcccttcgttccctgcaagaggagcttgaagatgagagacgtctaaggaaacattctgagactctccataggaagctaggcaaagagctatccgagatgaaatcagcattttgcaaggctgtgaaggctctggagaaagagaagaagacaacctgcctgttggaagacctttgtgatgagtttgcgagaggaatcagaaactacgaggaggaagtcaggttgttaaagcaaaaacacgtaaaggagtatgaacttaagtttgacaagtctgtagttcatatttcagaagcatggcttgacgagcgaatgcagatgcaaaagactaatatgagggaatattcgtccgggaaaacctcaatcacagagcggctgagcagtgagattgagggttttctccatcatgctaaaaggccaggtaattccaagaatgataacttagacaatggtaacgaaaagcgtgatgcgagtctgtgccggcagtcccttgagtcagtccatctgaatggagccactagtgtccctcggctagctgaagacgacgacgatggcagttctattgccagtgacctgcattgctttgaactgaacacgcatggaggcaccattaggaatcatgagcttgcaggagctcgaaggagggttacaggctgcatgcattcaccaatgcgaaggctggaatattccaacggcgtatctgtagaaggttcgccgatgtcaaatgtgccaccttgcccgaagaaagaaaagacgaggtctggcgtcagcagacagcacttcatcacatcagcaccagaaactagctcacgcaatgacgctagccttgctcctgctgcagatgagcagaacgagactgtcatgacccaggtctctaggcgactacgtgatgacctgctgaagatcaaatcagaggctcctcagcatgcatatctaggacagaaatcaaaccagccccggacaaatgagtttcatgaatacagtccagcaccagcaccagcacgtcgtcatctgaataacccagcccagtccttggactgcgagatctctgaacccccagctcatcagctcacaggcacaaaggagaacagtcttaaggtgaaactgctgcaagcaaggctagaggggcagcacgctcggctgagcgcgtcagtgttccccctgatcagcacaagaaggaagtgatgccactcgtgagcttccatgatttcgatccgcaacacagagttgcaattgtaagatagctgaatattgttagctcgaggcaattggactcggtgtgaatcctagatccagccgcgtatgttgtagatttgatctgctaactgccagactagaatccaatcaagatggacacggcaatcagatcttgtaacttctgtacagtaatgatttgctgttggtagtttccaatctgtctgtaatgatgcctgactgactttctaatcggctattatgacagttctttgtgatc

SEQ ID NO: 58748 - DNA, 2359 bp, Zea Mays
gtctgacatgttttaaaccatatttgtactaatgatttctttaattacactcctaaaatttaagactaaactttagtctatagaaatcctatttaaaagatctattttagtcttcccgtttagtattttcaaaacaaaaaatgactcactaaaacttagaggttggaaccaaacaccacggagggtacgaatttctacttcgagggtacgaatttctacttcgtgaagtgcgtgaagtgtatttatctacctgtccccaccggagggtacgaatttactctgtcttgttcagctgtcctttttcttcccgtttaaacacccccagatttctctatatcacgacgctacccctccacgtctccgcttctcgtgttcttgttcgtctccgcctcaggcaaactccacacggacacggtcacacctcgctcgctctcgctcccgtatcgcggtttccttttcgaagccttgctaggtttagctggggcctccgtctatcctgtcaatggccccttaggcggctgtacttcagacttcagaggtgacgtgaggcgtggggacgcgcgtagctgattggttcgaggaggcggggatggacccggacttctcgccggcgagtgggggcccgagctttgagttcgccttcaactcggtcaacttctctgaccgggtgttgcggatcgagatcgtcgctggggatgacgccctcggggccaagggcgccaccggcgaggggtgctcatctcttgccgactgggcgtgccaccgcaagcgacgacgggaggagctccgacgcgacaaagatccagcaaactgcaaagttgaagctgaagaatgtgatgcctacgaggaaggcaatgagcctgtagctatgatagaagaatctccgcctgatattgaggcagatggtgaggatggaaaaagcagcgactcatactgtagtatggagtgtactcaggttttgagagttaagtctatgtacatcagctctgcaattctagctgcaaagagccctttcttttacaagcttttctcaaatggaatgaaagaatccgaccagaggcatgcaactcttaggataactgcttcagaggaaaatgcgcttatggagcttctaagctttatgtatagcggcaagttgacgacaaaccagccaactgtcctgctggatatattgatgatcgctgacaaatttgagttcagccattgacggacaccgccaaggaattccttgccaacaaatacaaggatttgactaagttccaagatgaagcaatgaacattcctcttgctggaattgaagccatcctatggagcaatgaccttcaggtcgcgtcggaggatgctatctacgacttcatgataaagtgggcacgtgctcaatacccaaaattggaggaaagacgtgagatcttgggcacacgcttgctgccccttgttcggttctgccatatgacctgcaggaagttgcggaaggttattgcctgcagtgatctggatcacgagcaggcgacgaaatgtgtcacagaggcacttctctacaaagctgatgcaccacataggcagcgtgcccttgcagcagacgtgatgacatgtaggaagtatgctgagcgagcttacaaatatcgcccgcttaaggttgtagagtttgataggccgtaccggcagtgcatagcatacttggacctgaagcgagaggagtgcagccgacttttcccatctgggcggatatactcgcaagctttccatctagctggacagggcttcttcctctcagcacactgtaacgtggaccagcaaagtgcgttctattgttttggtctcttcctagggatgcaagagaaagggtcgacaagtgttaccgtggattatgagttcgctgcaaggacaaggccgtcaggcgagtttgtcagcaaatataagggctactatactttcactggcggtaaggctgttgggtaccggaatctctttgcgatcccgtggccgttattcatggctgatgacagtctcttctttatcgacggggtattgcatctcagagctgagctgaccataaaacaaccctagatgaggccgtgtttgtgccgcgcgcgtgtccaaatccatgcaatggtgttctgcagtgtagaatatggaaatcttgtgtgctgttttgttttgaaaacgacaactcaattctctcttgttcagttgtttgtacacctgaggaggatcatgtcatgttttgtactctcactaaactgtgataagtgatttagctaatcaaactttaagttcaccagcaacaaactaccacctcctatccattgcatcacttattggtttgtgcatgtattataaatatatactaattttttta

SEQ ID NO: 58749 - DNA, 2258 bp, Zea Mays
gtctgacatgttttaaaccatatttgtactaatgatttctttaattacactcctaaaatttaagactaaactttagtctatagaaatcctatttaaaagatctattttagtcttcccgtttagtattttcaaaacaaaaaatgactcactaaaacttagaggttggaaccaaacaccacggagggtacgaatttctacttcgagggtacgaatttctacttcgtgaagtgcgtgaagtgtatttatctacctgtccccaccggagggtacgaatttactctgtcttgttcagctgtcctttttcttcccgtttaaacacccccagatttctctatatcacgacgctacccctccacgtctccgcttctcgtgttcttgttcgtctccgcctcaggcaaactccacacggacacgaggtgacgtgaggcgtggggacgcgcgtagctgattggttcgaggaggcggggatggacccggacttctcgccggcgagtgggggcccgagctttgagttcgccttcaactcggtcaacttctctgaccgggtgttgcggatcgagatcgtcgctggggatgacgccctcggggccaagggcgccaccggcgaggggtgctcatctcttgccgactgggcgtgccaccgcaagcgacgacgggaggagctccgacgcgacaaagaatctagaaaatacatgccagatccagcaaactgcaaagttgaagctgaagaatgtgatgcctacgaggaaggcaatgagcctgtagctatgatagaagaatctccgcctgatattgaggcagatggtgaggatggaaaaagcagcgactcatactgtagtatggagtgtactcaggttttgagagttaagtctatgtacatcagctctgcaattctagctgcaaagagccctttcttttacaagcttttctcaaatggaatgaaagaatccgaccagaggcatgcaactcttaggataactgcttcagaggaaaatgcgcttatggagcttctaagctttatgtatagcggcaagttgacgacaaaccagccaactgtcctgctggatatattgatgatcgctgacaaatttgagttcagccattgacggacaccgccaaggaattccttgccaacaaatacaaggatttgactaagttccaagatgaagcaatgaacattcctcttgctggaattgaagccatcctatggagcaatgaccttcaggtcgcgtcggaggatgctatctacgacttcatgataaagtgggcacgtgctcaatacccaaaattggaggaaagacgtgagatcttgggcacacgcttgctgccccttgttcggttctgccatatgacctgcaggaagttgcggaaggttattgcctgcagtgatctggatcacgagcaggcgacgaaatgtgtcacagaggcacttctctacaaagctgatgcaccacataggcagcgtgcccttgcagcagacgtgatgacatgtaggaagtatgctgagcgagcttacaaatatcgcccgcttaaggttgtagagtttgataggccgtaccggcagtgcatagcatacttggacctgaagcgagaggagtgcagccgacttttcccatctgggcggatatactcgcaagctttccatctagctggacagggcttcttcctctcagcacactgtaacgtggaccagcaaagtgcgttctattgttttggtctcttcctagggatgcaagagaaagggtcgacaagtgttaccgtggattatgagttcgctgcaaggacaaggccgtcaggcgagtttgtcagcaaatataagggctactatactttcactggcggtaaggctgttgggtaccggaatctctttgcgatcccgtggccgttattcatggctgatgacagtctcttctttatcgacggggtattgcatctcagagctgagctgaccataaaacaaccctagatgaggccgtgtttgtgccgcgcgcgtgtccaaatccatgcaatggtgttctgcagtgtagaatatggaaatcttgtgtgctgttttgttttgaaaacgacaactcaattctctcttgttcagttgtttgtacacctgaggaggatcatgtcatgttttgtactctcactaaactgtgataagtgatttagctaatcaaactttaagttcaccagcaacaaactaccacctcctatccattgcatcacttattggtttgtgcatgtattataaatatatactaattttttta

SEQ ID NO: 58750 - DNA, 1223 bp, Zea Mays
ctgtttcgcgctcccttccggtccaaaccaaaccgtgcgtccgtgtgcgactgcgacgagaagcttccagaacccaccagctaactacgtccgtcctccaccaatcccatcttcggacgccacgacaactcccctccctcttccccgtccgtatttatttatacacccccagtccctacccacttgttccttcttgcttctccatcgagttggattgggttcaaagttgggcttttggacagctgtggtgtgcacggcagctctgtgacttgtgaggaggaagggaggaagaaagcggatccatggcgtcgaagcggatcctcaaggagctcaaggacctgcagaaggatcctcccacctcttgcagcgcaggccctgttgccgaagatatgttctactggcaggcgacgattatggggccatcagatagcccatacgctggtggcgtatttttggtcactattcactttccaccggactacccattcaaaccaccgaaggttgcattcaagacgaaggtttaccacccgaatatcaacagcaacgggagcatctgtcttgatatcttgaaggagcaatggagccctgcactgacagtttctaagagattgctcacttgtacaagactgatcgcgtgaagtacgaatctactgctaggagctggactcagaaatatgcaatgggctgacaagctattggtctctcatagacccttctgtaactgaaaccagatgtctaaattaatttgtccattcgtgcatcgaacttttgatatataatggaaggagaaacattgatagtacctcggtgttgtctgtggtccaatttaatttaatttaattttggtcttgtgggctgcttgcatggtcgatagttaggttcttcggctgttcctttgcggtcggtgttatctctgacatggagtcaatggtggtgcatgtcttggatgtgtcatcatagtgttaaacttgtcatcttgacaaggtagatatgttttgtcacactgatagttatcgttgattacgttgtcatgtataatatagttgttaaacagtgtagttgtttatactttataatgcttgcatgcacgttagtatgttcatgagtagctacaaggacgatggcatgcattgcatagcgacctcagttatggctactactcattgtgtagctactcggacacaggctacataattgcctcaagtacatctgctacctccagc

SEQ ID NO: 58751 - DNA, 2649 bp, Zea Mays
cacgcccataacctccacacatatatatattgtagttgtagtgagatggcacagcagaacagaggttattcgttttagctacccgttttgaagagaagccgattttggaggagacgatgatgagtccggcgtcggagcgcagcctcatcatccagagcgacgacgacgacgacgcccgatccggccacgacgtggaggagccggagcaggactccgactcctcctcgtcgtcctcatcctgcgccaccccacgccgcggcccaagctcacccccctacatccagcaatggccgcagagttacaggcaatcgatcgacattctcagcagcgtgcagtcacccaacctgagctttctggggactccaactctgagcaggctgtcgaactctttcctcgccatcaccgattctttccggagcaaggcccccgaaacgatctctagctttatcaagccactccttggccccacgccaagtgacgagcagcagcggcagcatgaaggcacccgaaagagttccgagtaccttgtgccctcgagaagatcatctctgcagcagatcccagaggatcaaaagccacctgtaggtggccatggggcgtctcatgaccagaactgctcttacacccagggagtgatgaatggaataaatgttctatgtggtgtggggatcctatcaacaccttatgccatcaaacaggggggctggattgggctggcgatactctgtacatttgctcttctcgcatggtacacaggtgtgctcctgcgccattgcctggacagcaaggagggcctcaagacatacccagatattggccatgcagcctttggcagcacaggccgcatagttatctcgataatactgtacgtggagttgtatgcatgttgcatcgagtatttgatattggagggtgacaatttgtcaaaattattccccaatgctcacctgaccattgggagcatgacactgaactcacatgtattttttgcaatcttgactaccatcatagtcatgccaaccacctggctccgtgacctgagctggctgagctacatttcagctgggggtgtcattgcatcaatccttgtggtcatctgcctgttcttggttggggttgtcaatgatttcggctttgagaatgaagggactgcactgaacgccccaggaattcctattgcaattggattatatggttactgctactcagggcatggggtttttccaaatatctattcctccctgaagaatcgcaaccagtttccttcaattctttttacttgtattgggctgtctacctttttgtatgctggtgctgcagtgatgggatacaaaatgtttggtgaagccacagagtcccaattcacactcaacttaccagataattctgtcatttctaagattgctgtttggacaacggtaattgttgcttgataaaccttttcaaattcctctttcaccccctccgtctcaaattaaatcaacttctaaagttatcctaagtcaaactattttaagtttgatcaaccttatagaaaagaacaccaatatttataacaccaaattagtatcactagatacactgtgaaatatatttcataatatacttatttggtgtcatggatgtaattataatatcatataaagttggtcaaacctaagatagttgacttagggtgaccctaagaattaatttattttgaaacggaggtagtaagaaaaagggcctgaccttgttgtttaataataattaatcatctctcgatgcttactgcaggtggcaaatccaataaccaaatatccttggtgtgccaattgatagtctcataaaaaaaaatggaacaaatgtttctttatgtccaagtatattttagtacatagagttagttaactacttagattcaaaagtaaaaagggtacactggaaatcgtgctgaaacatttctcccaagctcctctaaaatacagtcgggttcttcattccattgaggataccatacacgttttactacatcctcagattattgcaatattgttcgcttactttccttaatgaataaacacatatgcattaactattattccattggctatgagtttggaagagctgctgccaccaaaccaacaaaagtattctacaataatcatgcttagatcatctctggtgatatcaaccctcctgattgctctatctgtgcctttctttggacttgtgatggccttggttggttctttgtttgccatgcttgtgacctacattttgccttgcgcttgttttttggcgatcctcaagacaaaagtggggtggcatcagatagcagcttgctcgttcatcatagttgtcggggtttgctgtgcctacgtgggaacatactcgtccctgtcgaagataatccagaactacgcatagcacagctgttcctgtgatcctgtatatgcatctgcccgacaaaatcatgtgtgtgctatatgggccgaacatatgtacaagatgaaagtttaccattcaattcactcgatgtataataaattattggtgccttatcatagggctcaatgatttctactacgattttaaggttgtatggtgcgtgagtaacattgttccttatggtgagaaaaaagttgatttggtcttcttctagcaatt

SEQ ID NO: 58752 - DNA, 2274 bp, Zea Mays
cacatatatatattgtagttgtagtgagatggcacagcagaacagaggttattcgttttagctacccgttttgaagagaagccgattttggaggagacgatgatgagtccggcgtcggagcgcagcctcatcatccagagcgacgacgacgacgacgcccgatccggccacgacgtggaggagccggagcaggactccgactcctcctcgtcgtcctcatcctgcgccaccccacgccgcggcccaagctcacccccctacatccagcaatggccgcagagttacaggcaatcgatcgacattctcagcagcgtgcagtcacccaacctgagctttctggggactccaactctgagcaggctgtcgaactctttcctcgccatcaccgattctttccggagcaaggcccccgaaacgatctctagctttatcaagccactccttggccccacgccaagtgacgagcagcagcggcagcatgaaggcacccgaaagagttccgagtaccttgtgccctcgagaagatcatctctgcagcagatcccagaggatcaaaagccacctgtaggtggccatggggcgtctcatgaccagaactgctcttacacccagggagtgatgaatggaataaatgttctatgtggtgtggggatcctatcaacaccttatgccatcaaacaggggggctggattgggctggcgatactctgtacatttgctcttctcgcatggtacacaggtgtgctcctgcgccattgcctggacagcaaggagggcctcaagacatacccagatattggccatgcagcctttggcagcacaggccgcatagttatctcgataatactgtacgtggagttgtatgcatgttgcatcgagtatttgatattggagggtgacaatttgtcaaaattattccccaatgctcacctgaccattgggagcatgacactgaactcacatgtattttttgcaatcttgactaccatcatagtcatgccaaccacctggctccgtgacctgagctggctgagctacatttcagctgggggtgtcattgcatcaatccttgtggtcatctgcctgttcttggttggggttgtcaatgatttcggctttgagaatgaagggactgcactgaacgccccaggaattcctattgcaattggattatatggttactgctactcagggcatggggtttttccaaatatctattcctccctgaagaatcgcaaccagtttccttcaattctttttacttgtattgggctgtctacctttttgtatgctggtgctgcagtgatgggatacaaaatgtttggtgaagccacagagtcccaattcacactcaacttaccagataattctgtcatttctaagattgctgtttggacaacggtggcaaatccaataaccaaatatccttggtgtgccaattgatagtctcataaaaaaaaatggaacaaatgtttctttatgtccaagtatattttagtacatagagttagttaactacttagattcaaaagtaaaaagggtacactggaaatcgtgctgaaacatttctcccaagctcctctaaaatacagtcgggttcttcattccattgaggataccatacacgttttactacatcctcagattattgcaatattgttcgcttactttccttaatgaataaacacatatgcattaactattattccattggctatgagtttggaagagctgctgccaccaaaccaacaaaagtattctacaataatcatgcttagatcatctctggtgatatcaaccctcctgattgctctatctgtgcctttctttggacttgtgatggccttggttggttctttgtttgccatgcttgtgacctacattttgccttgcgcttgttttttggcgatcctcaagacaaaagtggggtggcatcagatagcagcttgctcgttcatcatagttgtcggggtttgctgtgcctacgtgggaacatactcgtccctgtcgaagataatccagaactacgcatagcacagctgttcctgtgatcctgtatatgcatctgcccgacaaaatcatgtgtgtgctatatgggccgaacatatgtacaagatgaaagtttaccattcaattcactcgatgtataataaattattggtgccttatcatagggctcaatgatttctactacgattttaaggttgtatggtgcgtgagtaacattgttccttatggtgagaaaaaagttgatttggtcttcttctagcaatt

SEQ ID NO: 58753 - DNA, 1555 bp, Zea Mays
cacagctaatttattattctgtgatgttcaccaacgttagcaggcgtttcactgaaatggctgatacatgtaaacctattaagagatctaactgcagaatcttctcgtggtatgccgttggtgaatgcccgctctactgaacctagacgcgtttcctacaggccagtgtccaggaataaatgttctatgtggtgtggggatcctatcaacaccttatgccatcaaacaggggggctggattgggctggcgatactctgtacatttgctcttctcgcatggtacacaggtgtgctcctgcgccattgcctggacagcaaggagggcctcaagacatacccagatattggccatgcagcctttggcagcacaggccgcatagttatctcgataatactgtacgtggagttgtatgcatgttgcatcgagtatttgatattggagggtgacaatttgtcaaaattattccccaatgctcacctgaccattgggagcatgacactgaactcacatgtattttttgcaatcttgactaccatcatagtcatgccaaccacctggctccgtgacctgagctggctgagctacatttcagctgggggtgtcattgcatcaatccttgtggtcatctgcctgttcttggttggggttgtcaatgatttcggctttgagaatgaagggactgcactgaacgccccaggaattcctattgcaattggattatatggttactgctactcagggcatggggtttttccaaatatctattcctccctgaagaatcgcaaccagtttccttcaattctttttacttgtattgggctgtctacctttttgtatgctggtgctgcagtgatgggatacaaaatgtttggtgaagccacagagtcccaattcacactcaacttaccagataattctgtcatttctaagattgctgtttggacaacggtggcaaatccaataaccaaatatgcattaactattattccattggctatgagtttggaagagctgctgccaccaaaccaacaaaagtattctacaataatcatgcttagatcatctctggtgatatcaaccctcctgattgctctatctgtgcctttctttggacttgtgatggccttggttggttctttgtttgccatgcttgtgacctacattttgccttgcgcttgttttttggcgatcctcaagacaaaagtggggtggcatcagatagcagcttgctcgttcatcatagttgtcggggtttgctgtgcctacgtgggaacatactcgtccctgtcgaagataatccagaactacgcatagcacagctgttcctgtgatcctgtatatgcatctgcccgacaaaatcatgtgtgtgctatatgggccgaacatatgtacaagatgaaagtttaccattcaattcactcgatgtataataaattattggtgccttatcatagggctcaatgatttctactacgattttaaggttgtatggtgcgtgagtaacattgttccttatggtgagaaaaaagttgatttggtcttcttctagcaatt

SEQ ID NO: 58754 - DNA, 551 bp, Zea Mays
tctcgataggaacttcagactaccacacacagttttattcttgccagggaaaaaactggttctgccgtacaaagaatcacaaagttccatagaaactaaaaaaatgttaaacccaaagcaacattgcacaacctttgatcgcttactgatgttcgtctatgttgacagcaattcaactcccatgtagataaataccatgatatggtcttagtttggacatggcacgcatggtccgtacgtctacgtctttcttcgtcacgaaaactgtatgctgaaacccttctcagttttggtggcatccatactaccaaactcatcaaagtcaacccgagagacaccatccctgtaattaccccattcttcagttgagctgtcatcatcctcgtcctttgatgccgggacatgtaatccttctataggtgccggcaagggctcttcggtaaagtaccgatcattcagcagatcaacagcactggtcctctttgctgtgtcatagcaaattagctgctttatgatgctaacctcagtaggagatctgttaggcagacatg

SEQ ID NO: 58755 - DNA, 2866 bp, Zea Mays
gttgtggaacccatgtttccatgcctgaactttgctcgtgtgggtacatttcttgaaatgtaggtgctgactgctgaagtatcctagcctgagtatgtgtcaacaaaagcaaatttggtcaagctccaactaattgaaacagaggtcacaaatataccattgactctcagagaacatgagtacacttacaggacacaagtttaacttcggcacttcttgcttagaatggtacaaaaaaataaccagaactaatgccttatattattgctagttaatcttcttaattgttagatgtcaccaggtcgtgagttcgaagcagcctctccgtattcacgacctcggtttattactttcacaaaccccaatcatgtgggagtcactagcactaggtttacccttgcactgggtttatccagggtttacctgttaaatgtcacctttgtgatgaaggcgaagaaacaattgagcgtttactgaatcacatgtgtctttgcaaagcaattctggttggccttcaggatctatagccacagcttggatatacttccttggatgactatttggcaaggataaattatacagttaaatggtcctgcccaaaaagagcttacttcccttgttctcttaggaccaggcagatctggaaacattgcaattgatgtgtttttatggtatttctcctaatctagatggagcgcttgtctttgttagtgaggatttgcaaatatggggtatgaatgtggctcaaggtatctcctacctgcttgcttttgcaccagaggaagggtatgcattggtcaaagttattaatatagtagccaagggtgcaaatgtaatcttagaactttctctgtgtgcaggtgtcttgtaagggatcttaccactttttcttctttaatatgatgaaattcagctctcttgagagttcaaggaaaaggataatgccttatatttttgaaattgtgaaacaaaacctgttgcgtgatttgttataaaagagaatctgtttcatgaacaagcacgaagctcagcaatcaaaatctttgaatctccaccactattgacatgcttgttgacacttgaagagttacttatttcagtgtggaaccaagaaactaaacaaagtttgatgttttgtgaaatagatttaatctatgtgcgcaattttttcatttatacaaatcctggatcaaattgcctttggtgagcagaactacattgttgttacagtacctgtgtagcacaaaagacaatgtgagttggcttgggctctagaaatttcttgcattggactcccaatcatgcaaaaaaaaaaacagaagaaaatagagttgggcagaaaatcgaagaaaattgagttgggcacatgagtactaggtaggatcaggtaagatagaacaaattgagaaatttcacattgggaagcaagggatgagaagtatttgcaaacacatattttgttaaaacagttgtcaattattcaaaaacagaaaaagtaataaatccagacaaaagctgaagaatcaaatatctctaactaccacaccattgcacgtcgatcacattatagatgtaatcaaccaattatcattctgttacttccttatatgcatgtgcacacaatatatgaagcctccaataagattgctataaacaaagtgcataatctttccagctttacaagtgcatagtctttccagctaatttagacgaccaacatataaaactaaataattgttccagctctacaagtgcataatcttttgtccttccacaaccatgtccctccagacacttaaattgcttctcattagttgtaccttaaaagtcatatgcccaaaggccattaaatcgtatgtaaaatcaaatacatctttgcaaacctataacttaagtatagtatatagttgcatcaacattttattaatcatatgcaacaccttgccgctacacaaaatgtaaagaagcaaataatcaaatcccattgaaaaacaaacacttaacgcttcatattacaagcattgaatagttatcattgctagctattagcaaatttcagttcataaaccgctaatttctaggttatcaaactagtcctctctgcaacatataaggtaaccaggtgcttttgtttttataactaaggtgcccagttatatgtcagcagcagcatcgacacctctactgaactggtggctcaggtgactataccagaagggacacgaagaggggggagagccagacggccgtgcgagcacgcaaagagtcccaactaggtgacataacagatggcacacacgtgctccgagggaggactatttagtgagagttaagttagaagagaggaaacaaaaatatattatcaagaactcgattgtaacttgacctctgaagtaaaatcatctaaacctattctcctgatgtctaccttcctcaattcctatgctaacactacaacaatcgttcagttcaagtgaacttttttgctgaaatacaagtatgtttctcaagttatgaccctccctaactgaaaactaaccagttgtagctatctgcaggtgctagctacaaacattgttaaaaactgcagagcggctccctttgatgtctaacaaccaacgtaacaggggaaagaaatatgaacgtcaatccagcaaattcaacatatcatgtacagataacttaacattattcccaccactaattatcaacagatataccagtgaaacaatgtcactactactgagtgaaaacagatgattcacatgcaaacactaattacttcaaatctacaagccttcccaagccacatactgactaaaggcaccagttcaaccgacgaatcgagactaattaaggttcagag

SEQ ID NO: 58756 - DNA, 3930 bp, Zea Mays
gtaaaatctcacatgttcatgttgctacgtctttccactgatggtggcatggtgctacttttttttttcagtgcgctgaaaatgatagaagcaggaagggagaggatgcgaaattggcattgtaattcggtctcttgctacctccaagcgagaagataattacaggtcgcgtctcgtagcgtccacccacgccgacgccggactgtgcgcattcttcgggaacgggacagaggagagaggcgagcgagcaacgagacgctgcgctgaccgcccgccccgcccgcgcccattcctcctcccactccatcctcctcctccgcagcccgcgcttcgccgctcgcgcctccttcccatcctcttcttttcaccgccacccctcttcgctctttcggagccaccgtgagtgcgccgcggcttcatcttgctgatcgtgtccgtggcttcttgatactccgtgactgtctccgtccgaagcgagtgagcaagccgaccaacagcggctgagattcgctgcaacgtcggtatcaaaaggtgtccgagcggttgagattcgcgtgccatgtccggattcagtgccgcggccaacgcagcggcggctgagcggtgcgcgctcgcgttccgcgcacggcccgcggcctcctcgccagcgaagcggcagcagcagccgcagccagcgtccctccgacgcagcgggggccagcgccgccccacgacgctctccgcctctagccgcggccccgtcgtgccgcgcgccgtcgccacgtccgcggaccgcgcgtcccccgaccttatcggaaagttcacgctggattccaactccgagctccaggtcgcagtgaacccagcgccgcagggtttggtgtcagagattagcctggaggtgaccaacacaagcggttccctgattttgcattggggagcccttcgcccggacaagagagattggatcctcccgtccagaaaacctgatggaacgacagtgtacaagaacagggctctcaggacaccttttgtaaaggtgataactccactctaaggattgagatagatgatcctggggtgcacgccattgagttcctcatctttgacgagacacagaacaaatggtttaaaaacaatggccagaattttcaggttcagttccagtcgagccgccatcagggtactggtgcatctggtgcctcctcttctgctacttctaccttggtgccagaggatcttgtgcagatccaagcttaccttcggtgggaaagaaggggaaagcagtcatacacaccagagcaagaaaaggaggagtatgaagctgcacgagctgagttaatagaggaagtaaacagaggtgtttctttagagaagcttcgagctaaattgacaaaagcacctgaagcacctgagtcggatgaaagtaaatcttctgcatctcgaatgcccatcggtaaacttccagaggatcttgtacaggtgcaggcttatataaggtgggagcaagcgggcaagccaaactatcctcctgagaagcaactggtagaatttgaggaagcaaggaaggaactgcaggctgaggtggacaagggaatctctattgatcagttgaggcagaaaattttgaaaggaaacattgagagtaaagtttccaagcagctgaagaacaagaagtacttctctgtagaaaggattcagcgcaaaaagagagatatcacacaacttctcagtaaacataagcatacacttgtggaagataaagtagaggttgtaccaaaacaaccaactgttcttgatctcttcaccaagtctttacatgagaaggatggctgtgaagttctaagcagaaagctcttcaagttcggcgataaagagatactggcaatttctaccaaggttcaaaataaaacagaagttcacttggcaacaaaccataccgacccacttattcttcactggtctttggcaaaaaatgctggagaatggaaggcaccttctccaaatatattgccatctggttccacattgctggacaaggcgtgtgaaactgaatttactaaatctgaattggatggtttgcattaccaggttgttgagatagagcttgatgatggaggatacaaaggaatgccatttgttcttcggtctggtgaaacatggataaaaaataatggttctgattttttcctagatttcagcacccatgatgtcagaaatattaagttaaagggcaatggtgatgctggtaaaggtactgctaaggcattgctggagagaatagcagatctggaggaagatgcccagcgatctcttatgcacagattcaatattgcagcagatctagctgaccaagccagagatgctggacttttgggtattgttgggctttttgtttggattagattcatggctaccaggcaactaacatggaataagaactataatgtgaagccacgtgagataagcaaagcacaggataggtttacagatgatcttgagaatatgtacaaagcttatccacagtacagagagatattaagaatgataatggctgctgttggtcgcggaggtgaaggtgatgttggtcaacgcattcgtgatgagatattagtaatacagagaaataatgactgcaaaggtggaatgatggaagaatggcaccagaaattgcacaacaatacaagcccagatgatgtagtgatatgccaggccttaattgattatatcaagagtgactttgatataagcgtttactgggacaccttgaacaaaaatggcataaccaaagagcgtctcttgagctatgatcgtgctattcattcagaaccaaatttcagaagtgaacagaaggcgggtttactccgtgacctgggaaattacatgagaagcctaaaggctgtgcattctggtgctgatcttgaatctgctatagcaagttgtatgggatacaaatcagagggtgaaggtttcatggttggtgttcagatcaatccagtgaagggtttaccatctggatttccggagttgcttgaatttgtgcttgaacatgttgaggataaatcagcggaaccacttcttgaggggctattggaagctcgagttgaactgcgccctttgcttcttgattcgcgtgaacgcatgaaagatcttatatttttggacattgctcttgattctaccttcaggacagcaattgaaaggtcatatgaggagctgaatgatgcagccccagagaaaataatgtacttcatcagtcttgtccttgaaaatcttgcgctttcaattgacgacaatgaagacatcctgtattgtttaaagggatggaaccaagccttggaaatggctaagcaaaaagacgaccaatgggcgctctatgctaaagcatttcttgacagaaacagacttgcccttgcgagcaagggagaacaataccataatatgatgcagccctctgctgagtatcttggctcgttactcagcatagaccaatgggcagtcaatatcttcacagaagaaattatacgcggtggatcagctgctactctgtctgctcttctgaaccgatttgatcctgttttaaggaatgttgctcacctcggaagttggcaggttataagcccggttgaagtatcaggttatgtggttgtggttgatgagttacttgctgtccagaacaaatcttatgataaaccaaccatccttgtggcaaagagtgtcaagggagaggaagaaataccagatggagtagttggtgtaattacacctgatatgccagatgttctgtctcatgtgtcagtccgagcaaggaatagcaaggtactgtttgcgacctgttttgaccacaccactctatctgaacttgaaggatatgatcagaaactgttttccttcaagcctacttctgcagatataacctatagcccatctggaataatctgttagatgccc

SEQ ID NO: 58757 - DNA, 4372 bp, Zea Mays
gtaaaatctcacatgttcatgttgctacgtctttccactgatggtggcatggtgctacttttttttttcagtgcgctgaaaatgatagaagcaggaagggagaggatgcgaaattggcattgtaattcggtctcttgctacctccaagcgagaagataattacaggtcgcgtctcgtagcgtccacccacgccgacgccggactgtgcgcattcttcgggaacgggacagaggagagaggcgagcgagcaacgagacgctgcgctgaccgcccgccccgcccgcgcccattcctcctcccactccatcctcctcctccgcagcccgcgcttcgccgctcgcgcctccttcccatcctcttcttttcaccgccacccctcttcgctctttcggagccaccgtgagtgcgccgcggcttcatcttgctgatcgtgtccgtggcttcttgatactccgtgactgtctccgtccgaagcaaggaaggaactgcaggctgaggtggacaagggaatctctattgatcagttgaggcagaaaattttgaaaggaaacattgagagtaaagtttccaagcagctgaagaacaagaagtacttctctgtagaaaggattcagcgcaaaaagagagatatcacacaacttctcagtaaacataagcatacacttgtggaagataaagtagaggttgtaccaaaacaaccaactgttcttgatctcttcaccaagtctttacatgagaaggatggctgtgaagttctaagcagaaagctcttcaagttcggcgataaagagatactggcaatttctaccaaggttcaaaataaaacagaagttcacttggcaacaaaccataccgacccacttattcttcactggtctttggcaaaaaatgctggagaatggaaggcaccttctccaaatatattgccatctggttccacattgctggacaaggcgtgtgaaactgaatttactaaatctgaattggatggtttgcattaccaggttgttgagatagagcttgatgatggaggatacaaaggaatgccatttgttcttcggtctggtgaaacatggataaaaaataatggttctgattttttcctagatttcagcacccatgatgtcagaaatattaagttaaagggcaatggtgatgctggtaaaggtactgctaaggcattgctggagagaatagcagatctggaggaagatgcccagcgatctcttatgcacagattcaatattgcagcagatctagctgaccaagccagagatgctggacttttgggtattgttgggctttttgtttggattagattcatggctaccaggcaactaacatggaataagaactataatgtgaagccacgtgagataagcaaagcacaggataggtttacagatgatcttgagaatatgtacaaagcttatccacagtacagagagatattaagaatgataatggctgctgttggtcgcggaggtgaaggtgatgttggtcaacgcattcgtgatgagatattagtaatacagagaaataatgactgcaaaggtggaatgatggaagaatggcaccagaaattgcacaacaatacaagcccagatgatgtagtgatatgccaggccttaattgattatatcaagagtgactttgatataagcgtttactgggacaccttgaacaaaaatggcataaccaaagagcgtctcttgagctatgatcgtgctattcattcagaaccaaatttcagaagtgaacagaaggcgggtttactccgtgacctgggaaattacatgagaagcctaaaggctgtgcattctggtgctgatcttgaatctgctatagcaagttgtatgggatacaaatcagagggtgaaggtttcatggttggtgttcagatcaatccagtgaagggtttaccatctggatttccggagttgcttgaatttgtgcttgaacatgttgaggataaatcagcggaaccacttcttgaggggctattggaagctcgagttgaactgcgccctttgcttcttgattcgcgtgaacgcatgaaagatcttatatttttggacattgctcttgattctaccttcaggacagcaattgaaaggtcatatgaggagctgaatgatgcagccccagagaaaataatgtacttcatcagtcttgtccttgaaaatcttgcgctttcaattgacgacaatgaagacatcctgtattgtttaaagggatggaaccaagccttggaaatggctaagcaaaaagacgaccaatgggcgctctatgctaaagcatttcttgacagaaacagacttgcccttgcgagcaagggagaacaataccataatatgatgcagccctctgctgagtatcttggctcgttactcagcatagaccaatgggcagtcaatatcttcacagaagaaattatacgcggtggatcagctgctactctgtctgctcttctgaaccgatttgatcctgttttaaggaatgttgctcacctcggaagttggcaggttataagcccggttgaagtatcaggttatgtggttgtggttgatgagttacttgctgtccagaacaaatcttatgataaaccaaccatccttgtggcaaagagtgtcaagggagaggaagaaataccagatggagtagttggtgtaattacacctgatatgccagatgttctgtctcatgtgtcagtccgagcaaggaatagcaaggtactgtttgcgacctgttttgaccacaccactctatctgaacttgaaggatatgatcagaaactgttttccttcaagcctacttctgcagatataacctatagggagatcacagagagtgaacttcagcaatcaagttctccaaatgcagaagttggccatgcagtaccatctatttcattggccaagaagaaatttcttggaaaatatgcaatatcagccgaagaattctctgaggaaatggttggggccaagtctcggaatatagcatacctcaaaggaaaagtaccttcatgggtcggtgtcccaacgtcagttgcgataccatttggcacttttgagaaggttttgtcagatgggcttaataaggaagtagcacagagcatagagaagcttaagatcagacttgcccaagaagattttagtgctctaggtgaaataagaaaagtcgtccttaatcttactgctcctatgcaattggttaatgagctgaaggagaggatgctaggctctggaatgccctggcctggtgatgaaggagacaagcgttgggagcaagcatggatggctattaaaaaggtttgggcatcaaaatggaacgaaagagcatattttagcacacgcaaggtgaaacttgatcatgagtacctttcgatggctgttctcgtgcaagaagttgtgaatgcagattatgcttttgtcattcataccacaaacccatcgtctggagattcttctgagatatatgctgaagtggtgaaagggcttggcgagaccctcgtgggagcctatcctggtcgtgctatgagctttgtttgcaaaaaagatgaccttgactctcccaagttacttggttacccaagcaagccaattggtctcttcataaggcaatcaatcatcttccgttccgactccaacggtgaggacctggaaggttatgctggagcaggattatatgatagtgtaccgatggatgaggaggatgaggttgtacttgattatacaactgaccctcttatagtagaccgtggattccgaagctcaatcctctcaagcatagcacgggctggccatgccatcgaggagctatatggttctcctcaggacgtcgagggagtagtgaaggatggaaaaatctatgtagtccagacaagaccacagatgtagtatgtatgcatctattagacagctcaataagcactgttgtacgcttgtatggttgggacatatgggcgttatggcatgtatagttgtatgcctagatgtacaacacgtgtactcgtatatatatatataaatgctgaaacaagcattggtcctgtactgtagtttctacatttcattgtcaccaataattaagtgtactcctatggctgggagtctatgaaaatggacgtgttgacttattgggtaataaataatttatatatatacttgtgcaagaattttctcaatatgttgcaaagtgtaaccagcttctcaggagttatatcggttggagcagtgtgctcgggtacagcttcttatttcaatgtctccagtgggcgtcttacctctatgtttgtgtttttttttaagtgcagaaatagagaaagttcttgcaaatatctactctatgaaaaggacagctatttggaaat

SEQ ID NO: 58758 - DNA, 5442 bp, Zea Mays
gtaaaatctcacatgttcatgttgctacgtctttccactgatggtggcatggtgctacttttttttttcagtgcgctgaaaatgatagaagcaggaagggagaggatgcgaaattggcattgtaattcggtctcttgctacctccaagcgagaagataattacaggtcgcgtctcgtagcgtccacccacgccgacgccggactgtgcgcattcttcgggaacgggacagaggagagaggcgagcgagcaacgagacgctgcgctgaccgcccgccccgcccgcgcccattcctcctcccactccatcctcctcctccgcagcccgcgcttcgccgctcgcgcctccttcccatcctcttcttttcaccgccacccctcttcgctctttcggagccaccgtgagtgcgccgcggcttcatcttgctgatcgtgtccgtggcttcttgatactccgtgactgtctccgtccgaagcgagtgagcaagccgaccaacagcggctgagattcgctgcaacgtcggtatcaaaaggtgtccgagcggttgagattcgcgtgccatgtccggattcagtgccgcggccaacgcagcggcggctgagcggtgcgcgctcgcgttccgcgcacggcccgcggcctcctcgccagcgaagcggcagcagcagccgcagccagcgtccctccgacgcagcgggggccagcgccgccccacgacgctctccgcctctagccgcggccccgtcgtgccgcgcgccgtcgccacgtccgcggaccgcgcgtcccccgaccttatcggaaagttcacgctggattccaactccgagctccaggtcgcagtgaacccagcgccgcagggtttggtgtcagagattagcctggaggtgaccaacacaagcggttccctgattttgcattggggagcccttcgcccggacaagagagattggatcctcccgtccagaaaacctgatggaacgacagtgtacaagaacagggctctcaggacaccttttgtaaagtcaggtgataactccactctaaggattgagatagatgatcctggggtgcacgccattgagttcctcatctttgacgagacacagaacaaatggtttaaaaacaatggccagaattttcaggttcagttccagtcgagccgccatcagggtactggtgcatctggtgcctcctcttctgctacttctaccttggtgccagaggatcttgtgcagatccaagcttaccttcggtgggaaagaaggggaaagcagtcatacacaccagagcaagaaaaggaggagtatgaagctgcacgagctgagttaatagaggaagtaaacagaggtgtttctttagagaagcttcgagctaaattgacaaaagcacctgaagcacctgagtcggatgaaagtaaatcttctgcatctcgaatgcccatcggtaaacttccagaggatcttgtacaggtgcaggcttatataaggtgggagcaagcgggcaagccaaactatcctcctgagaagcaactggtagaatttgaggaagcaaggaaggaactgcaggctgaggtggacaagggaatctctattgatcagttgaggcagaaaattttgaaaggaaacattgagagtaaagtttccaagcagctgaagaacaagaagtacttctctgtagaaaggattcagcgcaaaaagagagatatcacacaacttctcagtaaacataagcatacacttgtggaagataaagtagaggttgtaccaaaacaaccaactgttcttgatctcttcaccaagtctttacatgagaaggatggctgtgaagttctaagcagaaagctcttcaagttcggcgataaagagatactggcaatttctaccaaggttcaaaataaaacagaagttcacttggcaacaaaccataccgacccacttattcttcactggtctttggcaaaaaatgctggagaatggaaggcaccttctccaaatatattgccatctggttccacattgctggacaaggcgtgtgaaactgaatttactaaatctgaattggatggtttgcattaccaggttgttgagatagagcttgatgatggaggatacaaaggaatgccatttgttcttcggtctggtgaaacatggataaaaaataatggttctgattttttcctagatttcagcacccatgatgtcagaaatattaagttaaagggcaatggtgatgctggtaaaggtactgctaaggcattgctggagagaatagcagatctggaggaagatgcccagcgatctcttatgcacagattcaatattgcagcagatctagctgaccaagccagagatgctggacttttgggtattgttgggctttttgtttggattagattcatggctaccaggcaactaacatggaataagaactataatgtgaagccacgtgagataagcaaagcacaggataggtttacagatgatcttgagaatatgtacaaagcttatccacagtacagagagatattaagaatgataatggctgctgttggtcgcggaggtgaaggtgatgttggtcaacgcattcgtgatgagatattagtaatacagagaaataatgactgcaaaggtggaatgatggaagaatggcaccagaaattgcacaacaatacaagcccagatgatgtagtgatatgccaggccttaattgattatatcaagagtgactttgatataagcgtttactgggacaccttgaacaaaaatggcataaccaaagagcgtctcttgagctatgatcgtgctattcattcagaaccaaatttcagaagtgaacagaaggcgggtttactccgtgacctgggaaattacatgagaagcctaaaggctgtgcattctggtgctgatcttgaatctgctatagcaagttgtatgggatacaaatcagagggtgaaggtttcatggttggtgttcagatcaatccagtgaagggtttaccatctggatttccggagttgcttgaatttgtgcttgaacatgttgaggataaatcagcggaaccacttcttgaggggctattggaagctcgagttgaactgcgccctttgcttcttgattcgcgtgaacgcatgaaagatcttatatttttggacattgctcttgattctaccttcaggacagcaattgaaaggtcatatgaggagctgaatgatgcagccccagagaaaataatgtacttcatcagtcttgtccttgaaaatcttgcgctttcaattgacgacaatgaagacatcctgtattgtttaaagggatggaaccaagccttggaaatggctaagcaaaaagacgaccaatgggcgctctatgctaaagcatttcttgacagaaacagacttgcccttgcgagcaagggagaacaataccataatatgatgcagccctctgctgagtatcttggctcgttactcagcatagaccaatgggcagtcaatatcttcacagaagaaattatacgcggtggatcagctgctactctgtctgctcttctgaaccgatttgatcctgttttaaggaatgttgctcacctcggaagttggcaggttataagcccggttgaagtatcaggttatgtggttgtggttgatgagttacttgctgtccagaacaaatcttatgataaaccaaccatccttgtggcaaagagtgtcaagggagaggaagaaataccagatggagtagttggtgtaattacacctgatatgccagatgttctgtctcatgtgtcagtccgagcaaggaatagcaaggtactgtttgcgacctgttttgaccacaccactctatctgaacttgaaggatatgatcagaaactgttttccttcaagcctacttctgcagatataacctatagggagatcacagagagtgaacttcagcaatcaagttctccaaatgcagaagttggccatgcagtaccatctatttcattggccaagaagaaatttcttggaaaatatgcaatatcagccgaagaattctctgaggaaatggttggggccaagtctcggaatatagcatacctcaaaggaaaagtaccttcatgggtcggtgtcccaacgtcagttgcgataccatttggcacttttgagaaggttttgtcagatgggcttaataaggaagtagcacagagcatagagaagcttaagatcagacttgcccaagaagattttagtgctctaggtgaaataagaaaagtcgtccttaatcttactgctcctatgcaattggttaatgagctgaaggagaggatgctaggctctggaatgccctggcctggtgatgaaggagacaagcgttgggagcaagcatggatggctattaaaaaggtttgggcatcaaaatggaacgaaagagcatattttagcacacgcaaggtgaaacttgatcatgagtacctttcgatggctgttctcgtgcaagaagttgtgaatgcagattatgcttttgtcattcataccacaaacccatcgtctggagattcttctgagatatatgctgaagtggtgaaagggcttggcgagaccctcgtgggagcctatcctggtcgtgctatgagctttgtttgcaaaaaagatgaccttgactctcccaagttacttggttacccaagcaagccaattggtctcttcataaggcaatcaatcatcttccgttccgactccaacggtgaggacctggaaggttatgctggagcaggattatatgatagtgtaccgatggatgaggaggatgaggttgtacttgattatacaactgaccctcttatagtagaccgtggattccgaagctcaatcctctcaagcatagcacgggctggccatgccatcgaggagctatatggttctcctcaggacgtcgagggagtagtgaaggatggaaaaatctatgtagtccagacaagaccacagatgtagtatgtatgcatctattagacagctcaataagcactgttgtacgcttgtatggttgggacatatgggcgttatggcatgtatagttgtatgcctagatgtacaacacgtgtactcgtatatatatatataaatgctgaaacaagcattggtcctgtactgtagtttctacatttcattgtcaccaataattaagtgtactcctatggctgggagtctatgaaaatggacgtgttgacttattgggtaataaataatttatatatatacttgtgcaagaattttctcaatatgttgcaaagtgtaaccagcttctcaggagttatatcggttggagcagtgtgctcgggtacagcttcttatttcaatgtctccagtgggcgtcttacctctatgtttgtgtttttttttaagtgcagaaatagagaaagttcttgcaaatatctactctatgaaaaggacagctatttggaaat

SEQ ID NO: 58759 - DNA, 5427 bp, Zea Mays
gtaaaatctcacatgttcatgttgctacgtctttccactgatggtggcatggtgctacttttttttttcagtgcgctgaaaatgatagaagcaggaagggagaggatgcgaaattggcattgtaattcggtctcttgctacctccaagcgagaagataattacaggtcgcgtctcgtagcgtccacccacgccgacgccggactgtgcgcattcttcgggaacgggacagaggagagaggcgagcgagcaacgagacgctgcgctgaccgcccgccccgcccgcgcccattcctcctcccactccatcctcctcctccgcagcccgcgcttcgccgctcgcgcctccttcccatcctcttcttttcaccgccacccctcttcgctctttcggagccaccgtgagtgcgccgcggcttcatcttgctgatcgtgtccgtggcttcttgatactccgtgactgtctccgtccgaagcgagtgagcaagccgaccaacagcggctgagattcgctgcaacgtcggtatcaaaaggtgtccgagcggttgagattcgcgtgccatgtccggattcagtgccgcggccaacgcagcggcggctgagcggtgcgcgctcgcgttccgcgcacggcccgcggcctcctcgccagcgaagcggcagcagcagccgcagccagcgtccctccgacgcagcgggggccagcgccgccccacgacgctctccgcctctagccgcggccccgtcgtgccgcgcgccgtcgccacgtccgcggaccgcgcgtcccccgaccttatcggaaagttcacgctggattccaactccgagctccaggtcgcagtgaacccagcgccgcagggtttggtgtcagagattagcctggaggtgaccaacacaagcggttccctgattttgcattggggagcccttcgcccggacaagagagattggatcctcccgtccagaaaacctgatggaacgacagtgtacaagaacagggctctcaggacaccttttgtaaagtcaggtgataactccactctaaggattgagatagatgatcctggggtgcacgccattgagttcctcatctttgacgagacacagaacaaatggtttaaaaacaatggccagaattttcaggttcagttccagtcgagccgccatcagggtactggtgcatctggtgcctcctcttctgctacttctaccttggtgccagaggatcttgtgcagatccaagcttaccttcggtgggaaagaaggggaaagcagtcatacacaccagagcaagaaaaggaggagtatgaagctgcacgagctgagttaatagaggaagtaaacagaggtgtttctttagagaagcttcgagctaaattgacaaaagcacctgaagcacctgagtcggatgaaagtaaatcttctgcatctcgaatgcccatcggtaaacttccagaggatcttgtacaggtgcaggcttatataaggtgggagcaagcgggcaagccaaactatcctcctgagaagcaactggtagaatttgaggaagcaaggaaggaactgcaggctgaggtggacaagggaatctctattgatcagttgaggcagaaaattttgaaaggaaacattgagagtaaagtttccaagcagctgaagaacaagaagtacttctctgtagaaaggattcagcgcaaaaagagagatatcacacaacttctcagtaaacataagcatacacttgtggaagataaagtagaggttgtaccaaaacaaccaactgttcttgatctcttcaccaagtctttacatgagaaggatggctgtgaagttctaagcagaaagctcttcaagttcggcgataaagagatactggttcaaaataaaacagaagttcacttggcaacaaaccataccgacccacttattcttcactggtctttggcaaaaaatgctggagaatggaaggcaccttctccaaatatattgccatctggttccacattgctggacaaggcgtgtgaaactgaatttactaaatctgaattggatggtttgcattaccaggttgttgagatagagcttgatgatggaggatacaaaggaatgccatttgttcttcggtctggtgaaacatggataaaaaataatggttctgattttttcctagatttcagcacccatgatgtcagaaatattaagttaaagggcaatggtgatgctggtaaaggtactgctaaggcattgctggagagaatagcagatctggaggaagatgcccagcgatctcttatgcacagattcaatattgcagcagatctagctgaccaagccagagatgctggacttttgggtattgttgggctttttgtttggattagattcatggctaccaggcaactaacatggaataagaactataatgtgaagccacgtgagataagcaaagcacaggataggtttacagatgatcttgagaatatgtacaaagcttatccacagtacagagagatattaagaatgataatggctgctgttggtcgcggaggtgaaggtgatgttggtcaacgcattcgtgatgagatattagtaatacagagaaataatgactgcaaaggtggaatgatggaagaatggcaccagaaattgcacaacaatacaagcccagatgatgtagtgatatgccaggccttaattgattatatcaagagtgactttgatataagcgtttactgggacaccttgaacaaaaatggcataaccaaagagcgtctcttgagctatgatcgtgctattcattcagaaccaaatttcagaagtgaacagaaggcgggtttactccgtgacctgggaaattacatgagaagcctaaaggctgtgcattctggtgctgatcttgaatctgctatagcaagttgtatgggatacaaatcagagggtgaaggtttcatggttggtgttcagatcaatccagtgaagggtttaccatctggatttccggagttgcttgaatttgtgcttgaacatgttgaggataaatcagcggaaccacttcttgaggggctattggaagctcgagttgaactgcgccctttgcttcttgattcgcgtgaacgcatgaaagatcttatatttttggacattgctcttgattctaccttcaggacagcaattgaaaggtcatatgaggagctgaatgatgcagccccagagaaaataatgtacttcatcagtcttgtccttgaaaatcttgcgctttcaattgacgacaatgaagacatcctgtattgtttaaagggatggaaccaagccttggaaatggctaagcaaaaagacgaccaatgggcgctctatgctaaagcatttcttgacagaaacagacttgcccttgcgagcaagggagaacaataccataatatgatgcagccctctgctgagtatcttggctcgttactcagcatagaccaatgggcagtcaatatcttcacagaagaaattatacgcggtggatcagctgctactctgtctgctcttctgaaccgatttgatcctgttttaaggaatgttgctcacctcggaagttggcaggttataagcccggttgaagtatcaggttatgtggttgtggttgatgagttacttgctgtccagaacaaatcttatgataaaccaaccatccttgtggcaaagagtgtcaagggagaggaagaaataccagatggagtagttggtgtaattacacctgatatgccagatgttctgtctcatgtgtcagtccgagcaaggaatagcaaggtactgtttgcgacctgttttgaccacaccactctatctgaacttgaaggatatgatcagaaactgttttccttcaagcctacttctgcagatataacctatagggagatcacagagagtgaacttcagcaatcaagttctccaaatgcagaagttggccatgcagtaccatctatttcattggccaagaagaaatttcttggaaaatatgcaatatcagccgaagaattctctgaggaaatggttggggccaagtctcggaatatagcatacctcaaaggaaaagtaccttcatgggtcggtgtcccaacgtcagttgcgataccatttggcacttttgagaaggttttgtcagatgggcttaataaggaagtagcacagagcatagagaagcttaagatcagacttgcccaagaagattttagtgctctaggtgaaataagaaaagtcgtccttaatcttactgctcctatgcaattggttaatgagctgaaggagaggatgctaggctctggaatgccctggcctggtgatgaaggagacaagcgttgggagcaagcatggatggctattaaaaaggtttgggcatcaaaatggaacgaaagagcatattttagcacacgcaaggtgaaacttgatcatgagtacctttcgatggctgttctcgtgcaagaagttgtgaatgcagattatgcttttgtcattcataccacaaacccatcgtctggagattcttctgagatatatgctgaagtggtgaaagggcttggcgagaccctcgtgggagcctatcctggtcgtgctatgagctttgtttgcaaaaaagatgaccttgactctcccaagttacttggttacccaagcaagccaattggtctcttcataaggcaatcaatcatcttccgttccgactccaacggtgaggacctggaaggttatgctggagcaggattatatgatagtgtaccgatggatgaggaggatgaggttgtacttgattatacaactgaccctcttatagtagaccgtggattccgaagctcaatcctctcaagcatagcacgggctggccatgccatcgaggagctatatggttctcctcaggacgtcgagggagtagtgaaggatggaaaaatctatgtagtccagacaagaccacagatgtagtatgtatgcatctattagacagctcaataagcactgttgtacgcttgtatggttgggacatatgggcgttatggcatgtatagttgtatgcctagatgtacaacacgtgtactcgtatatatatatataaatgctgaaacaagcattggtcctgtactgtagtttctacatttcattgtcaccaataattaagtgtactcctatggctgggagtctatgaaaatggacgtgttgacttattgggtaataaataatttatatatatacttgtgcaagaattttctcaatatgttgcaaagtgtaaccagcttctcaggagttatatcggttggagcagtgtgctcgggtacagcttcttatttcaatgtctccagtgggcgtcttacctctatgtttgtgtttttttttaagtgcagaaatagagaaagttcttgcaaatatctactctatgaaaaggacagctatttggaaat

SEQ ID NO: 58760 - DNA, 1359 bp, Zea Mays
tgcaaatatctactctatgaaaaggacagctatttggaaatatctgaacagaactctcccaagttgctgaacaaaaccaaagacagaaggaaccaccacaatccatacagaaatggtagggttcttcggcgcctctgctgcatctgatcactgtcgtttgctgacaacaaatggatcagttcaccatgaactgattagacgacaccatggcagaccaagaagtgcgatcaggtgctgcagcagcacggcaaggggaaggaccagggactattactaccaggtgctgggcatcgcaattcaatccacacctcagcagatcaaggaggcttacaggaaactccagaagcaacaccatccagacatcgccggctacaagggccacgactacacgctgctgctgaacgaggcgtacaaggttctgatgcgggatgtttccagttccaggcacgccgatggaaggggcaggagtagggtggggtcaggagccggttacaccggggacggatacagttcttgggaagggcccgtgagaagccaagctctcttcgtggacgagaacaagtgcataggatgccgggagtgcgtgcaccatgccgctaggacgttcgccatggacgacgttctcggcagcgcgcacgtggaggtccagttcggcgacctggagcagcagattcagctggctgtggagtcctgccccgtggactgcatccactgggtcgagagccacgacctgcccgtgctggagttcctgtcccggccgcagccgaaggaaggccacggcgtattcggcggcgggtgggagcgccccgggaacgtgtttgcggcggcgaagaacttcgccaggagactggagagggagaagcagcgggaggagctggaacgggatcagccctccgggggcctcgacggccgcgaggcggagacggaggcgcaggccgaggcgaggcgcagcgcgtgggaggagctcaggtggaagcccctgcttgatgcttggaatgggctgataggtggtcgttgacgctgcaggaggttgaagagaagctcagcgctggaagctgaacccgtaacatctgcagctgcagaaatagtggatgtgccaaggacaaaatagcacctttgtggccgtgggttatcaaacagtaggtgtcgtcgtaactcgtaaatgatcatgtgtaattacagattacaaaaaatgtgtaggaatagtagtcaaatatatgtgtgtagatgttggcatattgcacaggattatgtcccctttatatatatggtggttaatggaaatggcagggtggtacatcactgtatactacagacactagtagtttccggagaaaatctattcaacggtatcgaaac

SEQ ID NO: 58761 - DNA, 1539 bp, Zea Mays
ctcttcctctgctctgctacattcttgctcttcttcctctgctcttcttattcactcactgctaccaaaactgaacgtacattgtaactaacctcaacaacaggccgaacacttccgccagcagcttctaaagcccgcgacttagattctgccttcatcacccaaacccaaactaaccgaaacaattttgttttcgaccacaaaaaatagcaatctctcgaatttctccatttctttccgacgaccaagaggcgggaaacctcacaaaggccagaaaccaagcaacacttcacgatgcagggagatcccgggtacggctacggtagctacgggtacgggtacggctacggttacggagccggcgccgccggctacgactacgacatggccggctacggcagcggcggagccgcctactactcggcgaccgaccggtatcccgccgcgacggcagctgcctatgaggacccgctcgtcgctggtcagaggcagcacgacgtgcccgcgccgctcacggggctggagttccaggcgtccgacacgtgccccaagaactacgtcatcttcgaccatacgtacgaccggagccgggtcatgttccacccgtccctggccaacaacttcgcctcctcccccgccgccggcggcggcggcgggtacgactacgaccgccagtgctacggcggctacgaccagaactacgccggcaagagcgcctactacgtctgcgccgccgccgccgccgacgacgacggcggcggggcctcgatacggcagaaggaggacaccgacgagatcgacgccctcatgagcacggaggacggcgaggacgacgacgacgacgacgtcctcagcacaggccgcacgcccgggtgccgtgccgccggctcccccgactctacgtgctcgtccgggtacgctgccgccggcgccggtggcggcgagaagaagaaggaacggatgaaaaagatggtgcggacgctcaaggggatcatccccggtgtcgaccggatggacacgccggccgtccttgacgaggccgtgaggtacctcaagtctctcaaggtggaggtcaagaagctcggcgcgcgcgggtcaagcagctagctaagcgcgctggcctcgtcggtatgcggcggcgaccatgataatgtaatggcagtcgaaatccctctcttctttctcggcatcggcagctacgacaagccagtcggtgaacaatacatgcggtgatgacgacaagggacagcttctcatcttggcctcagatgcacgtgctctgtttgcaccgacaggatcaggacatggcttcggagagagctcggttgcagggcgctcggcaatcttttgtggtggctctgccacctctagcgttcgtgcgtgcatggattgttacatttcttccttcgtatctctttcgtatctcttgatacctcgtggctggtgttgtaactatcatgctgatgatatatatatacacacaccgtgttcttttgttatattgggctctgcagtttggagccatcttcttaattcttt

SEQ ID NO: 58762 - DNA, 890 bp, Zea Mays
atggaggttggaggaggaagtgcccagtaccccacgcttacccgcatcaactatggtgaccagtcggtgttcatgaaggtgatactccaagatgaccgcccaaccgcaccaaggttgtggcacatggtgaacactggcaaaataaggacacaataaagcttgcctaggacagtctgaagtgcatttgtgtgggctccgaccacgtgcgccgagcaaggacgcatgcagctcgtgtgagagtatgaggctatgccattctaggaaggtgaggccgtggacttggcactgcgcctgtagtcactggtgagtcagctcatggtactcgccaaaaccattgtcaaacaacaaatcattgccatgcacctgcacgtggttctgaccaaattcacacagattgcgcttgtcgatctatccaccctcacagttgaggatgtgactgggtagctcaagtggagaactatgacacagtggcacagacgatggtactagaaagcttctcctcactaaggaatgagtgacccgtatgtgtgagcagcagccagtgcaaggcagggcttgtccagcagaagaggcgcagagtggtgacaaggaagaccgccaacatggaagatgaaaggtggcagcgctcgtaacagaaaagaggatgcgccacatgtctccaaccgcaacacttgccgcaagtgtgtcaagacgggccattgatctcaggattgtaaaaacactgcacgacagccttgtagtaggtagattggtagcatgctggtgtggtcaagtagtaagtgtgcttgtaattggtgtacaaaacatcttgtaaaagtgaagaccatgtatatatgcaagcatgtggaccagctgcatccttagctcaaggagcagcattaactagtgtt

SEQ ID NO: 58763 - DNA, 2467 bp, Zea Mays
tgtttttggcctccctaaggaggccttgtaatctgtagggatggatccagatatttattcggatgtcatttttttggtcttctttcttcgattgtaaacaaataacatatagaatttgctatgtaaatttatattcttgtttttagcattgaggctattaatcttcacaaaaaaataaacattaaattcattctagatatttttaaataattgatataaaattcggatgtctattcgaatacggattcggatgttttttcaccttttttgttgtagggagaaaataatgtacataaaaaagtatacataaatttatttaaatacttcataatattcttcataacattggcaaaaattagcttcaaattatatgtatatctatgctaaaatattagatttgtgatacaaatcggatgttttaggaacatccctagtaatctgtctaggtctctttgacctggacttatttcttcttcttaatatattgaggcgcaattcttctgcgttttccaaaaaaagtagtgtcatcctcttgatgagagtaagagtcccgttgcctaaatcctcaacccgggctaaggtgacagcttcgaccatggataggagagaacgagagaggagatgagctcgaagctgctcgaagtccaaacggagacaccagagaaactcatggaggcaaagaacatcgttgtgccccctgtcggaggacacaccagggataggaggaacaccatcgacactgaccatgggttcaataggacgctccgggacaggaggagacaaaccagtaaggtgaccccatatgcgctagctgttgagacacacgcggagcatggtggaccactcccagaagttggtgccatcgaagttgctcttacattaattggtggagtgcagcgtgttgatgcttctggaacaaaggttcgtggagaatcccatatgcttcttgttggtgatccaggtattggtaaatcccaatttttgaagtttgctgctaaattgagcaaccgatctgtgatcacaactggtctcggaagcaccagtgctggtttaactgtcacagctgtaaaggatggtggggagtggatgcttgaggctggtgctcttgttttggctgatggtggcttatgctgcatagatgaattcgacagcatgcgagagcatgacagaacaacaatacatgaagccatggagcaacagacaattagcattgcgaaggctggattagttacaacactcagtacaaggactactgtctttggtgccacgaatccaaaagggcaatatgaccctaatgaaagtttgtctgtgaatacaacactttcaggaccactgttgagtagatttgatatagttcttgttcttctggatacacaaaatactggttgggatgaaatagtttcatctcatatactgaaggagaattctgatgaaaagaaagacaaggcagatgcttctgatataaagtggatgctcccccagttgagaaggtacatcaattatgtaaggaggaagtttaaaccagtgctgacaaaggaggctgaaagagttatctcaagctattatcatctacagagaaaatcaggaacacataatgcagcaaggacaacagtgcgcatgcttgaaagtttgataaggctagcacaagcacatgcacgattaatgttcagaaatgaggttagacaacttgatgccattgctgccatattatgcatggaatcctccatgacaacatctcctatagtggacatcgttggaaatgctttgcactcaaattttacagttgaccctgatgaagaatataaaacacaggagaagaagattctcaagaaactcggaataactcaaggatccccataattcaatacaaacatcagttgctgcatcctgtagatttattaacgcatggacttacatgctattctgcatattgaatcagtgatacatgaagtctcttggtggaacaaggcctgcctttgcagttcatggtgtatatacttcttttgggcatgtaatttgtccaaatttgcaatatgtatcagattggtcttttttgtgagctctttgatgatgggaatgttgtctactgctgaaagtacaacgtcattaaatcctgtaatattcgctcccattggagtcgagtccaggacctaagatgctactaaggcttttataacccctaggctatagttccttttgctgtatcagattggctttgtaatgtgtaacaatttcttgtcacttagtttattacttatgacatctatctgttcacttagtttatatcttatggtatctatctgttcaaattgaaagaaattaagttattgaatgagtgtcgtctgtcatttgttgtgctattgttcagtaaaacattttgatgatgtgaagaggggactaaggaggatctggagtttcagttttgtggagtgaatataaatgataaatacaccagtgtttctatgaa

SEQ ID NO: 58764 - DNA, 2482 bp, Zea Mays
cttcataatattcttcataacattggcaaaaattagcttcaaattatatgtatatctatgctaaaatattagatttgtgatacaaatcggatgttttaggaacatccctagtaatctgtctaggtctctttgacctggacttatttcttcttcttaatatattgaggcgcaattcttctgcgttttccaaaaaaagtagtgtcatcctcttgatgagagtaagagtcccgttgcctaaatcctcaacccgggctaaggtgacagcttcgaccatggataggagagaacgagagaggagatgagctcgaagctgctcgaagtccaaacggagacaccagagaaactcatggaggcaaagaacatcgttgtgccccctgtcggaggacacaccagggataggttcgacagtacgacggctctagcgagttgagctgatgccacacatcagtcaactcgtgatagaaggcatcgacggaggattcctgctgctgaatagagctagcgagctccaaggtggagatgtagagagcggtgctgctcggctggtagagagcctacacccactcccacatcgcctgagtggtgggcagagcagagatccatggcaaattccaccttcatactgccaagaagaaccttagtcgctcaagccttatcagcaagccaaacattgtaatcggttaaaacaaccatgtattgctcaacatcttgggcataaccctccatggcctgaacaggaggaacaccatcgacactgaccatgggttcaataggacgctccgggacaggaggagacaaaccagtaaggtgaccccatatgcgctagctgttgagacacacgcggagcatggtggaccactcccagaagttggtgccatcgaagttgctcttacattaattggtggagtgcagcgtgttgatgcttctggaacaaaggttcgtggagaatcccatatgcttcttgttggtgatccaggtattggtaaatcccaatttttgaagtttgctgctaaattgagcaaccgatctgtgatcacaactggtctcggaagcaccagtgctggtttaactgtcacagctgtaaaggatggtggggagtggatgcttgaggctggtgctcttgttttggctgatggtggcttatgctgcatagatgaattcgacagcatgcgagagcatgacagaacaacaatacatgaagccatggagcaacagacaattagcattgcgaaggctggattagttacaacactcagtacaaggactactgtctttggtgccacgaatccaaaagggcaatatgaccctaatgaaagtttgtctgtgaatacaacactttcaggaccactgttgagtagatttgatatagttcttgttcttctggatacacaaaatactggttgggatgaaatagtttcatctcatatactgaaggagaattctgatgaaaagaaagacaaggcagatgcttctgatataaagtggatgctcccccagttgagaaggtacatcaattatgtaaggaggaagtttaaaccagtgctgacaaaggaggctgaaagagttatctcaagctattatcatctacagagaaaatcaggaacacataatgcagcaaggacaacagtgcgcatgcttgaaagtttgataaggctagcacaagcacatgcacgattaatgttcagaaatgaggttagacaacttgatgccattgctgccatattatgcatggaatcctccatgacaacatctcctatagtggacatcgttggaaatgctttgcactcaaattttacagttgaccctgatgaagaatataaaacacaggagaagaagattctcaagaaactcggaataactcaaggatccccataattcaatacaaacatcagttgctgcatcctgtagatttattaacgcatggacttacatgctattctgcatattgaatcagtgatacatgaagtctcttggtggaacaaggcctgcctttgcagttcatggtgtatatacttcttttgggcatgtaatttgtccaaatttgcaatatgtatcagattggtcttttttgtgagctctttgatgatgggaatgttgtctactgctgaaagtacaacgtcattaaatcctgtaatattcgctcccattggagtcgagtccaggacctaagatgctactaaggcttttataacccctaggctatagttccttttgctgtatcagattggctttgtaatgtgtaacaatttcttgtcacttagtttattacttatgacatctatctgttcacttagtttatatcttatggtatctatctgttcaaattgaaagaaattaagttattgaatgagtgtcgtctgtcatttgttgtgctattgttcagtaaaacattttgatgatgtgaagaggggactaaggaggatctggagtttcagttttgtggagtgaatataaatgataaatacaccagtgtttctatgaa

SEQ ID NO: 58765 - DNA, 1008 bp, Zea Mays
tgcttacttcccatgaaataataaggctgaggtacatcaattatgtaaggaggaagtttaaaccagtgctgacaaaggaggctgaaagagttatctcaagctattatcatctacagagaaaatcaggaacacataatgcagcaaggacaacagtgcgcatgcttgaaagtttgataaggctagcacaagcacatgcacgattaatgttcagaaatgaggttagacaacttgatgccattgctgccatattatgcatggaatcctccatgacaacatctcctatagtggacatcgttggaaatgctttgcactcaaattttacagttgaccctgatgaagaatataaaacacaggagaagaagattctcaagaaactcggaataactcaaggatccccataattcaatacaaacatcagttgctgcatcctgtagatttattaacgcatggacttacatgctattctgcatattgaatcagtgatacatgaagtctcttggtggaacaaggcctgcctttgcagttcatggtgtatatacttcttttgggcatgtaatttgtccaaatttgcaatatgtatcagattggtcttttttgtgagctctttgatgatgggaatgttgtctactgctgaaagtacaacgtcattaaatcctgtaatattcgctcccattggagtcgagtccaggacctaagatgctactaaggcttttataacccctaggctatagttccttttgctgtatcagattggctttgtaatgtgtaacaatttcttgtcacttagtttattacttatgacatctatctgttcacttagtttatatcttatggtatctatctgttcaaattgaaagaaattaagttattgaatgagtgtcgtctgtcatttgttgtgctattgttcagtaaaacattttgatgatgtgaagaggggactaaggaggatctggagtttcagttttgtggagtgaatataaatgataaatacaccagtgtttctatgaa

SEQ ID NO: 58766 - DNA, 2042 bp, Zea Mays
atacgcaccattttccgtttccctcacccctggcgctctaccagtcaccatttatatgcacgctcgcgcgcgtgccagcgacttcgtccaagaaacgcagcccgcccacccaccaccgccagatgacgacgcctcgccacaatgcgtcgccgccgccgctccccgtgctcacgctcctctggctactgctgctcgacgctcccgccgccgcgcagcagagcccgtcgcgcgacaaggataacgggggcggtggcggtggagggggcatgccagcccagacgcccagcttcagcgctcccatggtcgtgctgctggtggcgctcatcgcggccttcttcttcatcggtttcttctccgtgtacatgcgccggtgcgggcggggcgcctcggccggtcccgtgatcccggccgccgcgctgctcgctctgtcgcggcaggaggagcgcaaccagcagcgcgggctcgaccccgccgtggtcgcgtcgttcccgacgatgaggtacgcggacgcgagagagcttcgggtcggcggcaaggacgccgcgctcgagtgcgccgtctgcctcagcgagttcgaggacgacgaggagctccggctgctgcccagctgcagccacgccttccacccggactgcatcggcgagtggctcgccggccacgtgacgtgccccgtctgccggtgcaacctcgatcccgaggagccggccggtgaggcgacgggggaggggcggcagcaggaccatgtggcgatcgacgcgagccacgatggcgccggagaggagggggaggaggacaggaggcgggatgaggcgatggagctggagcggatcgggagccagcgccgcgcggtgcggtcccggtcggggcggccggcaccgctcgtcccgcggtcgcattcgacgggccactccctcgccaccacgcgcctcgacggcgacgtggagcggttcacgctccggctgccggaactcgtgcgcagggagatggtcgccgcggccggcgaggagagcctgcgccgcacgggcctgcgcgagcgcggcggcgcccggagcgcgcggctcgggaggtcggaccggtggccgtcgttcatcacccggacgttgtcgtcgcgggtcccgttctggtccgcgtcgaggagggcgcccgacctggaggcgtcgtccatgaccacgggaggggcggccgcgaggaccaggcgtgagaagatgggcggcgcgtcagacggctcggtgacccctgctaaaggcagcgtgcgcttcgactgcctcggcgtcgcccccgccgtgacgggcgcgagagtcggcgccgcgtcctgcgacaacgagatggaggaggaggacgacgaggaggacgaggagaaggcgatcgcccggcaccggcaggcttgaacgtgggcggaaagcggggattccgcgccccgcatgtgctgctcgcctacttgcccccattcgtcagttggaattggaacggcaacggcaacggccaacggcagtgtcacacacggacactccgcatggtctggtcctggtggcgtatcaatgccccggcgagaggaccgggacgagacgctgcatcatgtctgaactctctgccgacgtatccacgaccacaatccatcgccctgtgatccgcgagacgaagcaggtcgcacgcgaatgggaacacgcaccgctggagcggcgattccttcagctgaaaatggtttctttattttcttccaaccttttctactttctcttgagcgtctagtcctctggagaaaaaggagttcttgattcatttctttctcttagcgtctagaacatcatgttgggctgggtaacctagaaaaaaagtagtgtttaaatagagatagaaaaaaaactgggataagtgttgactgattattgtgtcttttcgtcaaccctggtagtacatagtttatcttacttccggacggagatggaaggttgcgaagttatgcaagaaacaaacccacagagcgctgtcgtctcaaacatacggactcccgtgaaattattaaattcataagaaatttaagc

SEQ ID NO: 58767 - DNA, 3302 bp, Zea Mays
gaacaacatgaatccttgattcgtcagctcttccatattagtcagacagggtctgtttcagactatgttgaacagtttgcatccttgatagatgagttagctgcatatgagtcgcatactgatcccttgtactacacaatgcgatttatcgatggtctcaaacatgatattaaaactgttataatggtacaaagacctccaaatctcgatgctgcttgtgcactcgtccttgtgcaggaagaggcgctggagtcatctcggcgtcagcatgctgagcctttctccaaccggatggcttggccgcatatggcgtcgtctgaattcagcaagaaggaacaaccaggcggacaaaatcaatccactgacaaaacgactggtgacttcagtcgtgcatcttcaccagctgatcgtgtagcatcgctcaaaagctatcgtcgtgctcgcggtttgtgcgaccgctgtgcagagaaatggtttcccggtcacaaatgtgccagcacggtacagttacatgccatcgaggaggtatgggatctactggcagtaccagaaagtgtcgaagacgcacctgaccagccggaacaaatcatgatggcactatctctatcaccagcagcatgggaaggaattgacaaaggaaccactatgtgatttgctggtcgcatgcagcaacacgacatcctcatattagttgactcagggtcttctcacacttttgtcagtgaccgcttacggccacagttgtctggtgttcaagagttgcctagaaccatatctgtgcaagtagccaacggtcaagtgctttcatgccgttatcatctcccagcagttgagtggagtatgtctgattgccaatttgtcactgacatgaaatttttgcctcttatagtgtttgatgtactattgtctattgggcatgaactggctccagcaatacagtccgatgaaggtggattgggcgaacaagtgggcagtcattccatataatgggtcgtcagcatacttgcaaggtgtgcaggtgacattaggtgacattaccagccggcgctgtcaccgaacttttgctcttgtcaatggaatcacaggctacacctgctggacaatcggtcgatccaaaagtccaagtagttctggatcagttcgtggaggtatttgaggatccagtcggcttaccaccaagcagaacatgcgaccacactataccattggttccaggggctcaccctttcaatattaaaccatatcgcgatgacatcggcagccgtcgatccctcctccttgaggctcacgaatgcgcacgacgtctctccccagaaatcgtccggccatgccaccatcgcggcctcgttcaccgccgggtggctgtacagcacggactccacctccacgctgctgatgttctccccgccgttgatgatcacgtccttggaccggtcgcagatctccatgtaccgtcaggatgcatcacgccgacgtcccccgtgtagaaccacccgttgtcgcgtatcgccgccttggtggccttgtcgtcgtccaggtagccgagcatgacgcagccgccgcggagcatgatctcgcccatcgtggacccgtcgcgggggaagctgcgcccggtctcgccgtcgacgatgtccacctcggccatgccaggcgtgcgcacgccttgcctcgccttgagccgcgcgccgcctgatgtggatgtggatactgatatatctgatgaagacgaaggtgacgacgatgaactgaaagaaagcataaatggttcagaggatgaagctttagaccagaatgaagacagcgaagaggaagacaagtcaaaaggcagtggctctaaagcgcagaagaggaagttaaatgattatattggacagctaagttctgctgatgcaagccttcgagttctgaagaggttagcaactgccaagaaggctgaagttccatctgatgaaactggtaaaattctatccgatgaagatttcaaacgcatcaaagaactcaaggcaaagaaagaggcgaagctggctttggctcagcatggactaatcaagggtggcgacacaaggtctgtaacctttaagatgccatcatctgaccagctcagcaggaagcgtgtcgatccacttgagcttgaggctcacgtcaggagaaagatgtccaaggaagaaaggttagcgatggtgaaagctggaagagaggatagaggtccttacatggcaagggcggccgtgaaacagaaaaaggtaagcttcctggctgttggcgtgtacgttttgtggtggtagcatgttatgtcttttttaattcgtacctcgccttggctgacctcgaacccgatggactccgtgccgtgcggcacgacagccggcggtggcgcgccggcagttaggatgcgcaccctcgccctgctcgacatagcctggctcatccacgtctcgtccccgcaggacgacgacagcaacatgcgggggctccccaacatcgcgcagaacgagcccgtgctcggcatggtctgggacaacatcgcgcgcctccacaccggcggcctcgtcgcgcgggacgactcggccgccaccctcgcctccctcgccgtgggcaactcctacttcgctaagtacatcgtctaggaggacggcgtcgctgtcctcgtcaagctgatcaaggaaggcgccgacgacgggcagctgctccactccggggtgtgctccgtgttcgccgctgcgctcaaggagccgccaatgcgcgtgcaggccgcggtcgcgggcgccatcgcgtcgctggcgcgccacagccacaagtgccaggacctgttcgcgcagagcaacgccgttcggcatctcgtcacccacctcgcttctcaacctgaaacccactcgagagcaaacaacgtgcgtcagatccacgacgacacacgattcaatcaacagcaatgcatcgaacaagcacaaattcgtttcaggcatcagcaattaacccagatctagacaaacacatatgctacagctaccgctaccgctacgatcaagtgaatcggccactaccgaattgcaaaaccatcaaaccagtttccacgaatagctgcactaagcagcgattacccagctacctgcgtacccggcaagccagatcacgagccggcggcgctaccacccactcattcccgtctacccaccgaatccagcacccaaaccagccgcactgcgctgcggtgacggagtcactactgccgccacgtcgctacgcgcgacccaaacccctccaccgacacacacaaaaaaaaacctagaaaacacgagataaat

SEQ ID NO: 58768 - DNA, 1484 bp, Zea Mays
atgccgattttgctctcctttttaccccaggttaatgatactattgagatgcttgagagaatggctcaccgtggtgcctgcggctgcgagaagaatacaggagatggtgccggcatcatggtcgctctaccacatgacttcttcaaagaggtcgcaaaggatgctgggattgagctacccccactaggcgagtatgctgttgcaatgttttttatgccaacagatgaaaagcgtcgtaagaaaggcaaagctgagtttaagaaggttgcagaatcactgggacatgtaatactcgggtggcgtctggttccgactgacaactcagacttgggtgaatctgcactcgagactgagccagtcattgagcagcgtaggaggcttacctgctctataagcttcattgtattgttctacaaaggctttaatacaatcaggtattatcaagaaaataagaagaaaagaaacagatggctactttgagggcgacagtgggcatgctgctcggcgtcgaggacatgcacaggttcccggtgcgctccccgtggatggaccgcggcgacctcatccgcagtcccgccgcgcgatagatcgtgtccaactacttcagcatgttcgggccggtgcaggacgtgcgcatcccgtatcagcagaagcgcatgttcggcttcgtcaccttcgtgtacgctgagacggtgaaggtcatcctgagcaagggcaacccgcactttgtgtgcgacgctcgcgtgctcgtcaagccctacaaggagaagggcaaggtccccggtaggtttaggaagctgcagcacacgcaccatggcggagccgagttcgtcggttgcgcgtcgcccactggattgctggattccagggacccctacgccctcctgcttctttcaggtgcccagaatttctccaggttttctcctgggcatgaagccattgggctatgatgtgtgaggtgcacagagcaaaaaagggggagggcccccctccattcctctaatctgggagggactactaatatggctacatgatggccggtcccatcaaccgagcatagagaagctttgataaagaaaaaagaaatacctttggagaggtgtaatcttcttcagagtgggagaaggaggggacagtgaagacaacaacagagaagaaacaagtccagtttgttttttagctcttaggcctatgataagtatatgatagtaagtgagtgagtagtaggcataaataatagtagtagtagttaattagtagtcgtttattagtagctgctgccagtgtcaagaaggtgatgaaaaggcacactccagctctctcctatgctcgtttgtggcatggatggatctctcactgttgctatgatatgttgttttatttataatatcgtgtgtataaatatttcatgtttttcactttgtttgatttgcggtaccacatatataacgatttcatgtgttttccgtggcaacgcacggaca

SEQ ID NO: 58769 - DNA, 1344 bp, Zea Mays
agggatttctacatgtgctctctatcttctagggtgtggaatggatccagtttgtcccagttcggaaatcggaatggtgaacacatatgagatgagcttcccggatatgctttaatacaatcaggaaaggtgccatttttacccagcggcttcctcgccaccaaattaaaggttgcattttgtctccggtctcaccattcccattttattctctgcgtgttgctgtctgctccagggcgacagtgggcatgctgctcggcgtcgaggacatgcacaggttcccggtgcgctccccgtggatggaccgcggcgacctcatccgcagtcccgccgcgcgatagatcgtgtccaactacttcaggtacccagagcacacgccgccattattggcacccctgctccgctcgttccattttgtttccactagccgtccaataatgttgccccgccatcgatggaccgagcagcatgttcgggccggtgcaggacgtgcgcatcccgtatcagcagaagcgcatgttcggcttcgtcaccttcgtgtacgctgagacggtgaaggtcatcctgagcaagggcaacccgcactttgtgtgcgacgctcgcgtgctcgtcaagccctacaaggagaagggcaaggtccccggtaggtttaggaagctgcagcacacgcaccatggcggagccgagttcgtcggttgcgcgtcgcccactggattgctggattccagggacccctacgccctcctgcttctttcaggtgcccagaatttctccaggttttctcctgggcatgaagccattgggctatgatgtgtgaggtgcacagagcaaaaaagggggagggcccccctccattcctctaatctgggagggactactaatatggctacatgatggccggtcccatcaaccgagcatagagaagctttgataaagaaaaaagaaatacctttggagaggtgtaatcttcttcagagtgggagaaggaggggacagtgaagacaacaacagagaagaaacaagtccagtttgttttttagctcttaggcctatgataagtatatgatagtaagtgagtgagtagtaggcataaataatagtagtagtagttaattagtagtcgtttattagtagctgctgccagtgtcaagaaggtgatgaaaaggcacactccagctctctcctatgctcgtttgtggcatggatggatctctcactgttgctatgatatgttgttttatttataatatcgtgtgtataaatatttcatgtttttcactttgtttgatttgcggtaccacatatataacgatttcatgtgttttccgtggcaacgcacggaca

SEQ ID NO: 58770 - DNA, 1502 bp, Zea Mays
ctatcttctagggtgtggaatggatccagtttgtcccagttcggaaatcggaatggtgaacacatatgagatgagcttcccggatatgtatgtaatctgagcgtttccttcctgtaatcctgtgtagcgtaggaggcttacctgctctataagcttcattgtattgttctacaaaggctttaatacaatcaggtattatcaagaaaataagaagaaaagaaacagatggctactttgagggcgacagtgggcatgctgctcggcgtcgaggacatgcacaggttcccggtgcgctccccgtggatggaccgcggcgacctcatccgcagtcccgccgcgcgatagatcgtgtccaactacttcaggtacccagagcacacgccgccattattggcacccctgctccgctcgttccattttgtttccactagccgtccaataatgttgccccgccatcgatggaccgagcagcatgttcgggccggtgcaggacgtgcgcatcccgtatcagcagaagcgcatgttcggcttcgtcaccttcgtgtacgctgagacggtgaaggtcatcctgagcaagggcaacccgcactttgtgtgcgacgctcgcgtgctcgtcaagccctacaaggagaagggcaaggtccccggaagctgcagcacacgcaccatggcggagccgagttcgtcggttgcgcgtcgcccactggattgctggattccagggacccctacgccctcctgcttctttcaggtgcccagaatttctccaggttttctcctgggcatgaagccattgggctatgatgtgtgaggtgcacagagcaaaaaagggggagggcccccctccattcctctaatctgggagtaagtgtcaacaacaaccttccttgtgcctgtctttctgatagtgctgtaaccattaataataagctagctgctgctcccatgaccatgatgcatgtatatgccagcatagatcctgaatcatgatggtcataatctgtgtgttaacgggctgttgtgcgcaggggactactaatatggctacatgatggccggtcccatcaaccgagcatagagaagctttgataaagaaaaaagaaatacctttggagaggtgtaatcttcttcagagtgggagaaggaggggacagtgaagacaacaacagagaagaaacaagtccagtttgttttttagctcttaggcctatgataagtatatgatagtaagtgagtgagtagtaggcataaataatagtagtagtagttaattagtagtcgtttattagtagctgctgccagtgtcaagaaggtgatgaaaaggcacactccagctctctcctatgctcgtttgtggcatggatggatctctcactgttgctatgatatgttgttttatttataatatcgtgtgtataaatatttcatgtttttcactttgtttgatttgcggtaccacatatataacgatttcatgtgttttccgtggcaacgcacggaca

SEQ ID NO: 58771 - DNA, 1260 bp, Zea Mays
tgaaaacttcatgagttatatggctctgggtgtggaatggatccagtttgtcccagttcggaaatcggaatggtgaacacatatgagatgagcttcccggatatgtattatcaagaaaataagaagaaaagaaacagatggctactttgagggcgacagtgggcatgctgctcggcgtcgaggacatgcacaggttcccggtgcgctccccgtggatggaccgcggcgacctcatccgcagtcccgccgcgcgatagatcgtgtccaactacttcaggtacccagagcacacgccgccattattggcacccctgctccgctcgttccattttgtttccactagccgtccaataatgttgccccgccatcgatggaccgagcagcatgttcgggccggtgcaggacgtgcgcatcccgtatcagcagaagcgcatgttcggcttcgtcaccttcgtgtacgctgagacggtgaaggtcatcctgagcaagggcaacccgcactttgtgtgcgacgctcgcgtgctcgtcaagccctacaaggagaagggcaaggtccccggtaggtttaggaagctgcagcacacgcaccatggcggagccgagttcgtcggttgcgcgtcgcccactggattgctggattccagggacccctacgccctcctgcttctttcaggtgcccagaatttctccaggttttctcctgggcatgaagccattgggctatgatgtgtgaggtgcacagagcaaaaaagggggagggcccccctccattcctctaatctgggagggactactaatatggctacatgatggccggtcccatcaaccgagcatagagaagctttgataaagaaaaaagaaatacctttggagaggtgtaatcttcttcagagtgggagaaggaggggacagtgaagacaacaacagagaagaaacaagtccagtttgttttttagctcttaggcctatgataagtatatgatagtaagtgagtgagtagtaggcataaataatagtagtagtagttaattagtagtcgtttattagtagctgctgccagtgtcaagaaggtgatgaaaaggcacactccagctctctcctatgctcgtttgtggcatggatggatctctcactgttgctatgatatgttgttttatttataatatcgtgtgtataaatatttcatgtttttcactttgtttgatttgcggtaccacatatataacgatttcatgtgttttccgtggcaacgcacggaca

SEQ ID NO: 58772 - DNA, 1246 bp, Zea Mays
gaaaagaaacagatggctactttgaggaaaggtgccatttttacccagcggcttcctcgccaccaaattaaaggttgcattttgtctccggtctcaccattcccattttattctctgcgtgttgctgtctgctccagggcgacagtgggcatgctgctcggcgtcgaggacatgcacaggttcccggtgcgctccccgtggatggaccgcggcgacctcatccgcagtcccgccgcgcgatagatcgtgtccaactacttcaggtacccagagcacacgccgccattattggcacccctgctccgctcgttccattttgtttccactagccgtccaataatgttgccccgccatcgatggaccgagcagcatgttcgggccggtgcaggacgtgcgcatcccgtatcagcagaagcgcatgttcggcttcgtcaccttcgtgtacgctgagacggtgaaggtcatcctgagcaagggcaacccgcactttgtgtgcgacgctcgcgtgctcgtcaagccctacaaggagaagggcaaggtccccggtaggtttaggaagctgcagcacacgcaccatggcggagccgagttcgtcggttgcgcgtcgcccactggattgctggattccagggacccctacgccctcctgcttctttcaggtgcccagaatttctccaggttttctcctgggcatgaagccattgggctatgatgtgtgaggtgcacagagcaaaaaagggggagggcccccctccattcctctaatctgggagggactactaatatggctacatgatggccggtcccatcaaccgagcatagagaagctttgataaagaaaaaagaaatacctttggagaggtgtaatcttcttcagagtgggagaaggaggggacagtgaagacaacaacagagaagaaacaagtccagtttgttttttagctcttaggcctatgataagtatatgatagtaagtgagtgagtagtaggcataaataatagtagtagtagttaattagtagtcgtttattagtagctgctgccagtgtcaagaaggtgatgaaaaggcacactccagctctctcctatgctcgtttgtggcatggatggatctctcactgttgctatgatatgttgttttatttataatatcgtgtgtataaatatttcatgtttttcactttgtttgatttgcggtaccacatatataacgatttcatgtgttttccgtggcaacgcacggaca

SEQ ID NO: 58773 - DNA, 2135 bp, Zea Mays
cacgacaactcatgtttatccagcccggcaggttagcgttgaccacttgtccacttaattctggaacaaaaatttcatctcacacgacgcacaagcaaacttactcctatacaaacctcagaaaaaaaaaggaggaaaccatcgaaagagaaaataaaaatccgcgacgaaccaaacgccgaagccagccactcaccccgtccctgtctcctgcacccgtcacctccatctccaccagaccaccagaaatccagaatcaaacaagtgaaagcgcaaacccttgctccgattcccctctcctcggcctcctcgacggaagtagcagagcaggggccgcggagcccatgtggcccggctgcggtggccggttttactgggcgccggaatcggcgccgccggggcaggccaggggcgtcgcggtcctgttcgcgtgggtgtggagcgacgagacgcagttgcggccgttcgttgagctgtactcctcgctcgggtggcgctgcctcgtctgccaccccgatctcgtcgcactatatctctctgagaaagcaatatcgctggcaactggtgttataaatgagctggttaaggaactgaaaataaaaattgtgccaattgttcttgcttccttttctggcggctcaaagggatgcatgtataaggttattcagttactagatggaatatgtgaaggagatgcaatcatgaaggactatcggttagtgaggaactgtatctgcgggcaaatttatgactctagccctgtagattttgtcagtgatgtgggcgcccagtttgtccaaaagcctgctgatggaaattcatctcagccaactatattgcattcatggatggcaaaggctctagcttctgtcatggatactctcttcccaagcaggattgaagctcagcgtgcagagtactggcacacactgtactcggcagcaggattgggcccagttcttctattttgctcagaagctgataaccttgctccatgctatattatctgtggttttgcacggcgtttgattgaactaggcacagaggttaaacttatgaaatggaacagctcccaacatgtcggacagctgtagatgatatgttgaagaaggctctccttaccttctgccaccgaagccaactatatgactcaaatatggctggtgaccgggagtacaagatagcgcactcggtctgcagtctacacaatgctgcagccaattcaaacgagagtttaagaggggttcctaacagtcctagcgatcacttcttcttgccaagttcgaaggatcacgatgagtctcaggaacccgggtcccacatgtcccatccaccctgcatggagcctaaaggagtccttggccaaatcctgtttgatgtttgtgttccgagaaatgttgaaggatgggacatcaagccgacagtgtccccgaatggacggccaacatttgcttctgcccgtcaacttggtccattcaatcccatcaggtacttccgacgttcaagactatagttttctgtaggagttgagattattattttttgtatatataacggaggcaaggtgtctaatgggcactctgagcaagattttacctatgtaagctccctgtaattgtttctgttttttacttttgcgctgcttggcgagagaatgtacatatgctttgtataccatattagggcttgttcggttagctctcaatccatgtggattgagtgagattggatgagtttgaatcccaaacaagtcaaacttcttctcaattttttccaatctcatccaatccatatgtattgggaataaccgaacaagcccttagtgtgtactagaaggtggatcgtggacatagtttctaggcgggttgtaaggtgcacgctaacattgaatagccaagggaatgcattattatgctcctgtagtctcctctatatttcatgttcgtcaaatctaactatcggaaaaatcttctcttcctttttactggtcatagctgatgttagtattttaatgttggtctttctttttttttcccgcttggtgtctttcgtttcttcgagtaccgttttgtgtttagtgctgtcactgactgtatttctggttcacctcaaagtcaaaacattcagtattcaga

SEQ ID NO: 58774 - DNA, 2162 bp, Zea Mays
cacgacaactcatgtttatccagcccggcaggttagcgttgaccacttgtccacttaattctggaacaaaaatttcatctcacacgacgcacaagcaaacttactcctatacaaacctcagaaaaaaaaaggaggaaaccatcgaaagagaaaataaaaatccgcgacgaaccaaacgccgaagccagccactcaccccgtccctgtctcctgcacccgtcacctccatctccaccagaccaccagaaatccagaatcaaacaagtgaaagcgcaaacccttgctccgattcccctctcctcggcctcctcgacggaagtagcagagcaggggccgcggagcccatgtggcccggctgcggtggccggttttactgggcgccggaatcggcgccgccggggcaggccaggggcgtcgcggtcctgttcgcgtgggtgtggagcgacgagacgcagttgcggccgttcgttgagctgtactcctcgctcgggtggcgctgcctcgtctgccaccccgatctcgtcgcactatatctctctgagaaagcaatatcgctggcaactggtgttataaatgagctggttaaggaactgaaaataaaaattgtgccaattgttcttgcttccttttctggcggctcaaagggatgcatgtataaggttattcagttactagatggaatatgtgaaggagatgcaatcatgaaggactatcggttagtgaggaactgtatctgcgggcaaatttatgactctagccctgtagattttgtcagtgatgtgggcgcccagtttgtccaaaagcctgctgatggaaattcatctcagccaactatattgcattcatggatggcaaaggctctagcttctgtcatggatactctcttcccaagcaggattgaagctcagcgtgcagagtactggcacacactgtactcggcagcaggattgggcccagttcttctattttgctcagaagctgataaccttgctccatgctatattatctgtggttttgcacggcgtttgattgaactaggcacagaggttaaacttatgaaatggaacagctcccaacatgtcattacaattcacatgaaactgaatacaggacagctgtagatgatatgttgaagaaggctctccttaccttctgccaccgaagccaactatatgactcaaatatggctggtgaccgggagtacaagatagcgcactcggtctgcagtctacacaatgctgcagccaattcaaacgagagtttaagaggggttcctaacagtcctagcgatcacttcttcttgccaagttcgaaggatcacgatgagtctcaggaacccgggtcccacatgtcccatccaccctgcatggagcctaaaggagtccttggccaaatcctgtttgatgtttgtgttccgagaaatgttgaaggatgggacatcaagccgacagtgtccccgaatggacggccaacatttgcttctgcccgtcaacttggtccattcaatcccatcaggtacttccgacgttcaagactatagttttctgtaggagttgagattattattttttgtatatataacggaggcaaggtgtctaatgggcactctgagcaagattttacctatgtaagctccctgtaattgtttctgttttttacttttgcgctgcttggcgagagaatgtacatatgctttgtataccatattagggcttgttcggttagctctcaatccatgtggattgagtgagattggatgagtttgaatcccaaacaagtcaaacttcttctcaattttttccaatctcatccaatccatatgtattgggaataaccgaacaagcccttagtgtgtactagaaggtggatcgtggacatagtttctaggcgggttgtaaggtgcacgctaacattgaatagccaagggaatgcattattatgctcctgtagtctcctctatatttcatgttcgtcaaatctaactatcggaaaaatcttctcttcctttttactggtcatagctgatgttagtattttaatgttggtctttctttttttttcccgcttggtgtctttcgtttcttcgagtaccgttttgtgtttagtgctgtcactgactgtatttctggttcacctcaaagtcaaaacattcagtattcaga

SEQ ID NO: 58775 - DNA, 1668 bp, Zea Mays
cacgacaactcatgtttatccagcccggcagatatctctctgagaaagcaatatcgctggcaactggtgttataaatgagctggttaaggaactgaaaataaaaattgtgccaattgttcttgcttccttttctggcggctcaaagggatgcatgtataaggttattcagttactagatggaatatgtgaaggagatgcaatcatgaaggactatcggttagtgaggaactgtatctgcgggcaaatttatgactctagccctgtagattttgtcagtgatgtgggcgcccagtttgtccaaaagcctgctgatggaaattcatctcagccaactatattgcattcatggatggcaaaggctctagcttctgtcatggatactctcttcccaagcaggattgaagctcagcgtgcagagtactggcacacactgtactcggcagcaggattgggcccagttcttctattttgctcagaagctgataaccttgctccatgctatattatctgtggttttgcacggcgtttgattgaactaggcacagaggttaaacttatgaaatggaacagctcccaacatgtcggtcattacaattcacatgaaactgaatacaggacagctgtagatgatatgttgaagaaggctctccttaccttctgccaccgaagccaactatatgactcaaatatggctggtgaccgggagtacaagatagcgcactcggtctgcagtctacacaatgctgcagccaattcaaacgagagtttaagaggggttcctaacagtcctagcgatcacttcttcttgccaagttcgaaggatcacgatgagtctcaggaacccgggtcccacatgtcccatccaccctgcatggagcctaaaggagtccttggccaaatcctgtttgatgtttgtgttccgagaaatgttgaaggatgggacatcaagccgacagtgtccccgaatggacggccaacatttgcttctgcccgtcaacttggtccattcaatcccatcaggtacttccgacgttcaagactatagttttctgtaggagttgagattattattttttgtatatataacggaggcaaggtgtctaatgggcactctgagcaagattttacctatgtaagctccctgtaattgtttctgttttttacttttgcgctgcttggcgagagaatgtacatatgctttgtataccatattagggcttgttcggttagctctcaatccatgtggattgagtgagattggatgagtttgaatcccaaacaagtcaaacttcttctcaattttttccaatctcatccaatccatatgtattgggaataaccgaacaagcccttagtgtgtactagaaggtggatcgtggacatagtttctaggcgggttgtaaggtgcacgctaacattgaatagccaagggaatgcattattatgctcctgtagtctcctctatatttcatgttcgtcaaatctaactatcggaaaaatcttctcttcctttttactggtcatagctgatgttagtattttaatgttggtctttctttttttttcccgcttggtgtctttcgtttcttcgagtaccgttttgtgtttagtgctgtcactgactgtatttctggttcacctcaaagtcaaaacattcagtattcaga

SEQ ID NO: 58776 - DNA, 2157 bp, Zea Mays
cacgacaactcatgtttatccagcccggcaggttagcgttgaccacttgtccacttaattctggaacaaaaatttcatctcacacgacgcacaagcaaacttactcctatacaaacctcagaaaaaaaaaggaggaaaccatcgaaagagaaaataaaaatccgcgacgaaccaaacgccgaagccagccactcaccccgtccctgtctcctgcacccgtcacctccatctccaccagaccaccagaaatccagaatcaaacaagtgaaagcgcaaacccttgctccgattcccctctcctcggcctcctcgacggaagtagcagagcaggggccgcggagcccatgtggcccggctgcggtggccggttttactgggcgccggaatcggcgccgccggggcaggccaggggcgtcgcggtcctgttcgcgtgggtgtggagcgacgagacgcagttgcggccgttcgttgagctgtactcctcgctcgggtggcgctgcctcgtctgccaccccgatctcgtcgcactatatctctctgagaaagcaatatcgctggcaactggtgttataaatgagctggttaaggaactgaaaataaaaattgtgccaattgttcttgcttccttttctggcggctcaaagggatgcatgtataagttactagatggaatatgtgaaggagatgcaatcatgaaggactatcggttagtgaggaactgtatctgcgggcaaatttatgactctagccctgtagattttgtcagtgatgtgggcgcccagtttgtccaaaagcctgctgatggaaattcatctcagccaactatattgcattcatggatggcaaaggctctagcttctgtcatggatactctcttcccaagcaggattgaagctcagcgtgcagagtactggcacacactgtactcggcagcaggattgggcccagttcttctattttgctcagaagctgataaccttgctccatgctatattatctgtggttttgcacggcgtttgattgaactaggcacagaggttaaacttatgaaatggaacagctcccaacatgtcggtcattacaattcacatgaaactgaatacaggacagctgtagatgatatgttgaagaaggctctccttaccttctgccaccgaagccaactatatgactcaaatatggctggtgaccgggagtacaagatagcgcactcggtctgcagtctacacaatgctgcagccaattcaaacgagagtttaagaggggttcctaacagtcctagcgatcacttcttcttgccaagttcgaaggatcacgatgagtctcaggaacccgggtcccacatgtcccatccaccctgcatggagcctaaaggagtccttggccaaatcctgtttgatgtttgtgttccgagaaatgttgaaggatgggacatcaagccgacagtgtccccgaatggacggccaacatttgcttctgcccgtcaacttggtccattcaatcccatcaggtacttccgacgttcaagactatagttttctgtaggagttgagattattattttttgtatatataacggaggcaaggtgtctaatgggcactctgagcaagattttacctatgtaagctccctgtaattgtttctgttttttacttttgcgctgcttggcgagagaatgtacatatgctttgtataccatattagggcttgttcggttagctctcaatccatgtggattgagtgagattggatgagtttgaatcccaaacaagtcaaacttcttctcaattttttccaatctcatccaatccatatgtattgggaataaccgaacaagcccttagtgtgtactagaaggtggatcgtggacatagtttctaggcgggttgtaaggtgcacgctaacattgaatagccaagggaatgcattattatgctcctgtagtctcctctatatttcatgttcgtcaaatctaactatcggaaaaatcttctcttcctttttactggtcatagctgatgttagtattttaatgttggtctttctttttttttcccgcttggtgtctttcgtttcttcgagtaccgttttgtgtttagtgctgtcactgactgtatttctggttcacctcaaagtcaaaacattcagtattcaga

SEQ ID NO: 58777 - DNA, 710 bp, Zea Mays
gcggcggtggtggtggcagtatcatccttggcgttggaggcgaggtcgtcagaccgtacagctgggcgtagtagttctgcagcgcttgcgggctggctagggcctgttcggtcgtcattaatatcgcacattcgcgtgtgttgtcaaaaattagcctcgagttgatcgcacatgatgagtaaacaacaacaataacaacaacaacaacatggcagattgctaatgttaaatctggttttgcagcatgaaaaagataatcggccgagcatgccattgccatagtcgaagttttcagtgcaaataggtagcagtgaaatgtatcgctgcatgcatgtagggtggagctaggtggtagccataggcatgtgcaccggcggttatgcatgtgatgtgaggagaaggtagaagaaagcaaaggagacgggaattgaaggatggggtgtgtggggggagggagcatgcatgcttacctgttggtattgaaagtccggcgggtaccagcagtacctgcaaaaagtttgtggagcttcttcagttttgactgagagattttttagacagcacacgcaataataataataaaaagggtaaccacaaccccccagttccttcagttcagacaaaacagttaccagcactccttcccatgcaacttgttgtaaaaggatgatatagaaaataatgcgatcatgagctacaaactgcatttt

SEQ ID NO: 58778 - DNA, 1364 bp, Zea Mays
atcgtctggtcgccttctcttccccatcatctccgcgcattttatatgcaggcttgcgcctgtcacttctcccctgtccttgctccccctcgatcccgcatcagtgcgtcacattcaccgggaatggcaacgctcaaggtcccagccactgttcctcccgtcgccgatgactgcgaccagctgcgcaaagcattccaagggtggggcacgaacgaggcgctcatcatctccatcctcggccaccgcgacgccgcgcagcgccgcgccatccgccgcgcttacgccgaggcctacggcgaggagctcctccgctccatcacggacgagatctccggcgacttcgagagggccgtgatcctgtggacgctggacccagcggagcgcgacgcggtgctggccaacgaggcggcgcggaagtggaagcccgggaaccgtgtgctcgtcgagatcgcctgcacgcgcacctccgcgcagatcttcgcgaccaggcaggcttatcacgagcggttcaagcgctcgcttgaggaagacatcgctgcgcacgtcactggggacttccgcaagctattggtgccacttgtaagtacttaccgctatgatggaccagaggtcaacacaaggttggcacactcagaagccaaactacttcatgagaagatccatcacaaggcttacagtgatgatgagatcatcagaatcctcaccactaggagcaaacctcagctgattgctacattcaatcattacaatgatgcatttggccaccgaatcaacaaggatctgaaggctgacccccaggacgagtacctcagaacgctgcgggcgatcatccggtgcttcagttgccctgacaggtactttgagaaggtggctaggcaggccatagcggggctaggcacagatgagaactccctgaccagggtcatcaccacccgcgctgaggtggacctcaaactgattaaggaggcgtaccagaagaggaacagcgtgccgctggagcgggccgtcgcgggggacacctccggcgactacgagagcatgctcctcgcgctcctggggcaggagtgatgagccgtactggtgcgctggtgcctttctgaccggcgccgtggtgtttgttcgtgatcgtaataaacctgattgcctagctgtacgtgaggctgtttcttcggtcctggtactgtcgctgcagcatgcatagcagtggaccagtggtgataaataagttactgtgctttcgacgaatgaaccctttttttgtgtctaagttgtggaacctcgagaaagtttttgtgtctaaggctgtctttagtagattgcataagtttaaaataagagataagataagagatgtgctaatagct

SEQ ID NO: 58779 - DNA, 1170 bp, Zea Mays
ccttctcttccccatcatctccgcgcattttatatgcaggcttgcgcctgtcacttctcccctgtccttgctccccctcgatcccgcatcagtgcgtcacattcaccgggaatggcaacgctcaaggtcccagccactgttcctcccgtcgccgatgactgcgaccagctgcgcaaagcattccaagggtggggcacgaacgaggcgctcatcatctccatcctcggccaccgcgacgccgcgcagcgccgcgccatccgccgcgcttacgccgaggcctacggcgaggagctcctccgctccatcacggacgagatctccggcgacttcgagagggccgtgatcctgtggacgctggacccagcggagcgcgacgcggtgctggccaacgaggcggcgcggaagtggaagcccgggaaccgtgtgctcgtcgagatcgcctgcacgcgcacctccgcgcagatcttcgcgaccaggcaggcttatcacgagcggttcaagcgctcgcttgaggaagacatcgctgcgcacgtcactggggacttccgcaagctattggtgccacttgtaagtacttaccgctatgatggaccagaggtcaacacaaggttggcacactcagaagccaaactacttcatgagaagatccatcacaaggcttacagtgatgatgagatcatcagaatcctcaccactaggagcaaacctcagctgattgctacattcaatcattacaatgatgcatttggccaccgaatcaacaaggatctgaaggctgacccccaggacgagtacctcagaacgctgcgggcgatcatccggtgcttcagttgccctgacaggtactttgagaaggtggctaggcagggagtgatgagccgtactggtgcgctggtgcctttctgaccggcgccgtggtgtttgttcgtgatcgtaataaacctgattgcctagctgtacgtgaggctgtttcttcggtcctggtactgtcgctgcagcatgcatagcagtggaccagtggtgataaataagttactgtgctttcgacgaatgaaccctttttttgtgtctaagttgtggaacctcgagaaagtttttgtgtctaaggctgtctttagtagattgcataagtttaaaataagagataagataagagatgtgctaatagct

SEQ ID NO: 58780 - DNA, 1373 bp, Zea Mays
ctaggcggattaccgcgccgtcaataatggcattgttgaagcttcctggttgcgtcagcttctccagaaactgcactgtgcgttgtcctgatgcacctttgtctaccgcgacaacatcaacaccatctacctctccaccaaacctattcaacatcaacgcacgaagcacgtagagatcaacctgcttctattgaaaaggatatatggtcttctggaagtgctaacgaagaatatctcaaagcacttaatgctttgcttagtaacttccctcgtttgagggtcactgaacctgccacattgtgcattcctcatcttgtaacatcccttaaaactggttctgaggcaactcaagaagcagcgctagattcactatatcttctcaggcaagcttggtcagcttgcccagctgaagtatttaaagcacaatcagtggctgcatcagaggctattcctctacttcaatacttgatacagtctggcccaccgcggtttcaagaaaaggcagaattgcttcttcagtgcttgcctgggactcttactgttacaataaaacgtggcaacaatctaaggcaatcagttggaaatcctagtgccttctgcaagcttactcttggaaataatccaccacggctgacaaagattgtctcgactggcgcgacacctgaatgggatgaagcctttgcatgggcatttgacagtcctcccaagggccagaagcttcatatctcctgcaaaaacaacagcaaatttggaaagaagcattcggtaaagtgacaatccagatcgacagggttgtcatgttggggtcagtcgcaggtgagtacaccctgctacccgagagcaaaagcggccccaatagaaacctggaaattgagttccagtggtcaaacaaataactgcatacctacataatttaggcgccctctgtaagttgaagatcgatgagtttgagtgttttcttgttttgtactctgctaaaggttaccctgtttgtgcatcattgtaaatagcgggcagagaaagatgtcgtttgctgtaccttctgtgagatataaacagatgagttctcagacgttttgtactggttgtgtcaggcttcattcgtttatttttttaccctgggattttgtctttgtaaaggggtgtaaacagaagtatatgatatggttaggttctcatacggaatggacgtttgcgactttgcagtctcttaccagtatacatgtttatttgccatgtttgttttgttctcatttttgaggtttgtgagggtgctgattaaaaattactgaatatttgattcatagtatgctttgtggttgattcggtttgtgtatgttattggcattgggtgtttgttcttttaagtggca

SEQ ID NO: 58781 - DNA, 2856 bp, Zea Mays
cgcgatcaacatgcatgcggcatgcatcccacgcccgacgcccgttgttcaatcatgggcatgggcggtggtccgccacctgaccgcgtaatttaacgaccagtagtttattgaaaaagaagatcgtcgttctaaacacaaggagaaactggaatccatgtccatacggtggcaacttcccaatctccgacggatgccgaaacctttccgcgtccaaattccaggcctttactttggctattactccctgacaaccgctacggtacgcaaccggccgttgctgcttgtctgctactgacgctgcggcacacagggtggaatgcgccgtgcagtaccgcgccgaggaggatgaggattccacgtccacggcacacgtactacgtttggcagtagtaggctgtaggccgcccgggcaccgcatactacggaattgagtcgttacgctcccttgcacggcacagggagcacggcgtccgcacctgcgacctcgagcagtcgagcgcgagcgcgagcgcgcaccgggcacgccctttcttatgtatgcgtttctttccaacctgggctctgactcccaccgcggaccgaccgaaccgattgcccctccacgcgctccgcttcgcacccaagtcctctagccgtttgatcccagacggcgcgacgagagcgggaggttctagccgtttcctcctcctacagtcccactccgcagtggcacggcggcgccgccgggttctcgatcgggctgctcccttcacttcacttcccttcccttcccttccttacccgccgccgcggcacacggtgcacgtggatgggctgcaaggggtccaagcacgcgctgcacgggggctgtggattggcggcgcgagcgccggagccgcagagccgctcgggacgactggcgccgcggcactccgtcgtcgcgctgcggtcgtccacgctcggaacgctcagcctcgaccgcgccgtggcggccgtcgcggcagcgggcctctctttcgacgctgcagcagcagcaggaggaggaggaggaggaggcgtggacgaggcgacgacgaaggccggagacgacgacgtcgacggcgcagggacgaagctgctggggccgtcgcggtcgttcggcgggtggcgcccgacgacgccgcctcccgtggcggcgccgccgaagcggcagaggagggcggtggtggcggcgtcgaaggccgtcgcgccgccgcggacgccgaacgagacgccggcgcgcaaccccgaccccgatcccgaggagatcgacgtgtgggagctcatgaacgggctcgaagacgaggacgaagaggcggacgacggcgctgagcggaaggcgcggtcggcgcccgcgtccccggcgttggtgccggagatcctggacgcgttccggaaggcgctcgacgacctgacgcctgatgactcgccttcgccccttcctcgtttcgtcaaacccagcggaaccggtggcgccgagaagcgcgagatccagacgttcccgggcatcgtgcgggcgcgggtcgacgtgttccaggaaaagatcaacaccaagacgacgaagcttgcagccaaggcggtctcgctctcgccgccggagagcgcgggccgagtcgtcgtgtacctcaccagcctccgcgggatccggcagacgtacgaggactgccggtccacgagcgcggtcctgcaaggctacggcgtgcgcgtcgacgagcgcgacctgtccatgcatgcgggcttcaagcacgagctccgcgccgcgctcggcgtcggcgacggcgacggcgacgaagcccgccggccgccgctcccgcaggtgttcgcggacggccgccacctgggcggcgccgaggaggtccgccgcatgcacgaggccggggacctggcgtcggccctaggtgcctgcgacgcggcgccgtgcgccgccggcgcgcaggacgcctgcgccggctgcggcggggtgcggttcgtgccgtgcggcgggtgctccggcagctgcaaggtgttcgtggacgacgaggatggctccggtgccggagcgttcaggcggtgcccggagtgcaacgagaacgggctagtgaaatgcgccgtttgctagattagttttgccatctttttttttttgagagagagtttgtgtggaattttttataaccccatctccatccttgtttgacgaccagtttcgatcgtgatcgacatcttgtacagatcagaaagaaaacaaacagttctttggatttcgatgagtctcagagtgcaagaccaacaaatgttcgagccgccggctctagcacggagtcgaccactcgatcgttacctgaggcaacgtgaaatgtgaagtgcataaaaagtcaacaacgctggcagtggcagactggcagtggggcaatggcaggaatcaatcaggaatggcagctcctcgtgtcagagaatacagaacaaggattcccatcccaatgattttgcagccacgttttgcatctatactggcacccgtactaggcgccaggatgaatgtcgcgtggtgggctggaaggctacgaggtgtacaggcagggacaaaagggctgggcagttgccgctgctagatgcaacaccctctacggtcctctgcagtaccataccaaccgtgccttggcgaccaggtatcgtgtgggcacgccgatgcacggctgcatcaaagccatgcttttccgtaccctcttgggtcttggcacagttatctagcctagatcattccgatctaatttatggtctagctaggcttccgagtatcacctctatcaggttttattgatacttttgaatatggaccgctgaagaacttgaagatcgaagaacttgaagattaaa

SEQ ID NO: 58782 - DNA, 1735 bp, Zea Mays
aactgccccgctccgatcctgtcgacggcggcggccacctgttcgaaccgcgcgctcctgctgccgtcgcccctcgctgcggcggcgaccttggcatcggccgcggggcgcggcggcggcgggtacacgtccggagcgccgacgacgccgaggtggaagcgaaacagaccccacgctgccgcggcgggctgcgcggacccggtgctgcggcgcgggcgcgccgagcgcagccgcgacgacgggctcggatgcgcgtagaacaggctgctcgacagcgagcgccgcggcggaggcgccccggcgccgtggtcggaggaggcgctcttggacgactggctccggctcacgcacccgctgctgctgctgctcgagctcgagctcgcgctgcggctgccggaccgtgacaccaggcccacggtggaggccactgactccgacctcggtagcgtggcgacgttggcatcgtcggcggccgcaaccgaggaggcgcggagcgggaggagcttgccctagcagaagacctcgtcggccgcgcacatgtccgtccccgcgctctctccggctggtacgatgtcgccggacgacaggatgcagaactcgaagtcgtcggccgagtccgaggcgcgacactctcagatcccgtgctcatcaccatcctgcccctcgctcgccgcccccacctcaccaagagccttagccgtccctagagaagacacggaggtgcagtgccagtgctttcctcaagtgcacctcggattttcggtaccggccagattgggacgaattcaacattcatcggctccaccaaaaatacgaaatggccaaggactgctgacgatgatgacgacatggccaccatcgctgccctcagattcggatatgaggccttggaattgaggaatggtggatctgattattttggcaaaggtgttcttaaggttagttaaccaaccaatgtttatatttcagtctgagggtattatactagctttatttgccatgcactcgcattcaccatagtcattcatgcatccaatggttatggttaactttatataatagaaaccaacatttgtatcctccaccttttatgtgcaataaaatttattttgagaaccttttgaagtatatgctctaaacttcagttaactaagtgtagtttttggcttagattttgaatccacagctaacatgttttagtggttacaaccattatgtttttatgggttattttctcttttcatattggactaataagtcatattgtccttttctaggttgtgaacaatgtaaataatattattggaccaacaattgtgatatatctcaattctgaagtgctttgttcgtctaattatgattttgatgattagtttatctctatgatgtgccttttaattgtttctcgttcctctaatggacacactcctgattgtgtcctgatagtatttattgttctgattagtacctgtaatctctactacttattaaggctacaaggggtagcctgcctctcccttgttctgcctcccattaatctgcgacgtccacgcgtgttaatctgcattgtccatcatgcgtacgttttcgacgtctatcgatcgcgtgcgtgacccttgcccccaagcaaccctagctctcccatcccctccgcgtccacagccgtcgtcgctctgcctcccgccatcgccgccacaccgtagacacagccagccacgatcagtctgccttccca

SEQ ID NO: 58783 - DNA, 1823 bp, Zea Mays
aactgccccgctccgatcctgtcgacggcggcggccacctgttcgaaccgcgcgctcctgctgccgtcgcccctcgctgcggcggcgaccttggcatcggccgcggggcgcggcggcggcgggtacacgtccggagcgccgacgacgccgaggtggaagcgaaacagaccccacgctgccgcggcgggctgcgcggacccggtgctgcggcgcgggcgcgccgagcgcagccgcgacgacgggctcggatgcgcgtagaacaggctgctcgacagcgagcgccgcggcggaggcgccccggcgccgtggtcggaggaggcgctcttggacgactggctccggctcacgcacccgctgctgctgctgctcgagctcgagctcgcgctgcggctgccggaccgtgacaccaggcccacggtggaggccactgactccgacctcggtagcgtggcgacgttggcatcgtcggcggccgcaaccgaggaggcgcggagcgggaggagcttgccctagcagaagacctcgtcggccgcgcacatgtccgtccccgcgctctctccggctggtacgatgtcgccggacgacaggatgcagaactcgaagtcgtcggccgagtccgaggcgcgacactctcagatcccgtgctcatcaccatcctgcccctcgctcgccgcccccacctcaccaagagccttagccgtccctagagaagacacggaggtgcagtgccagtgctttcctcaagtgcacctcggattttcggtaccggccagattgggacgaattcaacattcatcggctccaccaaaacactgccactatgatgtgtatgcttgcgtcaggacaggagacccaaaagtacttcacagatgaatgtgacattttccacaagaacgagatacgaaatggccaaggactgctgacgatgatgacgacatggccaccatcgctgccctcagattcggatatgaggccttggaattgaggaatggtggatctgattattttggcaaaggtgttcttaaggttagttaaccaaccaatgtttatatttcagtctgagggtattatactagctttatttgccatgcactcgcattcaccatagtcattcatgcatccaatggttatggttaactttatataatagaaaccaacatttgtatcctccaccttttatgtgcaataaaatttattttgagaaccttttgaagtatatgctctaaacttcagttaactaagtgtagtttttggcttagattttgaatccacagctaacatgttttagtggttacaaccattatgtttttatgggttattttctcttttcatattggactaataagtcatattgtccttttctaggttgtgaacaatgtaaataatattattggaccaacaattgtgatatatctcaattctgaagtgctttgttcgtctaattatgattttgatgattagtttatctctatgatgtgccttttaattgtttctcgttcctctaatggacacactcctgattgtgtcctgatagtatttattgttctgattagtacctgtaatctctactacttattaaggctacaaggggtagcctgcctctcccttgttctgcctcccattaatctgcgacgtccacgcgtgttaatctgcattgtccatcatgcgtacgttttcgacgtctatcgatcgcgtgcgtgacccttgcccccaagcaaccctagctctcccatcccctccgcgtccacagccgtcgtcgctctgcctcccgccatcgccgccacaccgtagacacagccagccacgatcagtctgccttccca

SEQ ID NO: 58784 - DNA, 2502 bp, Zea Mays
aactgccccgctccgatcctgtcgacggcggcggccacctgttcgaaccgcgcgctcctgctgccgtcgcccctcgctgcggcggcgaccttggcatcggccgcggggcgcggcggcggcgggtacacgtccggagcgccgacgacgccgaggtggaagcgaaacagaccccacgctgccgcggcgggctgcgcggacccggtgctgcggcgcgggcgcgccgagcgcagccgcgacgacgggctcggatgcgcgtagaacaggctgctcgacagcgagcgccgcggcggaggcgccccggcgccgtggtcggaggaggcgctcttggacgactggctccggctcacgcacccgctgctgctgctgctcgagctcgagctcgcgctgcggctgccggaccgtgacaccaggcccacggtggaggccactgactccgacctcggtagcgtggcgacgttggcatcgtcggcggccgcaaccgaggaggcgcggagcgggaggagcttgccctagcagaagacctcgtcggccgcgcacatgtccgtccccgcgctctctccggctggtacgatgtcgccggacgacaggatgcagaactcgaagtcgtcggccgagtccgaggcgcgacactctcagatcccgtgctcatcaccatcctgcccctcgctcgccgcccccacctcaccaagagccttagccgtccctagagaagacacggaggtgcagtgccagtgctttcctcaagtgcacctcggattttcggtaccggccagattgggacgaattcaacattcatcggctccaccaaaacactgccactatgatgtgtatgcttgcgtcaggacaggagacccaaaagtacttcacagatgaatgtgacattttccacaagaacgagatacgaaatggccaaggactgctgacgatgatgacgacatggccaccatcgctgccctcaggtaggccatcctccaagagctcaacccccacgcctctgttctaaaggtcctttcctccccacctatatgttttctattgaatccacaatgactagattaggcaaagcttcaccgatgagcttagcatcctactataacatgatgaatgtacacacagatcagtttagaaaactactgaaacttatctgttctattttcaataaagataaatcaacttccccacatcactcatgttcttcttgcagctttgctgcttgctattgtcttagattaattaagccatatttgagcagaccactatgcttttcctgttgcattacttgatccttgcaagttacaatccttttctgcattgatattatgttttttgtggaattttcatgtgctcaatcagaagccaaaatataactttatggctgtaactgcaacagacttatctatactacttattaaggctgtaagggtagccagcctttttgcgttctgcctccaggagatctggatcgtcagttagcctgtgtgaatctgcaccgtccgttcgtgactccctgtccacccacgccgcccccagtccacccacgccgcccccagccttccgcgccgcgcgagcaaccctccctctcagttctccctctgctgcgccgcctcccgcacccccactggcccctcaccgcggtcctccctccgttgccccgcctccccggtagttccttcatccagtccctctcacatctcctgcgatccccacccacaggagccgagcttcctgcccgcttgcttatccgccataggcttcaacacatttgaatccacgctgtgttggcgtgtatcgatgattcggtgacggtgggtgatggaggtgtgtgacctgcgcaaggtgcccgacgcggccgccccgggcgaccctcgaccatgtcgccaatcaggctgctaaccgtttcactgaccatggagcttcaccatcgagagctgggagtttggagaacagaattattggtagtgaagaggttcctaggagattcggatatgaggccttggaattgaggaatggtggatctgattattttggcaaaggtgttcttaaggttgtgaacaatgtaaataatattattggaccaacaattgtgatatatctcaattctgaagtgctttgttcgtctaattatgattttgatgattagtttatctctatgatgtgccttttaattgtttctcgttcctctaatggacacactcctgattgtgtcctgatagtatttattgttctgattagtacctgtaatctctactacttattaaggctacaaggggtagcctgcctctcccttgttctgcctcccattaatctgcgacgtccacgcgtgttaatctgcattgtccatcatgcgtacgttttcgacgtctatcgatcgcgtgcgtgacccttgcccccaagcaaccctagctctcccatcccctccgcgtccacagccgtcgtcgctctgcctcccgccatcgccgccacaccgtagacacagccagccacgatcagtctgccttccca

SEQ ID NO: 58785 - DNA, 1082 bp, Zea Mays
tcagggccaccactgcaccgaccgcggcgagccgcactgctgcgggaaccgatagtttctttttcgcaattgactaacattccggcgagtcgagctgtgcagcgctggcttccaccgccatctcgccattgattagatgtttcatgtggcctccggtggcaagtgcgctgtaccagcacccagcaggctattattttgtcggcgcagtttctttcgagtcatagtggtgacgcacggcacaagggtcaatgcgggtgcgctgataatggaggcattctcatcagttgcaaacacgaagcgcggccatatcttacactcgcttggtaatggacatggatggtgacctcagattacatcctatgatgagaagagcgccctgctggattatgttatctgtgatcctggttcagtaaaaattcatgctgacccagcaagaatcttgggcagtgaatcaacaatggtggggcccgttcaaagatttagtgggtttcaaagcaatgcctaccgatgcttgctgagtaggtgtgcatcaatggtcctttcgcattgacttttcctcatgaagttgcctgacaattatattggacttttgtgggtcagtcagtcatgttcaggatgaatcttgactcctcagatcaacttaaattgaatagtctgattaaccatcgctttgtacaaatccagctaaggttacaatgattgtggccgttattggaaacccgacctaccactgaaatcattctagaccagaatcaaagtacagcaacctcaagtgcactatgataacgttatagccttttgctatcactcagacttgtggctccctcagtttgtctttctgcattctctcttctcttttgcatgctatccaatttcatgaagtacaaagtatttaatgaaagtcacagtgtattgtcttggtaactgcatgtgcactcaattatcagtctagacattctggaagttactgtttatttctcagctttgatctatccactggacattgaaattagctttgatgttctatgttttctactaaatgttgtaagttcctttgtacagtaaaagttatttatgtttgg

SEQ ID NO: 58786 - DNA, 3526 bp, Zea Mays
cgggaaccgatagtttctttttcgcaattgactaacattccggcgagtcgagctgtgcagcgctggcttccaccgccatctcgccattgattagatgtttcatgtggcctccggtggcaagtgcgctgtaccagcacccagcaggctattattttgtcggcgcagtttctttcgagtcatagtggtgacgcacggcacaagggtcaatgcgggtgcgctgataatggaggcattctcatcagttgcaaacacgaagcgcggccatatcttacactcgggtgtgatctttggagtgctttcataaggaatcttccagtgttgtgctttgcatacattggccgagcatctttatgatcggatttgtgtggcttcagctctatagaggaaagtggttgatttttattttcctttacctgaataacgcacttattcctaattgtttaatatgatgccactaaagcacaatacacattgttttataggaactagttttagttttgttctttaatggtgcttcacctatttattataaagcaccattgagattcaagacactattggtgtcattttgtaccttttgcattcttattttgtcacccaaaaagagacatcacatagtgggaggactcatccaaatattctatatcccaaaagttgggttgccatatattactttctgctgtgatggtttgatgtgaaaaacatttatagtgccttcatgattcagtatataatactaaatatatcaattgtttctgttgtccaatttatttttttctccataaggctgttagttttgcatgaggataatcattccaggtacacttctattctctccatacatcacacatttaggtatatcattggtttttcacatctgttgctgttggcttttgaaattgtgggtcgccaattaaaataaacatcagttcatgacatccgatgatatagcctcatgtgtttcatgtatgtattacatgttaagtttttattattgaaaagcttgatatgaggaagttagctcatttgtgttgtagtaaaaatcataagcatatggataaagtattaccgtctgttatgtgatatactttttggttccattgcttatttatgatcattactgtcaggacaagtacattttcaacctttttactgtgcttgtgatttcttttcaaacctttaaaactaaaatcatccatttgcatccttaaaactataaaatctctaatctgcatacattttaaggcttttttgtgctgacatgggtactatgtatcatcgaaaaccgctggattttgggatgaaggttgcgttttaattagatggttttgagagacatgtgattaagtgaatgattcaagcacgattttgattaaatattgttctttataatttggctacttgttggtaaatttactgctgcctgctcactatggccaagttagaatttcccctgaagttttcactcgactgtcctggcgattgcaaccctttacccctggttctgtgtaactgatatagaactcaggctagctttgtatattctgattccagtaaagtgcacatatggatatatgctgcaatatggtggtccgtgacatcactgcatgcgattaagaaggttagatttgatggtctttggaatgtaaaaaggattcaatatgatttatggaaacacacaaaaatagatgttaatttttggtcttatctacatcctacatagtcatgtaaccagtaattgtcaaggatgctggaataatatgcaacttcatttgctttcgtgccttttctgtggctggtgtatacattttgcatgggcgtcttcaactttccttccctctcgggtatataaccaatgcttcctcgtgttatgatgccaatatgtttgacaaaagaagcatgcatttcatgaatctactttgccgatctgtgtaattccattcggtgcttcctatttcctttattctttttctcttttgggggaaattgacatccactcattgttatatggcactatcacagtggtgatatgcagtgggtccgctgtcctaaccacatgcaccatacctctttaaaaccccagcctaatgtgcatcctccagtccaaggccactaggagtttgtaatggagaacaatacccctccaaagactgggacgggcttcttaaaaacttgcttcaatggagttaatgctctctcaggcgttggaatattatctattccatatgcattgtctcaaggaggatggctgagcttacttatcttcttaaccatagcaatcatctgtttctacactggtattctcctacagagatgtatagactcgagttcgcttgttaagacctatcctgatatcgaaggtgacaacttggagaaattatttccaaatgctaacttccatgctgccgggctgaaggttggaagcaagcaagggtttgtgttgatgttcagtctacttgttttaccaacaacatggcttcagagcttgaacatgcttgcatatgtcgcccttggtggagtcatggcttctgtcattttaatcgcctctgttctgtgggttgggacatttgatggggttggttttcataagaaaggtgtgcctgtggactggtctggtatgccaactgccatgagcttatatgcgttctgcttcagtggccatgctgtttttccgatgatatacactggcatgaggaacagaaaaacgttccccacagtgttactcatctgcttcattatctgcactcttagctatggcctgacaggtgtcattggatacttgatgtttgggaaatcattaagctcccaggtgactctgaaccttccagctaaccattttgcctccaacattgcgatctacacgacgttgatcaatccgtttaccaagttcgcgctgctgatcactccaatagcagaggctatcgaagataaacttcatgtggacaagaataagaccgtcagtatcttaatccggactgcgctggttgtcagcacaaccattgtggcccttgccgtgcccttctttgcctatgttgtcgctcttactggttcgtttctcagcagcacggtcacaattttgctaccatgtgtttgctacctgaagatcagctcacggacctccaggaatctgaggttggagctggtagtttgcttgggtattatcatgattggggtgggattagttttggtcggcacgtatagctcactgaaaaagattgttcatagcttttgatttctgaatgatatatgcaccttgaggccttagttcgtttcatcctttattaaaccatgaagactgaaggggatgattgatgaacaaggcctgagtgggtgtaatgtaaggcagaagaaaccctaggcagatactgtagcaaatgaatcgtagacaagccgatcttgcgatctagaataagtcgcttactgagaagtcaaactcgtgtaaatttaatcaaatatatgtaaaaaattactaatgtctatgtaataaacgccattaaattagatgtgaaatatttttataatgaat

SEQ ID NO: 58787 - DNA, 1304 bp, Zea Mays
aaccgatagtttctttttcgcaattgactaacattccggcgagtcgagctgtgcagcgctggcttccaccgccatctcgccattgattagatgtttcatgtggcctccggtggcaagtgcgctgtaccagcacccagcaggctattattttgtcggcgcagtttctttcgagtcatagtggtgacgcacggcacaagggtcaatgcgggtgcgctgataatggaggcattctcatcagttgcaaacacgaagcgcggccatatcttacactcggttcgtgcttctcctgctatattgcatcttcatctcatttattccgtgctgatttggtggctcgtgtaacttttggttccacctcctattctcctttactgcgtgacacaaagagtaaactagacaatactactacgggctgctagcatgtgccaattcaagaaaagggggaacccacgaccacagaatgggctttaggttagacagaggttgagttccatacgaacatccaaccttctgatgatttttttgtgtgtctgcttgatagcttggtaatggacatggatggtgacctcagattacatcctatgatgagaagagcgccctgctggattatgttatctgtgatcctggttcagtaaaaattcatgctgacccagcaagaatcttgggcagtgaatcaacaatggtggggcccgttcaaagatttagtgggtttcaaagcaatgcctaccgatgcttgctgagtaggtgtgcatcaatggtcctttcgcattgacttttcctcatgaagttgcctgacaattatattggacttttgtgggtcagtcagtcatgttcaggatgaatcttgactcctcagatcaacttaaattgaatagtctgattaaccatcgctttgtacaaatccagctaaggttacaatgattgtggccgttattggaaacccgacctaccactgaaatcattctagaccagaatcaaagtacagcaacctcaagtgcactatgataacgttatagccttttgctatcactcagacttgtggctccctcagtttgtctttctgcattctctcttctcttttgcatgctatccaatttcatgaagtacaaagtatttaatgaaagtcacagtgtattgtcttggtaactgcatgtgcactcaattatcagtctagacattctggaagttactgtttatttctcagctttgatctatccactggacattgaaattagctttgatgttctatgttttctactaaatgttgtaagttcctttgtacagtaaaagttatttatgtttgg

SEQ ID NO: 58788 - DNA, 4664 bp, Zea Mays
aaagaaagtagttcgtgcaacgtaggaaccccaagataactcagacacttatagccaaaaacaacctatatacttaacttgacctgaccaaactaagggcttcagctaagcctaaacttccaagatgtttagctccagcttgtacccaacatgccaactcatccaagaagcttctctgcacgttgctgatggaaggagaatcaccatgaaagactacccggttaagctttaaccacaaagaccacacccccagaataatgacactattaggcctttcttcgcgaaagggcctctagctgagttggttaggtggtctgagtagcactcctcagtcctcactttctcaggtcctgggttcgactcctcgtgggaacgaattttaggctgtggtttaaaaaatcccctcgtctgtcccacgccaaagcacaggtctaaggctcgtccccggtcgcggtcgtcctcacatgggcttcgatgacgctgtgtatggatggggcaggggtttaggggttttctcgacctgtgtgagaaggtcttcttcttaatacaattctcgggggctgtcttacccccgcaggtcgagttattaggcccttcttcttgtctttgtggacccttttgcaagcacttttccaccattcagaaaaagagctatcttccacatgaccatagcaggagtgagacgtccaagaccaaaaggggataaatattgtgccaaaactgccgagcaaaggcacacatagctaggaggtgctgaactgtttcttgctcttgatcaaaaagagcgcaagcttcaggaatcaggatgggagaggcttctcttatctaatctatcagctgtccaacatttattcctcatggccagccatagacaactcttgcatttaggaggggcccaattcttccataatctttcatttttttgaagcttcagcttgtttagagtgagctatatttgatttagtggtgattctggtggcataacttcttgttttgtcaattaccttgtgtttactagactctgcatctttcccagatagttgtgtgcactctataaaaacaaggattgatagggctatgagagtaattttttgaaattagtgactgcttacatgttgtgattcaatatgcaatttgcaatgccacttatctgatactacctccctttgtgtttaatgttggtaagttcaattttgcaattagtgtctgcttacatgttgtgattcaacattcagtgtcacttgtctgatactacctcccttcctttaagtttgatgttggtaagttcaactttgcactaaccagcatcaaacataaaagatcagagggaatagcttaaaacgaaatgctcaacttttggtgtgatcataaatgatacaaagaagaaaggattgggagtatctaattggatttggtggacgtcgataaatggagattctaggcattgctcttttctgtttcttggataatgttgtgtggaccactctaggtatctctggtggataaacaagaagataccaccatatagtgtggtgttactcattaaaattgctttgaatatatcgacttcaaacatcagtgtaaagttatacaaggttagctgataccacactctttctctacgtggtcactgtgtcaaatcagaagaattgctgtcttgcacttgagttatagtggagggtgatgtcagattggatagcagtgccatgttgtaataccaattgaacccatcagaacacaatttctattttttttgaatgcctttattttttttactatgcagttttcttggacagtgaatcttctaacttttgttaaagaaactacagggtgtgatctttggagtgctttcataaggaatcttccagtgttgtgctttgcatacattggccgagcatctttatgatcggatttgtgtggcttcagctctatagaggaaagtggttgatttttattttcctttacctgaataacgcacttattcctaattgtttaatatgatgccactaaagcacaatacacattgttttataggaactagttttagttttgttctttaatggtgcttcacctatttattataaagcaccattgagattcaagacactattggtgtcattttgtaccttttgcattcttattttgtcacccaaaaagagacatcacatagtgggaggactcatccaaatattctatatcccaaaagttgggttgccatatattactttctgctgtgatggtttgatgtgaaaaacatttatagtgccttcatgattcagtatataatactaaatatatcaattgtttctgttgtccaatttatttttttctccataaggctgttagttttgcatgaggataatcattccaggtacacttctattctctccatacatcacacatttaggtatatcattggtttttcacatctgttgctgttggcttttgaaattgtgggtcgccaattaaaataaacatcagttcatgacatccgatgatatagcctcatgtgtttcatgtatgtattacatgttaagtttttattattgaaaagcttgatatgaggaagttagctcatttgtgttgtagtaaaaatcataagcatatggataaagtattaccgtctgttatgtgatatactttttggttccattgcttatttatgatcattactgtcaggacaagtacattttcaacctttttactgtgcttgtgatttcttttcaaacctttaaaactaaaatcatccatttgcatccttaaaactataaaatctctaatctgcatacattttaaggcttttttgtgctgacatgggtactatgtatcatcgaaaaccgctggattttgggatgaaggttgcgttttaattagatggttttgagagacatgtgattaagtgaatgattcaagcacgattttgattaaatattgttctttataatttggctacttgttggtaaatttactgctgcctgctcactatggccaagttagaatttcccctgaagttttcactcgactgtcctggcgattgcaaccctttacccctggttctgtgtaactgatatagaactcaggctagctttgtatattctgattccagtaaagtgcacatatggatatatgctgcaatatggtggtccgtgacatcactgcatgcgattaagaagtggtgatatgcagtgggtccgctgtcctaaccacatgcaccatacctctttaaaaccccagcctaatgtgcatcctccagtccaaggccactaggagtttgtaatggagaacaatacccctccaaagactgggacgggcttcttaaaaacttgcttcaatggagttaatgctctctcaggcgttggaatattatctattccatatgcattgtctcaaggaggatggctgagcttacttatcttcttaaccatagcaatcatctgtttctacactggtattctcctacagagatgtatagactcgagttcgcttgttaagacctatcctgatatcggtgagctagcttttgggcggaaaggaaaaatcatagtagcaatattcttgtacctagagctgtatcttgtggctattgatttcttgatattagaaggtgacaacttggagaaattatttccaaatgctaacttccatgctgccgggctgaaggttggaagcaagcaagggtttgtgttgatgttcagtctacttgttttaccaacaacatggcttcagagcttgaacatgcttgcatatgtcgcccttggtggagtcatggcttctgtcattttaatcgcctctgttctgtgggttgggacatttgatggggttggttttcataagaaaggtgtgcctgtggactggtctggtatgccaactgccatgagcttatatgcgttctgcttcagtggccatgctgtttttccgatgatatacactggcatgaggaacagaaaaacgttccccacagtgttactcatctgcttcattatctgcactcttagctatggcctgacaggtgtcattggatacttgatgtttgggaaatcattaagctcccagaggctatcgaagataaacttcatgtggacaagaataagaccgtcagtatcttaatccggactgcgctggttgtcagcacaaccattgtggcccttgccgtgcccttctttgcctatgttgtcgctcttactggttcgtttctcagcagcacggtcacaattttgctaccatgtgtttgctacctgaagatcagctcacggacctccaggaatctgaggttggagctggtagtttgcttgggtattatcatgattggggtgggattagttttggtcggcacgtatagctcactgaaaaagattgttcatagcttttgatttctgaatgatatatgcaccttgaggccttagttcgtttcatcctttattaaaccatgaagactgaaggggatgattgatgaacaaggcctgagtgggtgtaatgtaaggcagaagaaaccctaggcagatactgtagcaaatgaatcgtagacaagccgatcttgcgatctagaataagtcgcttactgagaagtcaaactcgtgtaaatttaatcaaatatatgtaaaaaattactaatgtctatgtaataaacgccattaaattagatgtgaaatatttttataatgaat

SEQ ID NO: 58789 - DNA, 2998 bp, Zea Mays
cgcaaatcgctgcccgacgcgaaagggaaaagagactgaccgagcgagcccggccctccgacacgcgacggcgcctatttgccctgtcgcggtcggtcggtccgtggcgtggacctgaagcagcctcctcacaggctcccttctcacaccgtctctgacttccctcctgcgctcccgtcctgccttcacctgacttgttcgtacttcgctcctgggctcgctggcttcctcagtccttgctgctcgctagctccgttgttcaggcggtgcctgcgccggcgaggttaggcaggactcaggcgaagtgggctagcagccgggtggcggcggcggcggtggattcctggtaggacactcctacctgcatcaagtttcgttggtacgcttccttgtggttatgaagctttctggatacacctgggaatgtttggttacgttgaagagttgttgaatacaccacatcagggtgacagcacagcaggaatttgttcaactttctgattggattgtggttctaaattgctgttctgaatttatgccatgctttagattgaagatatagtgaatgcaaactccagacacaacttgtcgtaaggttttgaatgatgaagaaatggcatggcggctttgccattgtatctttgttcatcatcttgatgttaagatatgtgatattggataacccacttgtagaaaactcgcttcagtatgttttccagcaaaacaggacggcagaattacattggttggatgttccaaacccacctgcaatccagaatctacagatttcttctgaagtaatatcaactggactcttggcttccaacctttccattaccagaaatctctctgatagagaacttcaatctttacattcttggaatcatttgaaacagctattatctcatgttcatatcctaccagatggagtagaggcaatcaaggaagctggagttgcatggagggaactcaatacagcccttgcatatgatgatgcagtttctgttaatggcagcattcagcagaaggacaaaggaaagcaatgcccttattctatcagaaggatgaatgccacaagattaggggataggtttgctttaaaacttccctgtggactgattcagggctcttcaataactattattggtacacctggtggtcttcttggtaattttaagatagagttaactggggctgcagttcctggtgaaccagaccctccaattgtccttcattataatgtccgccttcttggtgataaactcacagaagatcctgtaatagtccaaaatacatggacaatatctgatgattggggttctgaaaaccgttgcccatctcctgattcagatgctaaggacactacaaaagtggatgatctagaaaaatgtagtagcatggtaggtgaggaccagaaagaaatccttccctctaagtttcattcaaatgtttcggccatgccacctgcaagtaagaagaaagcagaacctagaaagtattttccattcagacagggatatcttgccgtagcaattcttcggatcggagcacatgggatccatatgactgtagatggcaaacatatcacttcttttgcattccgagaggatttggaaccagggtttgtaggtgaagtaagaattgcaggagacattaaattgttatctgtgatagcaagtggcctgcctacaacagaggacttcgagcatgtcactgacttagaaatattgaaggctccacctgtgcccatggataaaccggttgatcttttcattggggtcttctctacagcaaataatttcaaacgccgaatggcagttcgcagaacttggatgcagtatgattctgttcgatcaggaaaagttacagttcgattctttgttggcctgcacaaaaatgagttggtcaatgaggaactctggaatgaagcacgaacatatggagacatccagttgatgccatttgtggattactatagcctgattctttggaagaccatagcgatctgcatctatgggacaaatgtcctgtcagccaactatgtgatgaaaactgatgacgatgcttttgttcgagtagatgaagtactttcttcccttgaccgaactaatgtcaaccatggactgctgtatggtcgtgtcaattctgattcccagccacatcgagatccatatagcaagtggtacataacccctgaggaatggcctgaggagagttatcctccctgggcgcatggaccaggatatattgtttcaaaggacatagctaaagaagtttacaggaaacacaagagtggggagttaaagatgttcaagctggaggatgtcgcaatgggaatatggatcaatgagatgaagaaggatggcttggatgtcaagtatgagaatgatgggaggattttggttgaaggatgcgaggatggctatgtgattgctcattaccaagaaccaagggatatgatgtgcctctgggatcagtttcagaaaacaaaacgaggaacatgttgcaaagaataacagaaatcatgcgaatggtgttttatgttacggtggctgctgttggccgttgcttgaatagacaccttcacgctaaaacgttcttgatgtatacagccctgcctaagaggattctaaaagagctggaactggaaggcaagcaaacaattttttggatatcttcaagtttgtttcgtctgcagtttgaagagtttcaagtcaaactacggcatgggatatgcattgtacacagaatgtagggttacatttgtttttggcataggtaggagggtactgctttgcttactgtgcggcgtgtaaaatagtatcttgctagaatgtaggatacagcgacggcagtttacgttaggatagactgagacagtcttaccagttaccattttttttgaaaggaatgcattttgcatcttgtgtaaagctgtttggtgtccattctcttgtataatcgattcaatgttcatcccacccctgaacttgttttg

SEQ ID NO: 58790 - DNA, 2854 bp, Zea Mays
ctccgacacgcgacggcgcctatttgccctgtcgcggtcggtcggtccgtggcgtggacctgaagcagcctcctcacaggctcccttctcacaccgtctctgacttccctcctgcgctcccgtcctgccttcacctgacttgttcgtacttcgctcctgggctcgctggcttcctcagtccttgctgctcgctagctccgttgttcaggcggtgcctgcgccggcgaggttaggcaggactcaggcgaagtgggctagcagccgggtggcggcggcggcggtggattcctggataaaatttattcttgtctgcttttttcttctggtaggtaggacactcctacctgcatcaagtttcgttggtacgcttccttgtggttatgaagctttctggatacacctgggaatgtttggttacgttgaagagttgttgaatacaccacatcagggtgacagcacagcaggaatttgttcaactttctgattggattgtggttctaaattgctgttctgaatttatgccatgctttagattgaagatatagtgaatgcaaactccagacacaacttgtcgtaaggttttgaatgatgaagaaatggcatggcggctttgccattgtatctttgttcatcatcttgatgttaagatatgtgatattggataacccacttgtagaaaactcgcttcagtatgttttccagcaaaacaggacggcagaattacattggttggatgttccaaacccacctgcaatccagaatctacagatttcttctgaaatggagtagaggcaatcaaggaagctggagttgcatggagggaactcaatacagcccttgcatatgatgatgcagtttctgttaatggcagcattcagcagaaggacaaaggaaagcaatgcccttattctatcagaaggatgaatgccacaagattaggggataggtttgctttaaaacttccctgtggactgattcagggctcttcaataactattattggtacacctggtggtcttcttggtaattttaagatagagttaactggggctgcagttcctggtgaaccagaccctccaattgtccttcattataatgtccgccttcttggtgataaactcacagaagatcctgtaatagtccaaaatacatggacaatatctgatgattggggttctgaaaaccgttgcccatctcctgattcagatgctaaggacactacaaaagtggatgatctagaaaaatgtagtagcatggtaggtgaggaccagaaagaaatccttccctctaagtttcattcaaatgtttcggccatgccacctgcaagtaagaagaaagcagaacctagaaagtattttccattcagacagggatatcttgccgtagcaattcttcggatcggagcacatgggatccatatgactgtagatggcaaacatatcacttcttttgcattccgagaggatttggaaccagggtttgtaggtgaagtaagaattgcaggagacattaaattgttatctgtgatagcaagtggcctgcctacaacagaggacttcgagcatgtcactgacttagaaatattgaaggctccacctgtgcccatggataaaccggttgatcttttcattggggtcttctctacagcaaataatttcaaacgccgaatggcagttcgcagaacttggatgcagtatgattctgttcgatcaggaaaagttacagttcgattctttgttggcctgcacaaaaatgagttggtcaatgaggaactctggaatgaagcacgaacatatggagacatccagttgatgccatttgtggattactatagcctgattctttggaagaccatagcgatctgcatctatgggacaaatgtcctgtcagccaactatgtgatgaaaactgatgacgatgcttttgttcgagtagatgaagtactttcttcccttgaccgaactaatgtcaaccatggactgctgtatggtcgtgtcaattctgattcccagccacatcgagatccatatagcaagtggtacataacccctgaggaatggcctgaggagagttatcctccctgggcgcatggaccaggatatattgtttcaaaggacatagctaaagaagtttacaggaaacacaagagtggggagttaaagatgttcaagctggaggatgtcgcaatgggaatatggatcaatgagatgaagaaggatggcttggatgtcaagtatgagaatgatgggaggattttggttgaaggatgcgaggatggctatgtgattgctcattaccaagaaccaagggatatgatgtgcctctgggatcagtttcagaaaacaaaacgaggaacatgttgcaaagaataacagaaatcatgcgaatggtgttttatgttacggtggctgctgttggccgttgcttgaatagacaccttcacgctaaaacgttcttgatgtatacagccctgcctaagaggattctaaaagagctggaactggaaggcaagcaaacaattttttggatatcttcaagtttgtttcgtctgcagtttgaagagtttcaagtcaaactacggcatgggatatgcattgtacacagaatgtagggttacatttgtttttggcataggtaggagggtactgctttgcttactgtgcggcgtgtaaaatagtatcttgctagaatgtaggatacagcgacggcagtttacgttaggatagactgagacagtcttaccagttaccattttttttgaaaggaatgcattttgcatcttgtgtaaagctgtttggtgtccattctcttgtataatcgattcaatgttcatcccacccctgaacttgttttg

SEQ ID NO: 58791 - DNA, 2870 bp, Zea Mays
tgaagcagcctcctcacaggctcccttctcacaccgtctctgacttccctcctgcgctcccgtcctgccttcacctgacttgttcgtacttcgctcctgggctcgctggcttcctcagtccttgctgctcgctagctccgttgttcaggcggtgcctgcgccggcgaggttaggcaggactcaggcgaagtgggctagcagccgggtggcggcggcggcggtggattcctggtaggacactcctacctgcatcaagtttcgttggtacgcttccttgtggttatgaagctttctggatacacctgggaatgtttggttacgttgaagagttgttgaatacaccacatcagggtgacagcacagcaggaatttgttcaactttctgattggattgtggttctaaattgctgttctgaatttatgccatgctttagattgaagatatagtgaatgcaaactccagacacaacttgtcgtaaggttttgaatgatgaagaaatggcatggcggctttgccattgtatctttgttcatcatcttgatgttaagatatgtgatattggataacccacttgtagaaaactcgcttcagtatgttttccagcaaaacaggacggcagaattacattggttggatgttccaaacccacctgcaatccagaatctacagatttcttctgaagtaatatcaactggactcttggcttccaacctttccattaccagaaatctctctgatagagaacttcaatctttacattcttggaatcatttgaaacagctattatctcatgttcatatcctaccagatggagtagaggcaatcaaggaagctggagttgcatggagggaactcaatacagcccttgcatatgatgatgcagtttctgttaatggcagcattcagcagaaggacaaaggaaagcaatgcccttattctatcagaaggatgaatgccacaagattaggggataggtttgctttaaaacttccctgtggactgattcagggctcttcaataactattattggtacacctggtggtcttcttggtaattttaagatagagttaactggggctgcagttcctggtgaaccagaccctccaattgtccttcattataatgtccgccttcttggtgataaactcacagaagatcctgtaatagtccaaaatacatggacaatatctgatgattggggttctgaaaaccgttgcccatctcctgattcagatgctaaggacactacaaaagtggatgatctagaaaaatgtagtagcatggtaggtgaggaccagaaagaaatccttccctctaagtttcattcaaatgtttcggccatgccacctgcaagtaagaagaaagcagaacctagaaagtattttccattcagacagggatatcttgccgtagcaattcttcggatcggagcacatgggatccatatgactgtagatggcaaacatatcacttcttttgcattccgagagggtttgtaggtgaagtaagaattgcaggagacattaaattgttatctgtgatagcaagtggcctgcctacaacagaggacttcgagcatgtcactgacttagaaatattgaaggctccacctgtgcccatggataaaccggttgatcttttcattggggtcttctctacagcaaataatttcaaacgccgaatggcagttcgcagaacttggatgcagtatgattctgttcgatcaggaaaagttacagttcgattctttgttggcctgcacaaaaatgagttggtcaatgaggaactctggaatgaagcacgaacatatggagacatccagttgatgccatttgtggattactatagcctgattctttggaagaccatagcgatctgcatctatgggacaaatgtcctgtcagccaactatgtgatgaaaactgatgacgatgcttttgttcgagtagatgaagtactttcttcccttgaccgaactaatgtcaaccatggactgctgtatggtcgtgtcaattctgattcccagccacatcgagatccatatagcaagtggtacataacccctgaggaatggcctgaggagagttatcctccctgggcgcatggaccaggatatattgtttcaaaggacatagctaaagaagtttacaggaaacacaagagtggggagttaaagatgttcaagctggaggatgtcgcaatgggaatatggatcaatgagatgaagaaggatggcttggatgtcaagtatgagaatgatgggaggattttggttgaaggatgcgaggatggctatgtgattgctcattaccaagaaccaagggatatgatgtgcctctgggatcagtttcagaaaacaaaacgaggaacatgttgcaaagaataacagaaatcatgcgaatggtgttttatgttacggtggctgctgttggccgttgcttgaatagacaccttcacgctaaaacgttcttgatgtatacagccctgcctaagaggattctaaaagagctggaactggaaggcaagcaaacaattttttggatatcttcaagtttgtttcgtctgcagtttgaagagtttcaagtcaaactacggcatgggatatgcattgtacacagaatgtagggttacatttgtttttggcataggtaggagggtactgctttgcttactgtgcggcgtgtaaaatagtatcttgctagaatgtaggatacagcgacggcagtttacgttaggatagactgagacagtcttaccagttaccattttttttgaaaggaatgcattttgcatcttgtgtaaagctgtttggtgtccattctcttgtataatcgattcaatgttcatcccacccctgaacttgttttg

SEQ ID NO: 58792 - DNA, 2888 bp, Zea Mays
ctcccttctcacaccgtctctgacttccctcctgcgctcccgtcctgccttcacctgacttgttcgtacttcgctcctgggctcgctggcttcctcagtccttgctgctcgctagctccgttgttcaggcggtgcctgcgccggcgaggttaggcaggactcaggcgaagtgggctagcagccgggtggcggcggcggcggtggattcctggataaaatttattcttgtctgcttttttcttctggtaggtaggacactcctacctgcatcaagtttcgttggtacgcttccttgtggttatgaagctttctggatacacctgggaatgtttggttacgttgaagagttgttgaatacaccacatcagggtgacagcacagcaggaatttgttcaactttctgattggattgtggttctaaattgctgttctgaatttatgccatgctttagattgaagatatagtgaatgcaaactccagacacaacttgtcgtaaggttttgaatgatgaagaaatggcatggcggctttgccattgtatctttgttcatcatcttgatgttaagatatgtgatattggataacccacttgtagaaaactcgcttcagtatgttttccagcaaaacaggacggcagaattacattggttggatgttccaaacccacctgcaatccagaatctacagatttcttctgaagtaatatcaactggactcttggcttccaacctttccattaccagaaatctctctgatagagaacttcaatctttacattcttggaatcatttgaaacagctattatctcatgttcatatcctaccagatggagtagaggcaatcaaggaagctggagttgcatggagggaactcaatacagcccttgcatatgatgatgcagtttctgttaatggcagcattcagcagaaggacaaaggaaagcaatgcccttattctatcagaaggatgaatgccacaagattaggggataggtttgctttaaaacttccctgtggactgattcagggctcttcaataactattattggtacacctggtggtcttcttggtaattttaagatagagttaactggggctgcagttcctggtgaaccagaccctccaattgtccttcattataatgtccgccttcttggtgataaactcacagaagatcctgtaatagtccaaaatacatggacaatatctgatgattggggttctgaaaaccgttgcccatctcctgattcagatgctaaggacactacaaaagtggatgatctagaaaaatgtagtagcatggtaggtgaggaccagaaagaaatccttccctctaagtttcattcaaatgtttcggccatgccacctgcaagtaagaagaaagcagaacctagaaagtattttccattcagacagggatatcttgccgtagcaattcttcggatcggagcacatgggatccatatgactgtagatggcaaacatatcacttcttttgcattccgagagggtttgtaggtgaagtaagaattgcaggagacattaaattgttatctgtgatagcaagtggcctgcctacaacagaggacttcgagcatgtcactgacttagaaatattgaaggctccacctgtgcccatggataaaccggttgatcttttcattggggtcttctctacagcaaataatttcaaacgccgaatggcagttcgcagaacttggatgcagtatgattctgttcgatcaggaaaagttacagttcgattctttgttggcctgcacaaaaatgagttggtcaatgaggaactctggaatgaagcacgaacatatggagacatccagttgatgccatttgtggattactatagcctgattctttggaagaccatagcgatctgcatctatgggacaaatgtcctgtcagccaactatgtgatgaaaactgatgacgatgcttttgttcgagtagatgaagtactttcttcccttgaccgaactaatgtcaaccatggactgctgtatggtcgtgtcaattctgattcccagccacatcgagatccatatagcaagtggtacataacccctgaggaatggcctgaggagagttatcctccctgggcgcatggaccaggatatattgtttcaaaggacatagctaaagaagtttacaggaaacacaagagtggggagttaaagatgttcaagctggaggatgtcgcaatgggaatatggatcaatgagatgaagaaggatggcttggatgtcaagtatgagaatgatgggaggattttggttgaaggatgcgaggatggctatgtgattgctcattaccaagaaccaagggatatgatgtgcctctgggatcagtttcagaaaacaaaacgaggaacatgttgcaaagaataacagaaatcatgcgaatggtgttttatgttacggtggctgctgttggccgttgcttgaatagacaccttcacgctaaaacgttcttgatgtatacagccctgcctaagaggattctaaaagagctggaactggaaggcaagcaaacaattttttggatatcttcaagtttgtttcgtctgcagtttgaagagtttcaagtcaaactacggcatgggatatgcattgtacacagaatgtagggttacatttgtttttggcataggtaggagggtactgctttgcttactgtgcggcgtgtaaaatagtatcttgctagaatgtaggatacagcgacggcagtttacgttaggatagactgagacagtcttaccagttaccattttttttgaaaggaatgcattttgcatcttgtgtaaagctgtttggtgtccattctcttgtataatcgattcaatgttcatcccacccctgaacttgttttg

SEQ ID NO: 58793 - DNA, 2881 bp, Zea Mays
gacttccctcctgcgctcccgtcctgccttcacctgacttgttcgtacttcgctcctgggctcgctggcttcctcagtccttgctgctcgctagctccgttgttcaggcggtgcctgcgccggcgaggttaggcaggactcaggcgaagtgggctagcagccgggtggcggcggcggcggtggattcctgggataaaatttattcttgtctgcttttttcttctggtaggtaggacactcctacctgcatcaagtttcgttggtacgcttccttgtggttatgaagctttctggatacacctgggaatgtttggttacgttgaagagttgttgaatacaccacatcagggtgacagcacagcaggaatttgttcaactttctgattggattgtggttctaaattgctgttctgaatttatgccatgctttagattgaagatatagtgaatgcaaactccagacacaacttgtcgtaaggttttgaatgatgaagaaatggcatggcggctttgccattgtatctttgttcatcatcttgatgttaagatatgtgatattggataacccacttgtagaaaactcgcttcagtatgttttccagcaaaacaggacggcagaattacattggttggatgttccaaacccacctgcaatccagaatctacagatttcttctgaagtaatatcaactggactcttggcttccaacctttccattaccagaaatctctctgatagagaacttcaatctttacattcttggaatcatttgaaacagctattatctcatgttcatatcctaccagatggagtagaggcaatcaaggaagctggagttgcatggagggaactcaatacagcccttgcatatgatgatgcagtttctgttaatggcagcattcagcagaaggacaaaggaaagcaatgcccttattctatcagaaggatgaatgccacaagattaggggataggtttgctttaaaacttccctgtggactgattcagggctcttcaataactattattggtacacctggtggtcttcttggtaattttaagatagagttaactggggctgcagttcctggtgaaccagaccctccaattgtccttcattataatgtccgccttcttggtgataaactcacagaagatcctgtaatagtccaaaatacatggacaatatctgatgattggggttctgaaaaccgttgcccatctcctgattcagatgctaaggacactacaaaagtggatgatctagaaaaatgtagtagcatggtaggtgaggaccagaaagaaatccttccctctaagtttcattcaaatgtttcggccatgccacctgcaagtaagaagaaagcagaacctagaaagtattttccattcagacagggatatcttgccgtagcaattcttcggatcggagcacatgggatccatatgactgtagatggcaaacatatcacttcttttgcattccgagaggatttggaaccagggtttgtaggtgaagtaagaattgcaggagacattaaattgttatctgtgatagcaagtggcctgcctacaacagaggacttcgagcatgtcactgacttagaaatattgaaggctccacctgtgcccatggataaaccggttgatcttttcattggggtcttctctacagcaaataatttcaaacgccgaatggcagttcgcagaacttggatgcagtatgattctgttcgatcaggaaaagttacagttcgattctttgttggcctgcacaaaaatgagttggtcaatgaggaactctggaatgaagcacgaacatatggagacatccagttgatgccatttgtggattactatagcctgattctttggaagaccatagcgatctgcatctatgggacaaatgtcctgtcagccaactatgtgatgaaaactgatgacgatgcttttgttcgagtagatgaagtactttcttcccttgaccgaactaatgtcaaccatggactgctgtatggtcgtgtcaattctgattcccagccacatcgagatccatatagcaagtggtacataacccctgaggaatggcctgaggagagttatcctccctgggcgcatggaccaggatatattgtttcaaaggacatagctaaagaagtttacaggaaacacaagagtggggagttaaagatgttcaagctggaggatgtcgcaatgggaatatggatcaatgagatgaagaaggatggcttggatgtcaagtatgagaatgatgggaggattttggttgaaggatgcgaggatggctatgtgattgctcattaccaagaaccaagggatatgatgtgcctctgggatcagtttcagaaaacaaaacgaggaacatgttgcaaagaataacagaaatcatgcgaatggtgttttatgttacggtggctgctgttggccgttgcttgaatagacaccttcacgctaaaacgttcttgatgtatacagccctgcctaagaggattctaaaagagctggaactggaaggcaagcaaacaattttttggatatcttcaagtttgtttcgtctgcagtttgaagagtttcaagtcaaactacggcatgggatatgcattgtacacagaatgtagggttacatttgtttttggcataggtaggagggtactgctttgcttactgtgcggcgtgtaaaatagtatcttgctagaatgtaggatacagcgacggcagtttacgttaggatagactgagacagtcttaccagttaccattttttttgaaaggaatgcattttgcatcttgtgtaaagctgtttggtgtccattctcttgtataatcgattcaatgttcatcccacccctgaacttgttttg

SEQ ID NO: 58794 - DNA, 2734 bp, Zea Mays
cttcgctcctgggctcgctggcttcctcagtccttgctgctcgctagctccgttgttcaggcggtgcctgcgccggcgaggttaggcaggactcaggcgaagtgggctagcagccgggtggcggcggcggcggtggattcctggtaggacactcctacctgcatcaagtttcgttggtacgcttccttgtggttatgaagctttctggatacacctgggaatgtttggttacgttgaagagttgttgaatacaccacatcagggtgacagcacagcaggaatttgttcaactttctgattggattgtggttctaaattgctgttctgaatttatgccatgctttagattgaagatatagtgaatgcaaactccagacacaacttgtcgtaaggttttgaatgatgaagaaatggcatggcggctttgccattgtatctttgttcatcatcttgatgttaagatatgtgatattggataacccacttgtagaaaactcgcttcagtatgttttccagcaaaacaggacggcagaattacattggttggatgttccaaacccacctgcaatccagaatctacagatttcttctgaagtaatatcaactggactcttggcttccaacctttccattaccagaaatctctctgatagagaacttcaatctttacattcttggaatcatttgaaacagctattatctcatgttcatatcctaccagatggagtagaggcaatcaaggaagctggagttgcatggagggaactcaatacagcccttgcatatgatgatgcagtttctgttaatggcagcattcagcagaaggacaaaggaaagcaatgcccttattctatcagaaggatgaatgccacaagattaggggataggtttgctttaaaacttccctgtggactgattcagggctcttcaataactattattggtacacctggtggtcttcttggtaattttaagatagagttaactggggctgcagttcctggtgaaccagaccctccaattgtccttcattataatgtccgccttcttggtgataaactcacagaagatcctgtaatagtccaaaatacatggacaatatctgatgattggggttctgaaaaccgttgcccatctcctgattcagatgctaaggacactacaaaagtggatgatctagaaaaatgtagtagcatggtaggtgaggaccagaaagaaatccttccctctaagtttcattcaaatgtttcggccatgccacctgcaagtaagaagaaagcagaacctagaaagtattttccattcagacagggatatcttgccgtagcaattcttcggatcggagcacatgggatccatatgactgtagatggcaaacatatcacttcttttgcattccgagaggatttggaaccagggtttgtaggtgaagtaagaattgcaggagacattaaattgttatctgtgatagcaagtggcctgcctacaacagaggacttcgagcatgtcactgacttagaaatattgaaggctccacctgtgcccatggataaaccggttgatcttttcattggggtcttctctacagcaaataatttcaaacgccgaatggcagttcgcagaacttggatgcagtatgattctgttcgatcaggaaaagttacagttcgattctttgttggcctgcacaaaaatgagttggtcaatgaggaactctggaatgaagcacgaacatatggagacatccagttgatgccatttgtggattactatagcctgattctttggaagaccatagcgatctgcatctatgggatgaagtactttcttcccttgaccgaactaatgtcaaccatggactgctgtatggtcgtgtcaattctgattcccagccacatcgagatccatatagcaagtggtacataacccctgaggaatggcctgaggagagttatcctccctgggcgcatggaccaggatatattgtttcaaaggacatagctaaagaagtttacaggaaacacaagagtggggagttaaagatgttcaagctggaggatgtcgcaatgggaatatggatcaatgagatgaagaaggatggcttggatgtcaagtatgagaatgatgggaggattttggttgaaggatgcgaggatggctatgtgattgctcattaccaagaaccaagggatatgatgtgcctctgggatcagtttcagaaaacaaaacgaggaacatgttgcaaagaataacagaaatcatgcgaatggtgttttatgttacggtggctgctgttggccgttgcttgaatagacaccttcacgctaaaacgttcttgatgtatacagccctgcctaagaggattctaaaagagctggaactggaaggcaagcaaacaattttttggatatcttcaagtttgtttcgtctgcagtttgaagagtttcaagtcaaactacggcatgggatatgcattgtacacagaatgtagggttacatttgtttttggcataggtaggagggtactgctttgcttactgtgcggcgtgtaaaatagtatcttgctagaatgtaggatacagcgacggcagtttacgttaggatagactgagacagtcttaccagttaccattttttttgaaaggaatgcattttgcatcttgtgtaaagctgtttggtgtccattctcttgtataatcgattcaatgttcatcccacccctgaacttgttttg

SEQ ID NO: 58795 - DNA, 2607 bp, Zea Mays
ctgtcgtgtagcgatttcctgcgaaatttggggttcgcgtgctcgataaaatttattcttgtctgcttttttcttctggtaggtaggacactcctacctgcatcaagtttcgttggtacgcttccttgtggttatgaagctttctggatacacctgggaatgtttggttacgttgaagagttgttgaatacaccacatcagggtgacagcacagcaggaatttgttcaactttctgattggattgtggttctaaattgctgttctgaatttatgccatgctttagattgaagatatagtgaatgcaaactccagacacaacttgtcgtaaggttttgaatgatgaagaaatggcatggcggctttgccattgtatctttgttcatcatcttgatgttaagatatgtgatattggataacccacttgtagaaaactcgcttcagtatgttttccagcaaaacaggacggcagaattacattggttggatgttccaaacccacctgcaatccagaatctacagatttcttctgaaatggagtagaggcaatcaaggaagctggagttgcatggagggaactcaatacagcccttgcatatgatgatgcagtttctgttaatggcagcattcagcagaaggacaaaggaaagcaatgcccttattctatcagaaggatgaatgccacaagattaggggataggtttgctttaaaacttccctgtggactgattcagggctcttcaataactattattggtacacctggtggtcttcttggtaattttaagatagagttaactggggctgcagttcctggtgaaccagaccctccaattgtccttcattataatgtccgccttcttggtgataaactcacagaagatcctgtaatagtccaaaatacatggacaatatctgatgattggggttctgaaaaccgttgcccatctcctgattcagatgctaaggacactacaaaagtggatgatctagaaaaatgtagtagcatggtaggtgaggaccagaaagaaatccttccctctaagtttcattcaaatgtttcggccatgccacctgcaagtaagaagaaagcagaacctagaaagtattttccattcagacagggatatcttgccgtagcaattcttcggatcggagcacatgggatccatatgactgtagatggcaaacatatcacttcttttgcattccgagaggatttggaaccagggtttgtaggtgaagtaagaattgcaggagacattaaattgttatctgtgatagcaagtggcctgcctacaacagaggacttcgagcatgtcactgacttagaaatattgaaggctccacctgtgcccatggataaaccggttgatcttttcattggggtcttctctacagcaaataatttcaaacgccgaatggcagttcgcagaacttggatgcagtatgattctgttcgatcaggaaaagttacagttcgattctttgttggcctgcacaaaaatgagttggtcaatgaggaactctggaatgaagcacgaacatatggagacatccagttgatgccatttgtggattactatagcctgattctttggaagaccatagcgatctgcatctatgggacaaatgtcctgtcagccaactatgtgatgaaaactgatgacgatgcttttgttcgagtagatgaagtactttcttcccttgaccgaactaatgtcaaccatggactgctgtatggtcgtgtcaattctgattcccagccacatcgagatccatatagcaagtggtacataacccctgaggaatggcctgaggagagttatcctccctgggcgcatggaccaggatatattgtttcaaaggacatagctaaagaagtttacaggaaacacaagagtggggagttaaagatgttcaagctggaggatgtcgcaatgggaatatggatcaatgagatgaagaaggatggcttggatgtcaagtatgagaatgatgggaggattttggttgaaggatgcgaggatggctatgtgattgctcattaccaagaaccaagggatatgatgtgcctctgggatcagtttcagaaaacaaaacgaggaacatgttgcaaagaataacagaaatcatgcgaatggtgttttatgttacggtggctgctgttggccgttgcttgaatagacaccttcacgctaaaacgttcttgatgtatacagccctgcctaagaggattctaaaagagctggaactggaaggcaagcaaacaattttttggatatcttcaagtttgtttcgtctgcagtttgaagagtttcaagtcaaactacggcatgggatatgcattgtacacagaatgtagggttacatttgtttttggcataggtaggagggtactgctttgcttactgtgcggcgtgtaaaatagtatcttgctagaatgtaggatacagcgacggcagtttacgttaggatagactgagacagtcttaccagttaccattttttttgaaaggaatgcattttgcatcttgtgtaaagctgtttggtgtccattctcttgtataatcgattcaatgttcatcccacccctgaacttgttttg

SEQ ID NO: 58796 - DNA, 4151 bp, Zea Mays
ctcacacctcatgagaaaccctatatagaaaaatagtacaatctagctcatcaagttcatatgttcatcatcaggttcatctagccttagcagtgggttgttcaaaccatggggccaccataatatttgtaccagacaatttcattttgagctcagggaaatgaattagttcatcaagcttttcaggagaagggaactgcataatataaccctcttggcatttcttaggtttccacattttccccaaggaaaatgatagctaaaatccttttcaagatcaacaacagagacttttccttctaggaccctaatcaaaccaacacattcatgcttaggttttttgacatgggtcttagcacactgcgaggaaaagaatcctagctcatctgtagctatccccaccaccagcatcaacagcttgctttgcctaggccagacgcatctggtagtcacatgggtatccttgcgacatatctcacaccatagagacttagagcagtctctagcgtgatgcccttcttccccacacttctgacaaaaaaccttctccccatgtcatgatctaccactggaggggagatctgagagttagggttaccttgcatcaacatctctccggatgaagacgatccaacgaagtcgcccttgactggcatccttcctataggtggcttcaatctccagctcaagttcctgttccttccccattgttgctgctcttgaggactctccttattgttgccccgctcccacttctgagtccagtctttcgcctccctcctctcggccttcagcaacgaccgagaaatcctgaatctgagacgaggccactcctcacggcctgagggaggttgacgctggatccaccgccaacccccatggaagccaatgcgaaaagtggaagggccacccacagcaaggaggagaaagcggcgaggtgggggagagataacctaccaattaggtcattcgtatccacaaccttcaacgatctcgatccatccatggaggatgtggcgcaatctgttgaaaccgagctcacgggctaggccaactggactcccgacaccgccgacgcaacccaaggatcacccaaaacttccacctcagaccccaaccccctccatggccccataactagagaaacaacaacactacgtccctacgaaacgcaagcaagccatagaaaggatggaacttgcttttctctttttttgaaacatgggattcctgcagtctgctctttaccgtgtccacggcaccatcctccgccgtcgggtgtagccgtctagcctatgcttacctttcagctgagtgaccaaacactgcaccctttcgatcatgcttccttccaaggcacagcccgactgtcagctgtccgctgcccaccgcgtgcgctgcgctcccgtgcggcactgccggcggcgcgaccccgcgcccattggacgagcttccgccccgccccgatcgatcccgccgccatgtcgtcggcggccgtgtcgtcctcttcctccaccttcttcctcgcgctcgcctccgcctcccccgggggccgcaggcgggctagggtcggctcctcgccgttccacaccggcgccagcctgagtttcgcgttctgggcgccaccgtcgccgccgcgcgcgccccgggacgcagcgctggtgcgcgctgaggctgaggccgggggcaaggacgcgccgccggagaggagcggcgacgccgccaggttgccccgcgctcggcgcaatgcggtctccaaacggagggatcctcttcagccggtcggccggtacggctccgcgacgggaaacacggccaggaccggcgccgcgtcctgccagaacgccgcattggcggacgttgagatcaagtccatcgtcgccgcgccgccgacgagcatagtgaagttcccagcgccgggctacaggatgatccttccctctggggacatagcgccggagactgtcctcccagccccgaagccactgcatgaatcgcctgcggttgacggagattcaaatggaattgcacctcctacagttgagccattagtacaggaggccacttgggatttcaagaaatacatcggttttgacgagcctgacgaagcgaaggatgattccagggttggtgcagatgatgctggttcttttgaacattatggggacaatgattctgggcctttggccggggagaatgttatgaacgtgatcgtggtggctgctgaatgttctccatggtgcaaaacaggtggtcttggagatgttgtgggagctttacccaaggctttagcgagaagaggacatcgtgttatggttgtggtaccaaggtatggggactatgtggaagcctttgatatgggaatccggaaatactacaaagctgcaggacaggacctagaagtgaactatttccatgcatttattgatggagtcgactttgtgttcattgatgcccctcttttccggcaccgtcaagatgacatatatgggggaagtaggcaggaaatcatgaagcgcatgattttgttttgcaaggttgctgttgaggttccttggcacgttccatgcggtggtgtgtgctacggagatggaaatttggtgttcattgccaatgattggcacactgcactcctgcctgtttatctgaaggcatattacagagaccatgggttaatgcagtacactcgctccgtcctcgtcatacataacatcgcccaccagggccgtggtcctgtagatgaattcccgtacatggacttgcctgaacactaccttcaacatttcgagctgtacgatcccgtcggtggcgagcacgccaacatctttgccgcgggtctgaagatggcagaccgggtggtgactgtcagccgcggctacctgtgggagctgaagacagtggaaggcggctggggcctccacgacatcatccgttctaacgactggaagatcaatggcatcgtgaacggcatcgaccaccaggagtggaaccccaaggtggacgtgcacctgcggtcggacggctacaccaactactccctcgagacactcgacgctggaaagcggcagtgcaaggcggccctgcagcgggagctgggcctggaagtgcgcgacgacgtgccgctgctcggcttcatcgggcgtctggatggacagaagggcgtggacatcatcggggacgcgatgccgtggatcgcggggcaggacgtgcagctggtgatgctgggcaccgggcgcgccgacctggaacgaatgctgcagcacttggagcgggagcatcccaacaaggtgcgcgggtgggtcgggttctcggtgcctatggcgcatcgcatcacggcgggcgccgacgtgctggtgatgccctcccgcttcgagccctgcgggctgaaccagctctacgcgatggcatacggcaccgtccctgtggtgcacgccgtgggcgggctcagggacaccgtggcgccgttcgacccgttcagcgacgccgggctcgggtggacttttgaccgcgccgaggccaacaagctgatcgaggcgctcaggcactgcctcgacacgtaccggaactacgaggagagctggaagagtctccaggcgcgcggcatgtcgcaggacctcagctgggaccacgcggctgagctctacgaggacgtccttgtcaaggccaagtaccagtggtgaaccctccgccctccgcatcaatatcttcggtttgatcccattgtacatcgcgcgtttgacggtctcggtgaagaacttcatatgcagtgacgcgccgctggggtcggtagcagtactatgggattgcattgagctgtgtcactatgtgctttcgacaggacagtagtgaaggttgtatgcaagtttattttttttttcattactgatatttggaatgtcaacacaataaatgaagctactatgtgtttcgtaagtataatgttacttatttaggtgatacttcattcaagttcagagatttttttattgttagatcaaattacagcagtgaaggttgtatgcaagtttagttttttttttcattactgatatttggaatgtcaacacaataaatgaagttactatgtcttttgtaagtataatgttacttatttaggtgatactccatccaaaaacaatttttttattgtt

SEQ ID NO: 58797 - DNA, 4452 bp, Zea Mays
ttcattttgagctcagggaaatgaattagttcatcaagcttttcaggagaagggaactgcataatataaccctcttggcatttcttaggtttccacattttccccaaggaaaatgatagctaaaatccttttcaagatcaacaacagagacttttccttctaggaccctaatcaaaccaacacattcatgcttaggttttttgacatgggtcttagcacactgcgaggaaaagaatcctagctcatctgtagctatccccaccaccagcatcaacagcttgctttgcctaggccagacgcatctggtagtcacatgggtatccttgcgacatatctcacaccatagagacttagagcagtctctagcgtgatgcccttcttccccacacttctgacaaaaaaccttctccccatgtcatgatctaccactggaggggagatctgagagttagggttaccttgcatcaacatctctccggatgaagacgatccaacgaagtcgcccttgactggcatccttcctataggtggcttcaatctccagctcaagttcctgttccttccccattgttgctgctcttgaggactctccttattgttgccccgctcccacttctgagtccagtctttcgcctccctcctctcggccttcagcaacgaccgagaaatcctgaatctgagacgaggccactcctcacggcctgagggaggttgacgctggatccaccgccaacccccatggaagccaatgcgaaaagtggaagggccacccacagcaaggaggagaaagcggcgaggtgggggagagataacctaccaattaggtcattcgtatccacaaccttcaacgatctcgatccatccatggaggatgtggcgcaatctgttgaaaccgagctcacgggctaggccaactggactcccgacaccgccgacgcaacccaaggatcacccaaaacttccacctcagaccccaaccccctccatggccccataactagagaaacaacaacactacgtccctacgaaacgcaagcaagccatagaaaggatggaacttgcttttctctttttttgaaacatgggattcctgcagtctgctctttaccgtgtccacggcaccatcctccgccgtcgggtgtagccgtctagcctatgcttacctttcagctgagtgaccaaacactgcaccctttcgatcatgcttccttccaaggcacagcccgactgtcagcacgccactctattgctctctataaagtgggccccgctgcttatacaagatccataccccgaagcacgccattttccatcgtgccacctttccaagtagcaaaacccctcgggtccactcgtgcggccgacgggtgggaccagtgaaactccgggcccacgtgtgattggcaaagcacggcctctcgctgggctgccgtaggtagccgaagcacaccaaggaaacggctggcagctggctcctgctcgtgcgccggccgcttctttccaagtgcgcgcgccacagccgcaaaagcgcgagcaaacgacgggaggccgttcgcgcgacgcctggctccgtcacggcgtccccgccgtgatccgcttggccctattcgccagccacacaacaacctcacggggtgccgtaaaccctcctcactcgccactccccactctaccgctgtccgctgcccaccgcgtgcgctgcgctcccgtgcggcactgccggcggcgcgaccccgcgcccattggacgagcttccgccccgccccgatcgatcccgccgccatgtcgtcggcggccgtgtcgtcctcttcctccaccttcttcctcgcgctcgcctccgcctcccccgggggccgcaggcgggctagggtcggctcctcgccgttccacaccggcgccagcctgagtttcgcgttctgggcgccaccgtcgccgccgcgcgcgccccgggacgcagcgctggtgcgcgctgaggctgaggccgggggcaaggacgcgccgccggagaggagcggcgacgccgccaggttgccccgcgctcggcgcaatgcggtctccaaacggagggatcctcttcagccggtcggccggtacggctccgcgacgggaaacacggccaggaccggcgccgcgtcctgccagaacgccgcattggcggacgttgagatcaagtccatcgtcgccgcgccgccgacgagcatagtgaagttcccagcgccgggctacaggatgatccttccctctggggacatagcgccggagactgtcctcccagccccgaagccactgcatgaatcgcctgcggttgacggagattcaaatggaattgcacctcctacagttgagccattagtacaggaggccacttgggatttcaagaaatacatcggttttgacgagcctgacgaagcgaaggatgattccagggttggtgcagatgatgctggttcttttgaacattatggggacaatgattctgggcctttggccggggagaatgttatgaacgtgatcgtggtggctgctgaatgttctccatggtgcaaaacaggtggtcttggagatgttgtgggagctttacccaaggctttagcgagaagaggacatcgtgttatggttgtggtaccaaggtatggggactatgtggaagcctttgatatgggaatccggaaatactacaaagctgcaggacaggacctagaagtgaactatttccatgcatttattgatggagtcgactttgtgttcattgatgcccctcttttccggcaccgtcaagatgacatatatgggggaagtaggcaggaaatcatgaagcgcatgattttgttttgcaaggttgctgttgaggttccttggcacgttccatgcggtggtgtgtgctacggagatggaaatttggtgttcattgccaatgattggcacactgcactcctgcctgtttatctgaaggcatattacagagaccatgggttaatgcagtacactcgctccgtcctcgtcatacataacatcgcccaccagggccgtggtcctgtagatgaattcccgtacatggacttgcctgaacactaccttcaacatttcgagctgtacgatcccgtcggtggcgagcacgccaacatctttgccgcgggtctgaagatggcagaccgggtggtgactgtcagccgcggctacctgtgggagctgaagacagtggaaggcggctggggcctccacgacatcatccgttctaacgactggaagatcaatggcatcgtgaacggcatcgaccaccaggagtggaaccccaaggtggacgtgcacctgcggtcggacggctacaccaactactccctcgagacactcgacgctggaaagcggcagtgcaaggcggccctgcagcgggagctgggcctggaagtgcgcgacgacgtgccgctgctcggcttcatcgggcgtctggatggacagaagggcgtggacatcatcggggacgcgatgccgtggatcgcggggcaggacgtgcagctggtgatgctgggcaccgggcgcgccgacctggaacgaatgctgcagcacttggagcgggagcatcccaacaaggtgcgcgggtgggtcgggttctcggtgcctatggcgcatcgcatcacggcgggcgccgacgtgctggtgatgccctcccgcttcgagccctgcgggctgaaccagctctacgcgatggcatacggcaccgtccctgtggtgcacgccgtgggcgggctcagggacaccgtggcgccgttcgacccgttcagcgacgccgggctcgggtggacttttgaccgcgccgaggccaacaagctgatcgaggcgctcaggcactgcctcgacacgtaccggaactacgaggagagctggaagagtctccaggcgcgcggcatgtcgcaggacctcagctgggaccacgcggctgagctctacgaggacgtccttgtcaaggccaagtaccagtggtgaaccctccgccctccgcatcaatatcttcggtttgatcccattgtacatcgcgcgtttgacggtctcggtgaagaacttcatatgcagtgacgcgccgctggggtcggtagcagtactatgggattgcattgagctgtgtcactatgtgctttcgacaggacagtagtgaaggttgtatgcaagtttattttttttttcattactgatatttggaatgtcaacacaataaatgaagctactatgtgtttcgtaagtataatgttacttatttaggtgatacttcattcaagttcagagatttttttattgttagatcaaattacagcagtgaaggttgtatgcaagtttagttttttttttcattactgatatttggaatgtcaacacaataaatgaagttactatgtcttttgtaagtataatgttacttatttaggtgatactccatccaaaaacaatttttttattgtt

SEQ ID NO: 58798 - DNA, 4013 bp, Zea Mays
ttcattttgagctcagggaaatgaattagttcatcaagcttttcaggagaagggaactgcataatataaccctcttggcatttcttaggtttccacattttccccaaggaaaatgatagctaaaatccttttcaagatcaacaacagagacttttccttctaggaccctaatcaaaccaacacattcatgcttaggttttttgacatgggtcttagcacactgcgaggaaaagaatcctagctcatctgtagctatccccaccaccagcatcaacagcttgctttgcctaggccagacgcatctggtagtcacatgggtatccttgcgacatatctcacaccatagagacttagagcagtctctagcgtgatgcccttcttccccacacttctgacaaaaaaccttctccccatgtcatgatctaccactggaggggagatctgagagttagggttaccttgcatcaacatctctccggatgaagacgatccaacgaagtcgcccttgactggcatccttcctataggtggcttcaatctccagctcaagttcctgttccttccccattgttgctgctcttgaggactctccttattgttgccccgctcccacttctgagtccagtctttcgcctccctcctctcggccttcagcaacgaccgagaaatcctgaatctgagacgaggccactcctcacggcctgagggaggttgacgctggatccaccgccaacccccatggaagccaatgcgaaaagtggaagggccacccacagcaaggaggagaaagcggcgaggtgggggagagataacctaccaattaggtcattcgtatccacaaccttcaacgatctcgatccatccatggaggatgtggcgcaatctgttgaaaccgagctcacgggctaggccaactggactcccgacaccgccgacgcaacccaaggatcacccaaaacttccacctcagaccccaaccccctccatggccccataactagagaaacaacaacactacgtccctacgaaacgcaagcaagccatagaaaggatggaacttgcttttctctttttttgaaacatgggattcctgcagtctgctctttaccgtgtccacggcaccatcctccgccgtcgggtgtagccgtctagcctatgcttacctttcagctgagtgaccaaacactgcaccctttcgatcatgcttccttccaaggcacagcccgactgtcagctgtccgctgcccaccgcgtgcgctgcgctcccgtgcggcactgccggcggcgcgaccccgcgcccattggacgagcttccgccccgccccgatcgatcccgccgccatgtcgtcggcggccgtgtcgtcctcttcctccaccttcttcctcgcgctcgcctccgcctcccccgggggccgcaggcgggctagggtcggctcctcgccgttccacaccggcgccagcctgagtttcgcgttctgggcgccaccgtcgccgccgcgcgcgccccgggacgcagcgctggtgcgcgctgaggctgaggccgggggcaaggacgcgccgccggagaggagcggcgacgccgccaggttgccccgcgctcggcgcaatgcggtctccaaacggagggatcctcttcagccggtcggccggtacggctccgcgacgggaaacacggccaggaccggcgccgcgtcctgccagaacgccgcattggcggacgttgagatcaagtccatcgtcgccgcgccgccgacgagcatagtgaagttcccagcgccgggctacaggatgatccttccctctggggacatagcgccggagactgtcctcccagccccgaagccactgcatgaatcgcctgcggttgacggagattcaaatggaattgcacctcctacagttgagccattagtacaggaggccacttgggatttcaagaaatacatcggttttgacgagcctgacgaagcgaaggatgattccagggttggtgcagatgatgctggttcttttgaacattatggggacaatgattctgggcctttggccggggagaatgttatgaacgtgatcgtggtggctgctgaatgttctccatggtgcaaaacagaggtggtcttggagatgttgtgggagctttacccaaggctttagcgagaagaggacatcgtgttatggttgtggtaccaaggtatggggactatgtggaagcctttgatatgggaatccggaaatactacaaagctgcaggacaggacctagaagtgaactatttccatgcatttattgatggagtcgactttgtgttcattgatgcccctcttttccggcaccgtcaagatgacatatatgggggaagtaggcaggaaatcatgaagcgcatgattttgttttgcaaggttgctgttgaggttccttggcacgttccatgcggtggtgtgtgctacggagatggaaatttggtgttcattgccaatgattggcacactgcactcctgcctgtttatctgaaggcatattacagagaccatgggttaatgcagtacactcgctccgtcctcgtcatacataacatcgcccaccagggccgtggtcctgtagatgaattcccgtacatggacttgcctgaacactaccttcaacatttcgagctgtacgatcccgtcggtggcgagcacgccaacatctttgccgcgggtctgaagatggcagaccgggtggtgactgtcagccgcggctacctgtgggagctgaagacagtggaaggcggctggggcctccacgacatcatccgttctaacgactggaagatcaatggcatcgtgaacggcatcgaccaccaggagtggaaccccaaggtggacgtgcacctgcggtcggacggctacaccaactactccctcgagacactcgacgctggaaagcggcagtgcaaggcggccctgcagcgggagctgggcctggaagtgcgcgacgacgtgccgctgctcggcttcatcgggcgtctggatggacagaagggcgtggacatcatcggggacgcgatgccgtggatcgcggggcaggacgtgcagctggtgatgctgggcaccgggcgcgccgacctggaacgaatgctgcagcacttggagcgggagcatcccaacaaggtgcgcgggtgggtcgggttctcggtgcctatggcgcatcgcatcacggcgggcgccgacgtgctggtgatgccctcccgcttcgagccctgcgggctgaaccagctctacgcgatggcatacggcaccgtccctgtggtgcacgccgtgggcgggctcagggacaccgtggcgccgttcgacccgttcagcgacgccgggctcgggtggacttttgaccgcgccgaggccaacaagctgatcgaggcgctcaggcactgcctcgacacgtaccggaactacgaggagagctggaagagtctccaggcgcgcggcatgtcgcaggacctcagctgggaccacgcggctgagctctacgaggacgtccttgtcaaggccaagtaccagtggtgaaccctccgccctccgcatcaatatcttcggtttgatcccattgtacatcgcgcgtttgacggtctcggtgaagaacttcatatgcagtgacgcgccgctggggtcggtagcagtactatgggattgcattgagctgtgtcactatgtgctttcgacaggacagtagtgaaggttgtatgcaagtttattttttttttcattactgatatttggaatgtcaacacaataaatgaagctactatgtgtttcgtaagtataatgttacttatttaggtgatacttcattcaagttcagagatttttttattgttagatcaaattacagcagtgaaggttgtatgcaagtttagttttttttttcattactgatatttggaatgtcaacacaataaatgaagttactatgtcttttgtaagtataatgttacttatttaggtgatactccatccaaaaacaatttttttattgtt

SEQ ID NO: 58799 - DNA, 4013 bp, Zea Mays
ttcattttgagctcagggaaatgaattagttcatcaagcttttcaggagaagggaactgcataatataaccctcttggcatttcttaggtttccacattttccccaaggaaaatgatagctaaaatccttttcaagatcaacaacagagacttttccttctaggaccctaatcaaaccaacacattcatgcttaggttttttgacatgggtcttagcacactgcgaggaaaagaatcctagctcatctgtagctatccccaccaccagcatcaacagcttgctttgcctaggccagacgcatctggtagtcacatgggtatccttgcgacatatctcacaccatagagacttagagcagtctctagcgtgatgcccttcttccccacacttctgacaaaaaaccttctccccatgtcatgatctaccactggaggggagatctgagagttagggttaccttgcatcaacatctctccggatgaagacgatccaacgaagtcgcccttgactggcatccttcctataggtggcttcaatctccagctcaagttcctgttccttccccattgttgctgctcttgaggactctccttattgttgccccgctcccacttctgagtccagtctttcgcctccctcctctcggccttcagcaacgaccgagaaatcctgaatctgagacgaggccactcctcacggcctgagggaggttgacgctggatccaccgccaacccccatggaagccaatgcgaaaagtggaagggccacccacagcaaggaggagaaagcggcgaggtgggggagagataacctaccaattaggtcattcgtatccacaaccttcaacgatctcgatccatccatggaggatgtggcgcaatctgttgaaaccgagctcacgggctaggccaactggactcccgacaccgccgacgcaacccaaggatcacccaaaacttccacctcagaccccaaccccctccatggccccataactagagaaacaacaacactacgtccctacgaaacgcaagcaagccatagaaaggatggaacttgcttttctctttttttgaaacatgggattcctgcagtctgctctttaccgtgtccacggcaccatcctccgccgtcgggtgtagccgtctagcctatgcttacctttcagctgagtgaccaaacactgcaccctttcgatcatgcttccttccaaggcacagcccgactgtcagctgtccgctgcccaccgcgtgcgctgcgctcccgtgcggcactgccggcggcgcgaccccgcgcccattggacgagcttccgccccgccccgatcgatcccgccgccatgtcgtcggcggccgtgtcgtcctcttcctccaccttcttcctcgcgctcgcctccgcctcccccgggggccgcaggcgggctagggtcggctcctcgccgttccacaccggcgccagcctgagtttcgcgttctgggcgccaccgtcgccgccgcgcgcgccccgggacgcagcgctggtgcgcgctgaggctgaggccgggggcaaggacgcgccgccggagaggagcggcgacgccgccaggttgccccgcgctcggcgcaatgcggtctccaaacggagggatcctcttcagccggtcggccggtacggctccgcgacgggaaacacggccaggaccggcgccgcgtcctgccagaacgccgcattggcggacgttgagatcaagtccatcgtcgccgcgccgccgacgagcatagtgaagttcccagcgccgggctacaggatgatccttccctctggggacatagcgccggagactgtcctcccagccccgaagccactgcatgaatcgcctgcggttgacggagattcaaatggaattgcacctcctacagttgagccattagtacaggaggccacttgggatttcaagaaatacatcggttttgacgagcctgacgaagcgaaggatgattccagggttggtgcagatgatgctggttcttttgaacattatggggacaatgattctgggcctttggccggggagaatgttatgaacgtgatcgtggtggctgctgaatgttctccatggtgcaaaacaggtggtcttggagatgttgtgggagctttacccaaggctttagcgagaagaggacatcgtgttatggtgttgtggtaccaaggtatggggactatgtggaagcctttgatatgggaatccggaaatactacaaagctgcaggacaggacctagaagtgaactatttccatgcatttattgatggagtcgactttgtgttcattgatgcccctcttttccggcaccgtcaagatgacatatatgggggaagtaggcaggaaatcatgaagcgcatgattttgttttgcaaggttgctgttgaggttccttggcacgttccatgcggtggtgtgtgctacggagatggaaatttggtgttcattgccaatgattggcacactgcactcctgcctgtttatctgaaggcatattacagagaccatgggttaatgcagtacactcgctccgtcctcgtcatacataacatcgcccaccagggccgtggtcctgtagatgaattcccgtacatggacttgcctgaacactaccttcaacatttcgagctgtacgatcccgtcggtggcgagcacgccaacatctttgccgcgggtctgaagatggcagaccgggtggtgactgtcagccgcggctacctgtgggagctgaagacagtggaaggcggctggggcctccacgacatcatccgttctaacgactggaagatcaatggcatcgtgaacggcatcgaccaccaggagtggaaccccaaggtggacgtgcacctgcggtcggacggctacaccaactactccctcgagacactcgacgctggaaagcggcagtgcaaggcggccctgcagcgggagctgggcctggaagtgcgcgacgacgtgccgctgctcggcttcatcgggcgtctggatggacagaagggcgtggacatcatcggggacgcgatgccgtggatcgcggggcaggacgtgcagctggtgatgctgggcaccgggcgcgccgacctggaacgaatgctgcagcacttggagcgggagcatcccaacaaggtgcgcgggtgggtcgggttctcggtgcctatggcgcatcgcatcacggcgggcgccgacgtgctggtgatgccctcccgcttcgagccctgcgggctgaaccagctctacgcgatggcatacggcaccgtccctgtggtgcacgccgtgggcgggctcagggacaccgtggcgccgttcgacccgttcagcgacgccgggctcgggtggacttttgaccgcgccgaggccaacaagctgatcgaggcgctcaggcactgcctcgacacgtaccggaactacgaggagagctggaagagtctccaggcgcgcggcatgtcgcaggacctcagctgggaccacgcggctgagctctacgaggacgtccttgtcaaggccaagtaccagtggtgaaccctccgccctccgcatcaatatcttcggtttgatcccattgtacatcgcgcgtttgacggtctcggtgaagaacttcatatgcagtgacgcgccgctggggtcggtagcagtactatgggattgcattgagctgtgtcactatgtgctttcgacaggacagtagtgaaggttgtatgcaagtttattttttttttcattactgatatttggaatgtcaacacaataaatgaagctactatgtgtttcgtaagtataatgttacttatttaggtgatacttcattcaagttcagagatttttttattgttagatcaaattacagcagtgaaggttgtatgcaagtttagttttttttttcattactgatatttggaatgtcaacacaataaatgaagttactatgtcttttgtaagtataatgttacttatttaggtgatactccatccaaaaacaatttttttattgtt

SEQ ID NO: 58800 - DNA, 4014 bp, Zea Mays
ttcattttgagctcagggaaatgaattagttcatcaagcttttcaggagaagggaactgcataatataaccctcttggcatttcttaggtttccacattttccccaaggaaaatgatagctaaaatccttttcaagatcaacaacagagacttttccttctaggaccctaatcaaaccaacacattcatgcttaggttttttgacatgggtcttagcacactgcgaggaaaagaatcctagctcatctgtagctatccccaccaccagcatcaacagcttgctttgcctaggccagacgcatctggtagtcacatgggtatccttgcgacatatctcacaccatagagacttagagcagtctctagcgtgatgcccttcttccccacacttctgacaaaaaaccttctccccatgtcatgatctaccactggaggggagatctgagagttagggttaccttgcatcaacatctctccggatgaagacgatccaacgaagtcgcccttgactggcatccttcctataggtggcttcaatctccagctcaagttcctgttccttccccattgttgctgctcttgaggactctccttattgttgccccgctcccacttctgagtccagtctttcgcctccctcctctcggccttcagcaacgaccgagaaatcctgaatctgagacgaggccactcctcacggcctgagggaggttgacgctggatccaccgccaacccccatggaagccaatgcgaaaagtggaagggccacccacagcaaggaggagaaagcggcgaggtgggggagagataacctaccaattaggtcattcgtatccacaaccttcaacgatctcgatccatccatggaggatgtggcgcaatctgttgaaaccgagctcacgggctaggccaactggactcccgacaccgccgacgcaacccaaggatcacccaaaacttccacctcagaccccaaccccctccatggccccataactagagaaacaacaacactacgtccctacgaaacgcaagcaagccatagaaaggatggaacttgcttttctctttttttgaaacatgggattcctgcagtctgctctttaccgtgtccacggcaccatcctccgccgtcgggtgtagccgtctagcctatgcttacctttcagctgagtgaccaaacactgcaccctttcgatcatgcttccttccaaggcacagcccgactgtcagctgtccgctgcccaccgcgtgcgctgcgctcccgtgcggcactgccggcggcgcgaccccgcgcccattggacgagcttccgccccgccccgatcgatcccgccgccatgtcgtcggcggccgtgtcgtcctcttcctccaccttcttcctcgcgctcgcctccgcctcccccgggggccgcaggcgggctagggtcggctcctcgccgttccacaccggcgccagcctgagtttcgcgttctgggcgccaccgtcgccgccgcgcgcgccccgggacgcagcgctggtgcgcgctgaggctgaggccgggggcaaggacgcgccgccggagaggagcggcgacgccgccaggttgccccgcgctcggcgcaatgcggtctccaaacggagggatcctcttcagccggtcggccggtacggctccgcgacgggaaacacggccaggaccggcgccgcgtcctgccagaacgccgcattggcggacgttgagatcaagtccatcgtcgccgcgccgccgacgagcatagtgaagttcccagcgccgggctacaggatgatccttccctctggggacatagcgccggagactgtcctcccagccccgaagccactgcatgaatcgcctgcggttgacggagattcaaatggaattgcacctcctacagttgagccattagtacaggaggccacttgggatttcaagaaatacatcggttttgacgagcctgacgaagcgaaggatgattccagggttggtgcagatgatgctggttcttttgaacattatggggacaatgattctgggcctttggccggggagaatgttatgaacgtgatcgtggtggctgctgaatgttctccatggtgcaaaacaggcaagaacattactcttagcggattctttcagaactgcttttcgtttgagtttgatggagttactgatgttgtggtaccaaggtatggggactatgtggaagcctttgatatgggaatccggaaatactacaaagctgcaggacaggacctagaagtgaactatttccatgcatttattgatggagtcgactttgtgttcattgatgcccctcttttccggcaccgtcaagatgacatatatgggggaagtaggcaggaaatcatgaagcgcatgattttgttttgcaaggttgctgttgaggttccttggcacgttccatgcggtggtgtgtgctacggagatggaaatttggtgttcattgccaatgattggcacactgcactcctgcctgtttatctgaaggcatattacagagaccatgggttaatgcagtacactcgctccgtcctcgtcatacataacatcgcccaccagggccgtggtcctgtagatgaattcccgtacatggacttgcctgaacactaccttcaacatttcgagctgtacgatcccgtcggtggcgagcacgccaacatctttgccgcgggtctgaagatggcagaccgggtggtgactgtcagccgcggctacctgtgggagctgaagacagtggaaggcggctggggcctccacgacatcatccgttctaacgactggaagatcaatggcatcgtgaacggcatcgaccaccaggagtggaaccccaaggtggacgtgcacctgcggtcggacggctacaccaactactccctcgagacactcgacgctggaaagcggcagtgcaaggcggccctgcagcgggagctgggcctggaagtgcgcgacgacgtgccgctgctcggcttcatcgggcgtctggatggacagaagggcgtggacatcatcggggacgcgatgccgtggatcgcggggcaggacgtgcagctggtgatgctgggcaccgggcgcgccgacctggaacgaatgctgcagcacttggagcgggagcatcccaacaaggtgcgcgggtgggtcgggttctcggtgcctatggcgcatcgcatcacggcgggcgccgacgtgctggtgatgccctcccgcttcgagccctgcgggctgaaccagctctacgcgatggcatacggcaccgtccctgtggtgcacgccgtgggcgggctcagggacaccgtggcgccgttcgacccgttcagcgacgccgggctcgggtggacttttgaccgcgccgaggccaacaagctgatcgaggcgctcaggcactgcctcgacacgtaccggaactacgaggagagctggaagagtctccaggcgcgcggcatgtcgcaggacctcagctgggaccacgcggctgagctctacgaggacgtccttgtcaaggccaagtaccagtggtgaaccctccgccctccgcatcaatatcttcggtttgatcccattgtacatcgcgcgtttgacggtctcggtgaagaacttcatatgcagtgacgcgccgctggggtcggtagcagtactatgggattgcattgagctgtgtcactatgtgctttcgacaggacagtagtgaaggttgtatgcaagtttattttttttttcattactgatatttggaatgtcaacacaataaatgaagctactatgtgtttcgtaagtataatgttacttatttaggtgatacttcattcaagttcagagatttttttattgttagatcaaattacagcagtgaaggttgtatgcaagtttagttttttttttcattactgatatttggaatgtcaacacaataaatgaagttactatgtcttttgtaagtataatgttacttatttaggtgatactccatccaaaaacaatttttttattgtt

SEQ ID NO: 58801 - DNA, 3837 bp, Zea Mays
ttcattttgagctcagggaaatgaattagttcatcaagcttttcaggagaagggaactgcataatataaccctcttggcatttcttaggtttccacattttccccaaggaaaatgatagctaaaatccttttcaagatcaacaacagagacttttccttctaggaccctaatcaaaccaacacattcatgcttaggttttttgacatgggtcttagcacactgcgaggaaaagaatcctagctcatctgtagctatccccaccaccagcatcaacagcttgctttgcctaggccagacgcatctggtagtcacatgggtatccttgcgacatatctcacaccatagagacttagagcagtctctagcgtgatgcccttcttccccacacttctgacaaaaaaccttctccccatgtcatgatctaccactggaggggagatctgagagttagggttaccttgcatcaacatctctccggatgaagacgatccaacgaagtcgcccttgactggcatccttcctataggtggcttcaatctccagctcaagttcctgttccttccccattgttgctgctcttgaggactctccttattgttgccccgctcccacttctgagtccagtctttcgcctccctcctctcggccttcagcaacgaccgagaaatcctgaatctgagacgaggccactcctcacggcctgagggaggttgacgctggatccaccgccaacccccatggaagccaatgcgaaaagtggaagggccacccacagcaaggaggagaaagcggcgaggtgggggagagataacctaccaattaggtcattcgtatccacaaccttcaacgatctcgatccatccatggaggatgtggcgcaatctgttgaaaccgagctcacgggctaggccaactggactcccgacaccgccgacgcaacccaaggatcacccaaaacttccacctcagaccccaaccccctccatggccccataactagagaaacaacaacactacgtccctacgaaacgcaagcaagccatagaaaggatggaacttgcttttctctttttttgaaacatgggattcctgcagtctgctctttaccgtgtccacggcaccatcctccgccgtcgggtgtagccgtctagcctatgcttacctttcagctgagtgaccaaacactgcaccctttcgatcatgcttccttccaaggcacagcccgactgtcagctgtccgctgcccaccgcgtgcgctgcgctcccgtgcggcactgccggcggcgcgaccccgcgcccattggacgagcttccgccccgccccgatcgatcccgccgccatgtcgtcggcggccgtgtcgtcctcttcctccaccttcttcctcgcgctcgcctccgcctcccccgggggccgcaggcgggctagggtcggctcctcgccgttccacaccggcgccagcctgagtttcgcgttctgggcgccaccgtcgccgccgcgcgcgccccgggacgcagcgctggtgcgcgctgaggctgaggccgggggcaaggacgcgccgccggagaggagcggcgacgccgccaggttgccccgcgctcggcgcaatgcggtctccaaacggagggatcctcttcagccggtcggccggtacggctccgcgacgggaaacacggccaggaccggcgccgcgtcctgccagaacgccgcattggcggacgttgagatcaagtccatcgtcgccgcgccgccgacgagcatagtgaagttcccagcgccgggctacaggatgatccttccctctggggacatagcgccggagactgtcctcccagccccgaagccactgcatgaatcgcctgcggttgacggagattcaaatggaattgcacctcctacagttgagccattagtacaggaggccacttgggatttcaagaaatacatcggttttgacgagcctgacgaagcgaaggatgattccagggttggtgcagatgatgctggttcttttgaacattatggggacaatgattctgggcctttggccggggagaatgttatgaacgtgatcgtggtggctgctgaatgttctccatggtgcaaaacaggtggtcttggagatgttgtgggagctttacccaaggctttagcgagaagaggacatcgtgttatggttgtggtaccaaggtatggggactatgtggaagcctttgatatgggaatccggaaatactacaaagctgcaggacaggacctagaagtgaactatttccatgcatttattgatggagtcgactttgtgttcattgatgcccctcttttccggcaccgtcaagatgacatatatgggggaagtaggcaggaaatcatgaagcgcatgattttgttttgcaaggttgctgttgagggccgtggtcctgtagatgaattcccgtacatggacttgcctgaacactaccttcaacatttcgagctgtacgatcccgtcggtggcgagcacgccaacatctttgccgcgggtctgaagatggcagaccgggtggtgactgtcagccgcggctacctgtgggagctgaagacagtggaaggcggctggggcctccacgacatcatccgttctaacgactggaagatcaatggcatcgtgaacggcatcgaccaccaggagtggaaccccaaggtggacgtgcacctgcggtcggacggctacaccaactactccctcgagacactcgacgctggaaagcggcagtgcaaggcggccctgcagcgggagctgggcctggaagtgcgcgacgacgtgccgctgctcggcttcatcgggcgtctggatggacagaagggcgtggacatcatcggggacgcgatgccgtggatcgcggggcaggacgtgcagctggtgatgctgggcaccgggcgcgccgacctggaacgaatgctgcagcacttggagcgggagcatcccaacaaggtgcgcgggtgggtcgggttctcggtgcctatggcgcatcgcatcacggcgggcgccgacgtgctggtgatgccctcccgcttcgagccctgcgggctgaaccagctctacgcgatggcatacggcaccgtccctgtggtgcacgccgtgggcgggctcagggacaccgtggcgccgttcgacccgttcagcgacgccgggctcgggtggacttttgaccgcgccgaggccaacaagctgatcgaggcgctcaggcactgcctcgacacgtaccggaactacgaggagagctggaagagtctccaggcgcgcggcatgtcgcaggacctcagctgggaccacgcggctgagctctacgaggacgtccttgtcaaggccaagtaccagtggtgaaccctccgccctccgcatcaatatcttcggtttgatcccattgtacatcgcgcgtttgacggtctcggtgaagaacttcatatgcagtgacgcgccgctggggtcggtagcagtactatgggattgcattgagctgtgtcactatgtgctttcgacaggacagtagtgaaggttgtatgcaagtttattttttttttcattactgatatttggaatgtcaacacaataaatgaagctactatgtgtttcgtaagtataatgttacttatttaggtgatacttcattcaagttcagagatttttttattgttagatcaaattacagcagtgaaggttgtatgcaagtttagttttttttttcattactgatatttggaatgtcaacacaataaatgaagttactatgtcttttgtaagtataatgttacttatttaggtgatactccatccaaaaacaatttttttattgtt

SEQ ID NO: 58802 - DNA, 1553 bp, Zea Mays
cctaaaaaaaggtcgctccgctgaactgccctctgcgcctcataatcgaaaaggaccaaagccacgtttcctcctcaacaaaaaccctcgcaaaaatctgggatctatctagaagcatcactcaacaaaccctaggttgcctgatcggttgatcgctccatggcgatcatctccgacttcaaggacgacgaggcaccggagcagcagctggcggccggccacggcgtcgaggtggccctcgtggcggcgttggagaggagcggcggcgcgctccccttcctacaggcggctatggatgtcgcccaccgcaggtccggcctgttccgcgacccttcggcggtgagcaaggtcaccgcgatggcggcggccgtcagggcgcagatcgaagccgaggagagggtgaccagggaggcggaggccaagaggaaggcggaggaggacgagaggaaggcggaggccgaggcgcagagggctgccaaggaggcggtaatggcgacggcagaggagaagccagagagcacggtggagaaggacagcatggaggtggataagaaggaggaagccaacgtgagacaaccaaatgctggcaatggtcttgacttggagaagtactcgtggactcaacagttgccagaggttaacatcaccattcctgttcctcaaggaacaaaatcaagatttgtggtatttgatttaaagaagaaccatctgaaggttggtctgaagggccagccacctatcattgatggcgagctctataagccagttaaggttgatgactgcttctggagcatagaggatgggagaaccctgtccatattgcttacaaagcatgaccaaatggaatggtggaagtctgttataaagggtgatcctgaagttgatacccaaaaggtggaacctgagaacagtaaactctctgatttggatcctgagactagacaaaccgtggaaaagatgatgtttgaccagcgccagaagcagatgggccttccaacaagtgatgaaatgcaaaagcaagaaattctcaagaagttcatgtctgagcacccggagatggacttctctagagcgaaattagattgaggatgtgtttggccgtttgtctgaatgcgttattagtatgaaacattttttgatcagtttgcatgtaatgcgtcagaaatatctggagatagacttctctagagcgaaaatagcttgaggatgtgttcggccagttatttctaccagtgtgcattggttgtctgagtgcgttattagtatgaaacaaaaattttgatcagttcgcgtgtaatcgtcagaaatatccggagatggacttctctagagcgaaaatagcttgaggatgtgttgggccagctatttctacagtgtgcgttaggttgtctgagtacgttatcagtatgaaacgaattttgaacagtctcttgtaatgcgtcagaaatatttttttagaactgtggcatgtcttgaaccaatacgatggctggattatgtcgatttttttttaaaaagagaaaacatggaactcaattactgatgtgtaaacc

SEQ ID NO: 58803 - DNA, 3131 bp, Zea Mays
gcggaaacttccacgaccacccgcgctctcttcgggttcggacccgaccgcacgcggttcaacgagttgtgccgaggcaaaaccctagctcacctccatggatagccacggccacgtctctggcggcaagcgcaagggcaagcgcgcccgcaagccggagccgccggtactcgcctctcccgacaacagccacgaccacaagcaccacgacaccgcaccatcctcctcgcccctctccaccgccgccgtcgcggcgtcagactccccggaccccgagccggcgtcatcctccccagctccccgccgccggggccgcaagtcccgccgcatccgcaacgggacccactccgaggtcgatgccgccccctcaccctcgcctccgccgcgtcggggcgggcctaagggggcgccgaacggtgcggtggacatggtggaggttcccgcggcggtggagcccctgcgttgggaccaggtggtgaaggtggtgccgtcgatggacgccgtggtgaaggtgttctgcgtccacacggagcccaacttctccctgccgtggcagcggaagaggcagtacagctcgagcagcagcgggttcatcattgggggccgtagggtgctcactaacgcccactcggttgagcattacacccaggtcaagctcaagaagcgtggctcggacaccaagtaccttgcgactgtccttgccataggcaccgagtgtgacattgcaatgttgaccgttgaggatgatgaattctggaaaggcgtttcacctgtagagtttgggtcgctgccagcacttcaggatgccgtcactgttgttggttacccaattggaggcgatactatctcggtgactagtggtgtagtttctaggatagaaatactttcatatgttcatggttctacagagcttcttgggttacagatagatgcagctataaattcaggaaattcaggggggcctgctttcaatgataagggaaaatgtgttggtatagctttccaatctcttaaacatgaagatgcagagaacataggctatgttatacccaccccagttattaaccacttcattgaagattacaaaaaatctggagaatacacaggtttccctatacttggaatagaatggcaaaaaatggaaaatcctgatctccgcaaggcaatgggaatgaaagctaaccaaaagggtgttcggatacgaagggttgagccaactgctcctgaatctggatgtctcgaaccttctgatatcatccttagctttgatggtattgatattgccaatgatggtacaggttagcccttgcttcacatgactggatatgctaattgtcacctttttatatctaatttgtctgcattgtcataagtgttatatcatattacaagtctgtagctggtacaagtgttatatgcaatctcctaaaggtaagacaccaatttctgtttttaatccaaacatctgaacaattttactcattattttttcatgaaaaagggagaatttattcttcaggctttcagggacacctttctacataatttgtcgagctaaaactcagtgtctatcattccccacaaccatagacctcccacccagataaacatgttttatcttgattaaatcaatccacagggggattgggattttatgttttagctgagtagtgtgcccacctcccatgcagttttctttacaatttgttgactttgacactgagggtcaccgtagtcataactatttgaatccaatcacaacatttcttgttaaggcattcaaacaaaaaaaaatctcaattatcttgtcataggccttcttgaagtttacctttaggactagaccatctctcttcttaattctagtatcatggagtatttcgtgcaaagccattaccctatgatttgtttcaattattttaaaagcttctaagtacgtttttaggtgcttttcacatttctctcgaggtggtttgcattgaatattttcctgggacaagggaacttcacttaacaatgttggaatttgtaaatttgatactttctcatccagttgaaacttaccttttcatgctactcagttatatccagtgaggaaaattgatttgatctcttgctctctcactgcttggtcatccagttccttttaggcatggtgaacgcattggatttacctaccttgtttctcaaaagtacactggtgagaaggcacgcgtgaaagtacttcgcaactcaaaaatccatgaatttaacataaagctagcaacccacaaaagactcattccagctcatatcaagggaaggccgccgtcatattacattgttgctggctttgtttttatggctgtgtctgttccatatcttcgatctgagtatggaaaagaatatgaatacgatgcccccgtgaagttgttggacaagcatttgcatgcaatggcacaatcatctgatgagcagcttgtggtggtgtcacaggtgcttgtggctgatataaacattggttacgaagatatagtcaacattcaggttcttgccttcaatggcacaccggttaaaaatttgaagcacctagcgaccatggtggaagagtgcaatgaagcattcttgaagtttgatctggacttcgatcaggtggttgtcctggagacgaaaactgcaaaggctgcaactcaagatattctgacaacacattgtataccttcggctgcctcagaagagctgaagagctgaggaaagctaggtgttgtctgtcggctggtgagattctgcatgtcgaagagtggaagctggaatgtaacctagttgtaccaaagagtgcctagcaagtatcacatacacacaaaatgcatactgatgactgaatgtcgcattgagccacccgggtcagttgtaggataggtaaaaaaacaaaacaaagttttgcccatattccattaatctagttgacatcaacgaaatcatcatgagtaactttgcgtatccctatttgccatgattggtctgatgacacttctgctttagacatctgtggtccggttgccaagagcatgccactactttgttgtggagtactctagttcatcgaagaaaacaatcgtatctggatggcttttgcatcagttttctgtgtc

SEQ ID NO: 58804 - DNA, 2715 bp, Zea Mays
gcgctctcttcgggttcggacccgaccgcacgcggttcaacgagttggtttctggtttctctccttctagcaccactgccgagtgccgaggcaaaaccctagctcacctccatggatagccacggccacgtctctggcggcaagcgcaagggcaagcgcgcccgcaagccggagccgccggtactcgcctctcccgacaacagccacgaccacaagcaccacgacaccgcaccatcctcctcgcccctctccaccgccgccgtcgcggcgtcagactccccggaccccgagccggcgtcatcctccccagctccccgccgccggggccgcaagtcccgccgcatccgcaacgggacccactccgaggtcgatgccgccccctcaccctcgcctccgccgcgtcggggcgggcctaagggggcgccgaacggtgcggtggacgttgcggagccgtctcggcgggagctggcggttaagatggtggaggttcccgcggcggtggagcccctgcgttgggaccaggtggtgaaggtggtgccgtcgatggacgccgtggtgaaggtgttctgcgtccacacggagcccaacttctccctgccgtggcagcggaagaggcagtacagctcgagcagcagcgggttcatcattgggggccgtagggtgctcactaacgcccactcggttgagcattacacccaggtcaagctcaagaagcgtggctcggacaccaagtaccttgcgactgtccttgccataggcaccgagtgtgacattgcaatgttgaccgttgaggatgatgaattctggaaaggcgtttcacctgtagagtttgggtcgctgccagcacttcaggatgccgtcactgttgttggttacccaattggaggcgatactatctcggtgactagtggtgtagtttctaggatagaaatactttcatatgttcatggttctacagagcttcttgggttacagatagatgcagctataaattcaggaaattcaggggggcctgctttcaatgataagggaaaatgtgttggtatagctttccaatctcttaaacatgaagatgcagagaacataggctatgttatacccaccccagttattaaccacttcattgaagattacaaaaaatctggagaatacacaggtttccctatacttggaatagaatggcaaaaaatggaaaatcctgatctccgcaaggcaatgggaatgaaagctaaccaaaagggtgttcggatacgaagggttgagccaactgctcctgaatctggatgtctcgaaccttctgatatcatccttagctttgatggtattgatattgccaatgatggtacaggttagcccttgcttcacatgactggatatgctaattgtcacctttttatatctaatttgtctgcattgtcataagtgttatatcatattacaagtctgtagctggtacaagtgttatatgcaatctcctaaaggtaagacaccaatttctgtttttaatccaaacatctgaacaattttactcattattttttcatgaaaaagggagaatttattcttcaggctttcagggacacctttctacataatttgtcgagctaaaactcagtgtctatcattccccacaaccatagacctcccacccagataaacatgttttatcttgattaaatcaatccacagggggattgggattttatgttttagctgagtagtgtgcccacctcccatgcagttttctttacaatttgttgactttgacactgagggtcaccgtagtcataactatttgaatccaatcacaacatttcttgttaaggcattcaaacaaaaaaaaatctcaattatcttgtcataggccttcttgaagtttacctttaggactagaccatctctcttcttaattctagtatcatggagtatttcgtgcaaagccattaccctatgatttgtttcaattattttaaaagcttctaagtacgtttttaggtgcttttcacatttctctcgaggtggtttgcattgaatattttcctgggacaagggaacttcacttaacaatgttggaatttgtaaatttgatactttctcatccagttgaaacttaccttttcatgctactcagttatatccagtgaggaaaattgatttgatctcttgctctctcactgcttggtcatccagttccttttaggcatggtgaacgcattggatttacctaccttgtttctcaaaagtacactggtgagaaggcacgcgtgaaagtacttcgcaactcaaaaatccatgaatttaacataaagctagcaacccacaaaagactcattccagctcatatcaagggaaggccgccgtcatattacattgttgctggctttgtttttatggctgtgtctgttccatatcttcgatctgagtatggaaaagaatatgaatacgatgcccccgtgaagttgttggacaagcatttgcatgcaatggcacaatcatctgatgagcagcttgtggtggtgtcacaggtgcttgtggctgatataaacattggttacgaagatatagtcaacattcagaacttggtactgctacagctgcaggttcttctgcaacagcttgtttctgttcatttgcatctctttcaccttcttcaggcatctccacaagaacagtccttgaattatttttcaacttgggcagcaagatctggagata

SEQ ID NO: 58805 - DNA, 3181 bp, Zea Mays
gcgctctcttcgggttcggacccgaccgcacgcggttcaacgagttgtgccgaggcaaaaccctagctcacctccatggatagccacggccacgtctctggcggcaagcgcaagggcaagcgcgcccgcaagccggagccgccggtactcgcctctcccgacaacagccacgaccacaagcaccacgacaccgcaccatcctcctcgcccctctccaccgccgccgtcgcggcgtcagactccccggaccccgagccggcgtcatcctccccagctccccgccgccggggccgcaagtcccgccgcatccgcaacgggacccactccgaggtcgatgccgccccctcaccctcgcctccgccgcgtcggggcgggcctaagggggcgccgaacggtgcggtggacatggtggaggttcccgcggcggtggagcccctgcgttgggaccaggtggtgaaggtggtgccgtcgatggacgccgtggtgaaggtgttctgcgtccacacggagcccaacttctccctgccgtggcagcggaagaggcagtacagctcgagcagcagcgggttcatcattgggggccgtagggtgctcactaacgcccactcggttgagcattacacccaggtcaagctcaagaagcgtggctcggacaccaagtaccttgcgactgtccttgccataggcaccgagtgtgacattgcaatgttgaccgttgaggatgatgaattctggaaaggcgtttcacctgtagagtttgggtcgctgccagcacttcaggatgccgtcactgttgttggttacccaattggaggcgatactatctcggtgactagtggtgtagtttctaggatagaaatactttcatatgttcatggttctacagagcttcttgggttacagatagatgcagctataaattcaggaaattcaggggggcctgctttcaatgataagggaaaatgtgttggtatagctttccaatctcttaaacatgaagatgcagagaacataggctatgttatacccaccccagttattaaccacttcattgaagattacaaaaaatctggagaatacacaggtttccctatacttggaatagaatggcaaaaaatggaaaatcctgatctccgcaaggcaatgggaatgaaagctaaccaaaagggtgttcggatacgaagggttgagccaactgctcctgaatctggatgtctcgaaccttctgatatcatccttagctttgatggtattgatattgccaatgatggtacaggttagcccttgcttcacatgactggatatgctaattgtcacctttttatatctaatttgtctgcattgtcataagtgttatatcatattacaagtctgtagctggtacaagtgttatatgcaatctcctaaaggtaagacaccaatttctgtttttaatccaaacatctgaacaattttactcattattttttcatgaaaaagggagaatttattcttcaggctttcagggacacctttctacataatttgtcgagctaaaactcagtgtctatcattccccacaaccatagacctcccacccagataaacatgttttatcttgattaaatcaatccacagggggattgggattttatgttttagctgagtagtgtgcccacctcccatgcagttttctttacaatttgttgactttgacactgagggtcaccgtagtcataactatttgaatccaatcacaacatttcttgttaaggcattcaaacaaaaaaaaatctcaattatcttgtcataggccttcttgaagtttacctttaggactagaccatctctcttcttaattctagtatcatggagtatttcgtgcaaagccattaccctatgatttgtttcaattattttaaaagcttctaagtacgtttttaggtgcttttcacatttctctcgaggtggtttgcattgaatattttcctgggacaagggaacttcacttaacaatgttggaatttgtaaatttgatactttctcatccagttgaaacttaccttttcatgctactcagttatatccagtgaggaaaattgatttgatctcttgctctctcactgcttggtcatccagttccttttaggcatggtgaacgcattggatttacctaccttgtttctcaaaagtacactgctcatatcaagggaaggccgccgtcatattacattgttgctggctttgtttttatggctgtgtctgttccatatcttcgatctgagtatggaaaagaatatgaatacgatgcccccgtgaagttgttggacaagcatttgcatgcaatggcacaatcatctgatgagcagcttgtggtggtgtcacaggtgcttgtggctgatataaacattggttacgaagatatagtcaacattcagaatcacataccatgcaagggatattgctaccaaagtgcaattacttagcggtagtacttacatgagaaaatttactccaattacgcttgcatccagatgcagcgcaacaaaggctaacaattcattttgctaaacattggagttcatatgtcaggccacgttcttgccttcaatggcacaccggttaaaaatttgaagcacctagcgaccatggtggaagagtgcaatgaagcattcttgaagtttgatctggacttcgatcaggtggttgtcctggagacgaaaactgcaaaggctgcaactcaagatattctgacaacacattgtataccttcggctgcctcagaagagctgaagagctgaggaaagctaggtgttgtctgtcggctggtgagattctgcatgtcgaagagtggaagctggaatgtaacctagttgtaccaaagagtgcctagcaagtatcacatacacacaaaatgcatactgatgactgaatgtcgcattgagccacccgggtcagttgtaggataggtaaaaaaacaaaacaaagttttgcccatattccattaatctagttgacatcaacgaaatcatcatgagtaactttgcgtatccctatttgccatgattggtctgatgacacttctgctttagacatctgtggtccggttgccaagagcatgccactactttgttgtggagtactctagttcatcgaagaaaacaatcgtatctggatggcttttgcatcagttttctgtgtc

SEQ ID NO: 58806 - DNA, 3400 bp, Zea Mays
gcgctctcttcgggttcggacccgaccgcacgcggttcaacgagttggtttctggtttctctccttctagcaccactgccgagtgccgaggcaaaaccctagctcacctccatggatagccacggccacgtctctggcggcaagcgcaagggcaagcgcgcccgcaagccggagccgccggtactcgcctctcccgacaacagccacgaccacaagcaccacgacaccgcaccatcctcctcgcccctctccaccgccgccgtcgcggcgtcagactccccggaccccgagccggcgtcatcctccccagctccccgccgccggggccgcaagtcccgccgcatccgcaacgggacccactccgaggtcgatgccgccccctcaccctcgcctccgccgcgtcggggcgggcctaagggggcgccgaacggtgcggtggacgttgcggagccgtctcggcgggagctggcggttaagatggtggaggttcccgcggcggtggagcccctgcgttgggaccaggtggtgaaggtggtgccgtcgatggacgccgtggtgaaggtgttctgcgtccacacggagcccaacttctccctgccgtggcagcggaagaggcagtacagctcgagcagcagcgggttcatcattgggggccgtagggtgctcactaacgcccactcggttgagcattacacccaggtcaagctcaagaagcgtggctcggacaccaagtaccttgcgactgtccttgccataggcaccgagtgtgacattgcaatgttgaccgttgaggatgatgaattctggaaaggcgtttcacctgtagagtttgggtcgctgccagcacttcaggatgccgtcactgttgttggttacccaattggaggcgatactatctcggtgactagtggtgtagtttctaggatagaaatactttcatatgttcatggttctacagagcttcttgggttacagatagatgcagctataaattcaggaaattcaggggggcctgctttcaatgataagggaaaatgtgttggtatagctttccaatctcttaaacatgaagatgcagagaacataggctatgttatacccaccccagttattaaccacttcattgaagattacaaaaaatctggagaatacacaggtttccctatacttggaatagaatggcaaaaaatggaaaatcctgatctccgcaaggcaatgggaatgaaagctaaccaaaagggtgttcggatacgaagggttgagccaactgctcctgaatctggatgtctcgaaccttctgatatcatccttagctttgatggtattgatattgccaatgatggtacaggttagcccttgcttcacatgactggatatgctaattgtcacctttttatatctaatttgtctgcattgtcataagtgttatatcatattacaagtctgtagctggtacaagtgttatatgcaatctcctaaaggtaagacaccaatttctgtttttaatccaaacatctgaacaattttactcattattttttcatgaaaaagggagaatttattcttcaggctttcagggacacctttctacataatttgtcgagctaaaactcagtgtctatcattccccacaaccatagacctcccacccagataaacatgttttatcttgattaaatcaatccacagggggattgggattttatgttttagctgagtagtgtgcccacctcccatgcagttttctttacaatttgttgactttgacactgagggtcaccgtagtcataactatttgaatccaatcacaacatttcttgttaaggcattcaaacaaaaaaaaatctcaattatcttgtcataggccttcttgaagtttacctttaggactagaccatctctcttcttaattctagtatcatggagtatttcgtgcaaagccattaccctatgatttgtttcaattattttaaaagcttctaagtacgtttttaggtgcttttcacatttctctcgaggtggtttgcattgaatattttcctgggacaagggaacttcacttaacaatgttggaatttgtaaatttgatactttctcatccagttgaaacttaccttttcatgctactcagttatatccagtgaggaaaattgatttgatctcttgctctctcactgcttggtcatccagttccttttaggcatggtgaacgcattggatttacctaccttgtttctcaaaagtacactggtgagaaggcacgcgtgaaagtacttcgcaactcaaaaatccatgaatttaacataaagctagcaacccacaaaagactcattccagctcatatcaagggaaggccgccgtcatattacattgttgctggctttgtttttatggctgtgtctgttccatatcttcgatctgagtatggaaaagaatatgaatacgatgcccccgtgaagttgttggacaagcatttgcatgcaatggcacaatcatctgatgagcagcttgtggtggtgtcacaggtgcttgtggctgatataaacattggttacgaagatatagtcaacattcagcttgggcagcaagatctggagatagttctgctagtcctttccactagggaaggaatatctagagtagctgaggaagccgtggcagcaggatatgacccaactgatgaatgtgaagcactttcttcaaggttcttgccttcaatggcacaccggttaaaaatttgaagcacctagcgaccatggtggaagagtgcaatgaagcattcttgaagtttgatctggacttcgatcaggtggttgtcctggagacgaaaactgcaaaggctgcaactcaagatattctgacaacacattgtataccttcggctgcctcagaagagctgaagagctgaggaaagctaggtgttgtctgtcggctggtactgccaaaagatcctactgcccttctggaactaggacggttaatacatctccccttccgcgagaagtgctgaaagagttccattgcaggtgagattctgcatgtcgaagagtggaagctggaatgtaacctagttgtaccaaagagtgcctagcaagtatcacatacacacaaaatgcatactgatgactgaatgtcgcattgagccacccgggtcagttgtaggataggtaaaaaaacaaaacaaagttttgcccatattccattaatctagttgacatcaacgaaatcatcatgagtaactttgcgtatccctatttgccatgattggtctgatgacacttctgctttagacatctgtggtccggttgccaagagcatgccactactttgttgtggagtactctagttcatcgaagaaaacaatcgtatctggatggcttttgcatcagttttctgtgtc

SEQ ID NO: 58807 - DNA, 2369 bp, Zea Mays
gcgctctcttcgggttcggacccgaccgcacgcggttcaacgagttggtttctggtttctctccttctagcaccactgccgagtgccgaggcaaaaccctagctcacctccatggatagccacggccacgtctctggcggcaagcgcaagggcaagcgcgcccgcaagccggagccgccggtactcgcctctcccgacaacagccacgaccacaagcaccacgacaccgcaccatcctcctcgcccctctccaccgccgccgtcgcggcgtcagactccccggaccccgagccggcgtcatcctccccagctccccgccgccggggccgcaagtcccgccgcatccgcaacgggacccactccgaggtcgatgccgccccctcaccctcgcctccgccgcgtcggggcgggcctaagggggcgccgaacggtgcggtggacgttgcggagccgtctcggcgggagctggcggttaagatggtggaggttcccgcggcggtggagcccctgcgttgggaccaggtggtgaaggtggtgccgtcgatggacgccgtggtgaaggtgttctgcgtccacacggagcccaacttctccctgccgtggcagcggaagaggcagtacagctcgagcagcagcgggttcatcattgggggccgtagggtgctcactaacgcccactcggttgagcattacacccaggtcaagctcaagaagcgtggctcggacaccaagtaccttgcgactgtccttgccataggcaccgagtgtgacattgcaatgttgaccgttgaggatgatgaattctggaaaggcgtttcacctgtagagtttgggtcgctgccagcacttcaggatgccgtcactgttgttggttacccaattggaggcgatactatctcggtgactagtggtgtagtttctaggatagaaatactttcatatgttcatggttctacagagcttcttgggttacagatagatgcagctataaattcaggaaattcaggggggcctgctttcaatgataagggaaaatgtgttggtatagctttccaatctcttaaacatgaagatgcagagaacataggctatgttatacccaccccagttattaaccacttcattgaagattacaaaaaatctggagaatacacaggtttccctatacttggaatagaatggcaaaaaatggaaaatcctgatctccgcaaggcaatgggaatgaaagctaaccaaaagggtgttcggatacgaagggttgagccaactgctcctgaatctggatgtctcgaaccttctgatatcatccttagctttgatggtattgatattgccaatgatggtacaggttagcccttgcttcacatgactggatatgctaattgtcacctttttatatctaatttgtctgcattgtcataagtgttatatcatattacaagtctgtagctggtacaagtgttatatgcaatctcctaaagttccttttaggcatggtgaacgcattggatttacctaccttgtttctcaaaagtacactggccgccgtcatattacattgttgctggctttgtttttatggctgtgtctgttccatatcttcgatctgagtatggaaaagaatatgaatacgatgcccccgtgaagttgttggacaagcatttgcatgcaatggcacaatcatctgatgagcagcttgtggtggtgtcacaggtgcttgtggctgatataaacattggttacgaagatatagtcaacattcaggttcttgccttcaatggcacaccggttaaaaatttgaagcacctagcgaccatggtggaagagtgcaatgaagcattcttgaagtttgatctggacttcgatcaggtggttgtcctggagacgaaaactgcaaaggctgcaactcaagatattctgacaacacattgtataccttcggctgcctcagaagagctgaagagctgaggaaagctaggtgttgtctgtcggctggtgagattctgcatgtcgaagagtggaagctggaatgtaacctagttgtaccaaagagtgcctagcaagtatcacatacacacaaaatgcatactgatgactgaatgtcgcattgagccacccgggtcagttgtaggataggtaaaaaaacaaaacaaagttttgcccatattccattaatctagttgacatcaacgaaatcatcatgagtaactttgcgtatccctatttgccatgattggtctgatgacacttctgctttagacatctgtggtccggttgccaagagcatgccactactttgttgtggagtactctagttcatcgaagaaaacaatcgtatctggatggcttttgcatcagttttctgtgtc

SEQ ID NO: 58808 - DNA, 378 bp, Zea Mays
gggtcagtgtctcccacgaattgccaaaacaccagagaacgctcccccgagtcgcgaccccgggcaggtttccccacggacagggcatccgaccgcgacgaatctctggcctctcaccgccgccgtgacgaatctctggcctcccactgccgccgcaacgtccagctctgctctgctccgacgtccagctctggcttgtcgtcctccgcgcgtactccgcgctactggatctctggcttgctcgtacgggatctctagcgcgtacaggatcgcatgacatccactgctcgtcctccgcgctattggatctatggcttgccgtcctcagcgcgtcgtccccatctctggcttgagtttgaccactgttttctctgagag

SEQ ID NO: 58809 - DNA, 3642 bp, Zea Mays
cccatagttgtggctttgtgtgaaatacaagctggaacggccacccaagcgaggtcaccgaatctcgttccctcaagtttcaagtcctgccgtcctggctccatcgctgccgccggatgatccgcagccgcagcctcctcccaaccttctcacaaatcaatggtctgctcagccgtaacctggctgccaacgaggcgctgcagtggctggacgacgaactcgcgtcgctcgcgctccccaagctcgactcctacgcgtgcgcaaggttccttcagcgctgcatcgctcgtggtgacgcccgcgccggtcgcgccgtgcacgcgcgcgtcgtgcagcgcggaggggtggcgcagctggacaccttctgcgccaacgtcctgctcaacttctacgcgaagctcggtccactagccaccgcgcgtaggttgttcgacggaatgccagagcggaatagggtgtccttcgtcacgctcatgcagggctacgctctgcgtggggagtttgaggaggcgctggagctgttccgaaggctgcagagggaaggccacgaggtgaaccatttcgtgctcaccacgatcctgaaggtgctggtcaccatggatgctcctgggcttgcctgcggcatccacgcctgtgcgtgcaagttgggccacgacaggaacgcctttgtggggacagcactgattgatgcctactcgctttgtggggccgtctgtcatgcgagtgcgctcaaggccgcagtttgcctgtcatctgccttgctaggcaagggcatccatggttgctcagtcaaaacactctatgatactgaacctcatgttggtggtgccttgcttgacatgtatgccaaatgtggagacattgaggatgcccacgccatttttgagatgattccccatgatgatgtcatactctggagctttctgatctcccgttatgctcagagctgtcagaatgaacaggcatttgagatgttcctcagaatgatgcggtctttcgttgtgcctaacgagtttagtttgtccggtgttctccaggcttgtgctaatattgcctttttggagctgggcgagcaaattcataaccttgctataaagttaggctatgagtctgaattatttgttggcaatgcactcatggatatgtatgcgaaatgcagaaatatggaaaattcgcttgagatcttctcgtcattacaggatgccaatgaggtgagctggaacacaattattgttggctactgtcagtctggttttgcagaagatgctttgagtgtgttccatgaaatgcgtgctgcacatatgctctcaactcaagttacattctctagtgtgctccgggcttgtgcaaatacatcatccatcaaacatgctgtccaaattcacagcttgattgaaaaatccacattcaataatgacacaatcgtttgcaattcactgattgatacatatgccaagtgtggattcattagggacgctttgaaggtatttgaatctatagtggaatgcgatgtggtttcatggaattccataatctcagcatatgctctccatggacgagccacaaatgctttggaacttttcgacaggatgaataaaagtgatattaaagcaaatgatgtcacctttgtgtctctcctgtctgtctgcggtagcacaggcttagtcaatcaaggactctggctgtttaactctatgatgatggatcatagaatcaaaccatctatggagcattacacgtgcattgttaggcttctgggacgtgctggccgtctaactgacgctctaaagtttattggggatattccttcaacaccatctcctatggtttggcgagccttacttagctcatgtgtagtccataagaatgtagctctgggaagatatgctgcagagaaggtgcttgacattgaaccacatgatgagaccacctatgtcttactgtcaaatatgtatgctgcagctggaattttggatgaagttgctctttggaggaaatcaatgagaaacgtcggtgtaaagaaagaggctggccttagttgggttgagatcaagggggaagttcatgccttttcagtgggatcagcagaccatccagatatgcggataataaatgcaatgctggaatggttaaacctgaaggctagtagagaaggttatgttccagacataaacgtagtgttgcatgacgtggatgaggaagaaaaagctcgcatgctatgggtgcatagtgagaggctggctttagcatatggcctttctatgacacctcctggccatccaatacggataatgaagaatttgcgttcctgcttggactgccataccatgtttaaagttatatctaaaatagttcaacgggaaatcattgttagagatatcaatcgctttcatcattttgaggaaggaatatgctcctgtggtgattattggtgattttctattgtccatttatttatttgaacatatgatagcatatcctatatagtgctatcagtacagttttgtaggaaagcttcttaccatgacaagacctccaaaatatacatgcatacttgattttctggatgaactgtcctgaaaatgatatgttgcttgatctgaagagtatgctgctgaagtcctgtttggcaaatggtgctgggcaccatgtctcggcaacagcactggagcgcattcccagtgcggctcccacgcctccgccacctacagtctttgcttccatcaccgactcctactatctctggccccaccatgcctctgcagtctcccgagccaccacttccaccagctgctggctgttgtgagttgtgacgctgtggctgataggccaatcagcgactccactggtggcaggcagatcagtactggaatttcaaatgtccggagcaaccatcgctgcagcattaaggacgacgaggctgagttaacaatgctgcttgatacttgcagtggggagctgaataagcagttaataaatcatatgtgctattacatctgcagttacccatagggatatgtttagagtagccctcagctaatgatatgctgttaagctgtttctttctgctataacggtataaccataggttactgttgtttcttaatttttgaggttcaaagaagtccaatggctgagattatgagggagggagttcgttaacaggaactcgagttagggcctggaatatagttggcttttaaggatagtgagattgaagtcgttgggggtgatggatcaactaaaagcttgactcttcccttcttcatgagaccatgagtcctatcctcgtgcgctaggattgagggtggcgccggtgctcgcgcatgtcaccagcatcaattgcagggtggcggacctcacctcctggcaacccatctccagcaatccctctccgcatgtcgcgacaattggctgtctcttgctcgagcgagcatcacagcttgctggctgaccacacggctgtgccctgctggccagaggccacccccagggctagcactggatcatgtgcaaggcgtacgtggtggcatcacggagccggatggtacctcgctgttgccgtgattgctcgtcggagcgaaccctccgccgtaatatcgccgtgtgccatggtcagagcttaaagcggtatgaatcgca

SEQ ID NO: 58810 - DNA, 1610 bp, Zea Mays
atgcccccaggtgatatgtttgtcattcctctagtgacaggaccttcacctgtagaagtagaaggtgaagctgccatgcttcttgttattggacctgtcgaaggaggagttgatgcagttgtttgtgccgtgttggacctttttgccgcatcgccgtggccggccggcagccgccgcaaccttctttctacgatgcctcgcaagcccaaacggaaggctccggcctcaccggcgaggcacgacccttcgccggagccctacccttcccatgcctccccctgctcggcacaatgcctggtagtccgcgacgccctcctcgcgttccacgggttccccgaagagttcgcggccttccgcgtcctccgcctcggtggcctctcgcctaaccgtgaccctcggccttcgtcccccacagtgcttgacggcctcgtcaccacgctcctctcccagaacactaccgacgccatctcccgccgcgccttcgcctcgctcaaggccgctttcccctcctgggaccaggtggtggatgaggagggaaagaggttggaggacgccatccggtgcggcggcctggcggcgacgaaggcggccaggatacggtccatgctgagggacgtgagggagcggaggggcaagatttgcctcgagtacctgcgggaactgtcggtggatgaggtgaagaaggagctctcgcggttcaaagggattggaccaaagacctcatgtaccaaaaaggtgggaagtgataaaagaaagagttccaattctgcctgtcctctagcaggttactgttgtattggagaaaagcttcagcaactgtgaagagcaggcagtagctgggggcgttcaaaaggctctgctgtgtttgattcggcaaatgctttatcacaatcggtgcaaacttagctgaatgctaccgccccacttgtttgaaaaggacgtctgcacttgagttcaactgtgtaaacctgggagctttggatggaggacttgtggatccttgatgcgcatttgttgcaaatgctttggattgaagcagagcaatgtaccataccatgctggcatgcgatctaagtggccggcggcttgcttcatgctcacatgaagtttaactaccatcaccatcggttgcagcttcaagtttggttcggttgtaatgaaacggattctcatatgttaaacctgagagccttctgttaagccttgtttgagtactctagtattcacctcaatccacgtttattaaagttgattgaggtgtaaattaaactaatttacatcatagtccaactcaatacatgtggaatgagatgaatactagcgtgaaactctaccattttgacctttctctgggtagtagtaaccgattttagggtgcatcttcagacactcatgaatcatgatcaagtgctaccatctttgcttcgagtgttgaacattagcatcaacagaacaaaaagagaaaaggacagaagaaagtgctgttaggccctgattggttgagtttgcagggttgtttatgcccaagcaaagcggctgtttttggagcttgcttttttagaagcaactgctttttcgtagtatatttttaaaagcatctcagaccctct

SEQ ID NO: 58811 - DNA, 2348 bp, Zea Mays
atgcccccaggtgatatgtttgtcattcctctagtgacaggaccttcacctgtagaagtagaaggtgaagctgccatgcttcttgttattggacctgtcgaaggaggagttgatgcagttgtttgtgccgtgttggacctttttgccgcatcgccgtggccggccggcagccgccgcaaccttctttctacgatgcctcgcaagcccaaacggaaggctccggcctcaccggcgaggcacgacccttcgccggagccctacccttcccatgcctccccctgctcggcacaatgcctggtagtccgcgacgccctcctcgcgttccacgggttccccgaagagttcgcggccttccgcgtcctccgcctcggtggcctctcgcctaaccgtgaccctcggccttcgtcccccacagtgcttgacggcctcgtcaccacgctcctctcccagaacactaccgacgccatctcccgccgcgccttcgcctcgctcaaggccgctttcccctcctgggaccaggtggtggatgaggagggaaagaggttggaggacgccatccggtgcggcggcctggcggcgacgaaggcggccaggatacggtccatgctgagggacgtgagggagcggaggggcaagatttgcctcgagtacctgcgggaactgtcggtggatgaggtgaagaaggagctctcgcggttcaaagggattggaccaaagaccgtgagttccatctccttgtcctctttcagtgataagtgattttctggtctggttgttggaattctgcaacggtcgatgcatgccatggatggaccaccatggtgaagtaaaggcattgcttttgatttgatgtcaaaaaaggaggactggtgggaggttgttcagccttgaactttgaatgaaccacagcttgatgagagacagtgagacaccatatggcaatttaagggcaaagcgggttttttttatgagcttctctgtgcagtttccttaactagattttttgaggactgcaaatgtgcataggagttctgatgccatgtttaacaagttcccttttttgtatatgattgaaatgtgtgcaaatgtgcttaatggaagaagtctttcataaaaaaaaagctgtgctccttcatggaagcggtttatgtttagactggtttcagtctaatatttatgtggctggtggtggtcaccgacaaccaatctcgtcttgcaatgaatgcccaacagaaacaggtggcatgtgtgctgatgttctatctacagaaggatgattttccagtggatactcatcaaattttgggccaataggtactccgcattacgaaggctatgggctgggttcctgctacagctagcagggagaaggcctacattcatctaaataataagattcctgatgatctgaagtttgatttgaattgtctttttgtaactcatggaaagctttgtcagtcatgtaccaaaaaggtgggaagtgataaaagaaagagttccaattctgcctgtcctctagcaggttactgttgtattggagaaaagcttcagcaactgtgaagagcaggcagtagctgggggcgttcaaaaggctctgctgtgtttgattcggcaaatgctttatcacaatcggtgcaaacttagctgaatgctaccgccccacttgtttgaaaaggacgtctgcacttgagttcaactgtgtaaacctgggagctttggatggaggacttgtggatccttgatgcgcatttgttgcaaatgctttggattgaagcagagcaatgtaccataccatgctggcatgcgatctaagtggccggcggcttgcttcatgctcacatgaagtttaactaccatcaccatcggttgcagcttcaagtttggttcggttgtaatgaaacggattctcatatgttaaacctgagagccttctgttaagccttgtttgagtactctagtattcacctcaatccacgtttattaaagttgattgaggtgtaaattaaactaatttacatcatagtccaactcaatacatgtggaatgagatgaatactagcgtgaaactctaccattttgacctttctctgggtagtagtaaccgattttagggtgcatcttcagacactcatgaatcatgatcaagtgctaccatctttgcttcgagtgttgaacattagcatcaacagaacaaaaagagaaaaggacagaagaaagtgctgttaggccctgattggttgagtttgcagggttgtttatgcccaagcaaagcggctgtttttggagcttgcttttttagaagcaactgctttttcgtagtatatttttaaaagcatctcagaccctct

SEQ ID NO: 58812 - DNA, 1806 bp, Zea Mays
atgcccccaggtgatatgtttgtcattcctctagtgacaggaccttcacctgtagaagtagaaggtgaagctgccatgcttcttgttattggacctgtcgaaggaggagttgatgcagttgtttgtgccgtgttggacctttttgccgcatcgccgtggccggccggcagccgccgcaaccttctttctacgatgcctcgcaagcccaaacggaaggctccggcctcaccggcgaggcacgacccttcgccggagccctacccttcccatgcctccccctgctcggcacaatgcctggtagtccgcgacgccctcctcgcgttccacgggttccccgaagagttcgcggccttccgcgtcctccgcctcggtggcctctcgcctaaccgtgaccctcggccttcgtcccccacagtgcttgacggcctcgtcaccacgctcctctcccagaacactaccgacgccatctcccgccgcgccttcgcctcgctcaaggccgctttcccctcctgggaccaggtggtggatgaggagggaaagaggttggaggacgccatccggtgcggcggcctggcggcgacgaaggcggccaggatacggtccatgctgagggacgtgagggagcggaggggcaagatttgcctcgagtacctgcgggaactgtcggtggatgaggtgaagaaggagctctcgcggttcaaagggattggaccaaagaccgtggcatgtgtgctgatgttctatctacagaaggatgattttccagtggatactcatgtactccgcattacgaaggctatgggctgggttcctgctacagctagcagggagaaggcctacattcatctaaataataagattcctgatgatctgaagtttgatttgaattgtctttttgtaactcatggaaagctttgtcagtcatgtaccaaaaaggtgggaagtgataaaagaaagagttccaattctgcctgtcctctagcaggttactgttgtattggagaaaagcttcagcaactgtgaaggcagtagctgggggcgttcaaaaggctctgctgtgtttgattcggcaaatgctttatcacaatcggtgcaaacttagctgaatgctaccgccccacttgtttgaaaaggacgtctgcacttgagttcaactgtgtaaacctgggagctttggatggaggacttgtggatccttgatgcgcatttgttgcaaatgctttggattgaagcagagcaatgtaccataccatgctggcatgcgatctaagtggccggcggcttgcttcatgctcacatgaagtttaactaccatcaccatcggttgcagcttcaagtttggttcggttgtaatgaaacggattctcatatgttaaacctgagagccttctgttaagccttgtttgagtactctagtattcacctcaatccacgtttattaaagttgattgaggtgtaaattaaactaatttacatcatagtccaactcaatacatgtggaatgagatgaatactagcgtgaaactctaccattttgacctttctctgggtagtagtaaccgattttagggtgcatcttcagacactcatgaatcatgatcaagtgctaccatctttgcttcgagtgttgaacattagcatcaacagaacaaaaagagaaaaggacagaagaaagtgctgttaggccctgattggttgagtttgcagggttgtttatgcccaagcaaagcggctgtttttggagcttgcttttttagaagcaactgctttttcgtagtatatttttaaaagcatctcagaccctct

SEQ ID NO: 58813 - DNA, 1192 bp, Zea Mays
caacctccggctccgagcccgcagccccgcactgctcgagaggcccgggccgcccagcacgccggtgcctgccaccaacgcccactgcgcccgggccccgccacgaggtacacctaatctgtcacctcccccaccgcacctccgtagcctcttcaatctcgccggccacctcacgtcctcacctcgcgtggcctcccgttctgacttcggagtccctcggtctcaacgactagttgagagctcgcggctccgttcgggcgaggggaggaggttcatgaggctgctgtaggctccgttgcagccgccgcgggcgggagtccgtgattttggacgccccaccgcggcaagatccggaagcgcgttggctgttgtgccgtgagtttcagtttcggtggtcgattgcttcagcctgctgagaagtaggaggggcggccatggcggggtcgaggttcgggtcgttcaagtcggagaagggcgactccgcctccgcagcggcggcagcgggtggagcggcgcagaggagggacccgtacgaggtgctcggggtgggccgcaccgccaccgaccaggagatcaagagtgcgttccgacgcatggcgctcaagtaccatccggacaagaatggcgatgaccctgttgcatcagacaggttccaggaagtcacattctcctataacatcctgtcagatcccgataagaggcggcagtacgatacatcaggatttgatgcaatcgaatctgatagtcaggaactggagctggacttgtcgagtctcaacactgtaaacacggtgtttgcagctctttttagtaagcttggtgtgccaattaaaacaactgtttcagctacagttttagaggaggcattgaatggttcggttatggtttctcaactccagctaggaaactcagtgcagagaaagcaatcggcccatttctattctgtggatataactgaaaaacaagctaaaatggggctagtttgtcgtgttcactcaaacgataaaagcaaattcaagtacatttcttgtggtcttggtgttttggtatttttatctaccttttctagtattctttttattgattctgtgccttgtatttttgttgtcctctgtttggttagctttgaatgtttcatatttgtgaactgtgatactaacaatctagcttccagttccacacaggttcccag

SEQ ID NO: 58814 - DNA, 1180 bp, Zea Mays
caacctccggctccgagcccgcagccccgcactgctcgagaggcccgggccgcccagcacgccggtgcctgccaccaacgcccactgcgcccgggccccgccacgaggtacacctaatctgtcacctcccccaccgcacctccgtagcctcttcaatctcgccggccacctcacgtcctcacctcgcgtggcctcccgttctgacttcggagtccctcggtctcaacgactagttgagagctcgcggctccgttcgggcgaggggaggaggttcatgaggctgctgtaggctccgttgcagccgccgcgggcgggagtccgtgattttggacgccccaccgcggcaagatccggaagcgcgttggctgttgtgccgtgagtttcagtttcggtggtcgattgcttcagcctgctgagaagtaggaggggcggccatggcggggtcgaggttcgggtcgttcaagtcggagaagggcgactccgcctccgcagcggcggcagcgggtggagcggcgcagaggagggacccgtacgaggtgctcggggtgggccgcaccgccaccgaccaggagatcaagagtgcgttccgacgcatggcgctcaagtaccatccggacaagaatggcgatgaccctgttgcatcagacaggttccaggaagtcacattctcctataacatcctgtcagatcccgataagaggcggcagtacgatacatcaggatttgatgaactggagctggacttgtcgagtctcaacactgtaaacacggtgtttgcagctctttttagtaagcttggtgtgccaattaaaacaactgtttcagctacagttttagaggaggcattgaatggttcggttatggtttctcaactccagctaggaaactcagtgcagagaaaggtggaaaagcaatcggcccatttctattctgtggatataactgaaaaacaagctaaaatggggctagtttgtcgtgttcactcaaacgataaaagcaaattcaagtacatttcttgtggtcttggtgttttggtatttttatctaccttttctagtattctttttattgattctgtgccttgtatttttgttgtcctctgtttggttagctttgaatgtttcatatttgtgaactgtgatactaacaatctagcttccagttccacacaggttcccag

SEQ ID NO: 58815 - DNA, 2267 bp, Zea Mays
ataatttataagaatttgctacttccatgtggtttttcatgattgtagaaattgataccaccgagttgtcccttctttttattgaaaacttcatgatccagtcgaaaagtttaattatgagaaatacataaggcattagcattactaacatgaaatgaaaacacacatgcagctataagtatacagcccatggcccaaatagtgacagttcaagcccatcagcgtgtattcattctacagaaacatcagctgtgaaatttataggtagaaaaccagttcaggcccaaatagatcattgtcagttcaaacacaactaaacaaataggctaaatgcatacaaacggcgagtgatcgatcatcttatcatggatgtaatttttagtacctttccattaagggctattttgcacaagtggggttttcaggatctatttccccacaagttcccagagggaactcactaagggtaaaagaggtcctttcatcttccagtgcatctcttgcactgggatccagagttgtcagataaaagtagggtattccacggccctcgcctggtactccatcactatatgaaactacattgctatacataaaagaagccatgaatcaagttcaccagtcagaaaagagtatatgccagctgtttgcagaagtgagacaagaaggaatacccaaatggagctccacttaagtcacttgatattgtgctgcaaatgaaatattcaagattgatcagtaaccaaccaaacggaaattgatctacaataacctgagaaaggaacaaaattgaacacatttagggcctgttcattttgtttcaaatccatgtggattgagggggaataaatccactactaatcaaaatccacctcaatccaccccaatatccctcaatccacatggttttgccgttttgggatgaaacgaacaaggccttacagatttcaattctgcaattcactagtaatatgtccactaataaactggacttattgacgtgatgactcatgaatacagtgtactctaaatcttgaattatgaatctgtctttgtacagttcgtatatcaaggtagtggcttctcccaaatcagtcttaaattttgggcatgtaccatttgcagtctggtgtgcccaggcacaaccaaaatgacactacatcagcaggaagcagttctatattttcacattagctgggggcagttctttatttcaacattcagccaactatcaacacccaattagcaagtggaggccactcatcagtaccctgtcaggaccatcattgtttcaccattgggtccaacatggaaggaagcagcagtcaaaagcagtaagctgagacaattaactcctatttttttcacttattgatttacttcaaaatgagattaactcttatttttttcacattgatttcactgcacttcgaaattgtattacgaaaccacctagaaattgaagctctaaacctatggttcagacttcagaaaagtgttgaacctttgaagctgaacaaggacattgtacttttagacagagcacaaggtcaaactgtaattttccttagaccttatctttttactcccatgctcattcaagtcatgggagactaaaaccatgtgacgtttaagccatgtattaagcaattgaagttgcgtatgcatgttttctattttaccgtttaagcaacaaattaaatgagtgtttttttagacccatatgctttgtgcacacccaaagctaaatttctagctccaccaatggcatctacacagctcccccaaactacacaggatttagttgtggaggctatgcaacacttggcatggatggctaaggttatattctcccgggcatatgggtggtcttcagattgagtgtcactactgtgggtggcttctctttgttaaaaggccgtgtgcttctttgttatgttgaggctggaagatttttttcaatactttttatcacctaattttcctttgtgaaaaaaaaacaaacacagctcccgcaaactacaaagcaacgagcacaaaaaattctcgagactacgaagcctcaagcaaatttttatatactctcagcacttaaccaccgccagataacaacatcgtttccaaactccaaagcgacaaatttcatctagcaccagcagtttcccggttcgatcgaaccaacacgaacacgtgctgctaaggaactagctccggcgccatgtcgcgggggcaagagcacgggagaagggtttcgggatgaactggag

SEQ ID NO: 58816 - DNA, 1580 bp, Zea Mays
attaccttatcttggatggagtgattctttaaaccaaaaccctaaaccaaacacccctaaaagtctctgtattaaatattactgtacatacagacgagacataagaaccgagtcgagagaagagataaatggaagccagagagcagaaacaaagcgtttagctgcgacttgatgcgacttaattcgcctgcggggcgtctgataaaccttgtgagcaatacgcttctatgtaaaaacagtatccacactaatccacatcacaaaccccatcccaattcccaggccccgccgcgtgcttgtggccgccgccgccgccgccgcgagagagagagatgtcgctctgctgctgctgcagcaccgccaccggccgcggcgttctcctccctagcctcctcctcggccgacgccactggacgggtcaccacctcctcaacctccgggccaccacgaccgtcgtatcctcctcctccgcggccgccacctcctccctctcgccgccgcagcagcgccagatcaccgtctacgtggacactctccttgaatggaaccagagaatgaacctcaccgccgtcaccgacgaggccgaggtcatggcgcgccacgtggccgactctctcgccatgctgcccccgctggagcgtgtgtaccgcggccgttccacctccgctggtggcgctatcgacggagtcaggcttattgacgtcggctctggcgctgggctcccgggtctgatccttgccgttgcgcggccgagctggaagtttacgctgttggagtcgatgcggaagcggtgcacgttcttggagcatgctgttgaagccatgaacttgtcaaatgtggatgtggtgtgtgaccgagctgaggacagaaagttggccaaagtcttgatttcagagaaagttatgatatagtagctgcaagagccgttgctgaactgaaagttctagcggagtactgcatcccattggttcgcattggtggtttgtttatagctgcaaaaggacatgatccccatgaagaagtcagaaatgcagaaggtgcaataaagaaattgggtgcttcaatgcttgagttatgtaatgttgaatcaatgggacctcatggtcaacgaacagctgttctatacgtcaaagaacgtgccactccaaaaaagtacccgcgccttccaggtactccttccaaggcgccattatgaggagcatgtagactttttctatcaattaaagaccgataattgtgattgacctagttagtaggccgtcttgctttacaaggatggcagggtatcttggaatcgaatatctgctaagggtttcaggtatatctatgtatggctcatcgtgcttcgtgccaaacaagtttgtacaggaaagcctaaaaaacttttggttcgtgctatatcagtccgaagtgtaaaaacagtggctcaggctagcccgaaaccacgttataccttcgttgggtcatgccggttcaagtccggtccgtatatttgaccacataaaatcaaaatattacaacgatataaagttcatagcttactaaattaaagatattaaacaattgtagcattatttaac

SEQ ID NO: 58817 - DNA, 1405 bp, Zea Mays
cagaaacaaagcgtttagctgcgacttgatgcgacttaattcgcctgcggggcgtctgataaaccttgtgagcaatacgcttctatgtaaaaacagtatccacactaatccacatcacaaaccccatcccaattcccaggccccgccgcgtgcttgtggccgccgccgccgccgccgcgagagagagagatgtcgctctgctgctgctgcagcaccgccaccggccgcggcgttctcctccctagcctcctcctcggccgacgccactggacgggtcaccacctcctcaacctccgggccaccacgaccgtcgtatcctcctcctccgcggccgccacctcctccctctcgccgccgcagcagcgccagatcaccgtctacgtggacactctccttgaatggaaccagagaatgaacctcaccgccgtcaccgacgaggccgaggtcatggcgcgccacgtggccgactctctcgccatgctgcccccgctggagcgtgtgtaccgcggccgttccacctccgctggtggcgctatcgacggagtcaggcttattgacgtcggctctggcgctgggctcccgggctggaagtttacgctgttggagtcgatgcggaagcggtgcacgttcttggagcatgctgttgaagccatgaacttgtcaaatgtggatgtggtgtgtgaccgagctgagaaagttggccaaagtcttgatttcagagaaagttatgatatagtagctgcaagagccgttgctgaactgaaagttctagcggagtactgcatcccattggttcgcattggtggtttgtttatagctgcaaaaggacatgatccccatgaagaagtcagaaatgcagaaggtgcaataaagaaattgggtgcttcaatgcttgagttatgtaatgttgaatcaatgggacctcatggtcaacgaacagctgttctatacgtcaaagaacgtgccactccaaaaaagtacccgcgccttccaggtactccttccaaggcgccattatgaggagcatgtagactttttctatcaattaaagaccgataattgtgattgacctagttagtaggccgtcttgctttacaaggatggcagggtatcttggaatcgaatatctgctaagggtttcaggtatatctatgtatggctcatcgtgcttcgtgccaaacaagtttgtacaggaaagcctaaaaaacttttggttcgtgctatatcagtccgaagtgtaaaaacagtggctcaggctagcccgaaaccacgttataccttcgttgggtcatgccggttcaagtccggtccgtatatttgaccacataaaatcaaaatattacaacgatataaagttcatagcttactaaattaaagatattaaacaattgtagcattatttaac

SEQ ID NO: 58818 - DNA, 1403 bp, Zea Mays
aaagcgtttagctgcgacttgatgcgacttaattcgcctgcggggcgtctgataaaccttgtgagcaatacgcttctatgtaaaaacagtatccacactaatccacatcacaaaccccatcccaattcccaggccccgccgcgtgcttgtggccgccgccgccgccgccgcgagagagagagatgtcgctctgctgctgctgcagcaccgccaccggccgcggcgttctcctccctagcctcctcctcggccgacgccactggacgggtcaccacctcctcaacctccgggccaccacgaccgtcgtatcctcctcctccgcggccgccacctcctccctctcgccgccgcagcagcgccagatcaccgtctacgtggacactctccttgaatggaaccagagaatgaacctcaccgccgtcaccgacgaggccgaggtcatggcgcgccacgtggccgactctctcgccatgctgcccccgctggagcgtgtgtaccgcggccgttccacctccgctggtggcgctatcgacggagtcaggcttattgacgtcggctctggcgctgggctcccgggctggaagtttacgctgttggagtcgatgcggaagcggtgcacgttcttggagcatgctgttgaagccatgaacttgtcaaatgtggatgtggtgtgtgaccgagctgaggacagaaagttggccaaagtcttgatttcagagaaagttatgatatagtagctgcaagagccgttgctgaactgaaagttctagcggagtactgcatcccattggttcgcattggtggtttgtttatagctgcaaaaggacatgatccccatgaagaagtcagaaatgcagaaggtgcaataaagaaattgggtgcttcaatgcttgagttatgtaatgttgaatcaatgggacctcatggtcaacgaacagctgttctatacgtcaaagaacgtgccactccaaaaaagtacccgcgccttccaggtactccttccaaggcgccattatgaggagcatgtagactttttctatcaattaaagaccgataattgtgattgacctagttagtaggccgtcttgctttacaaggatggcagggtatcttggaatcgaatatctgctaagggtttcaggtatatctatgtatggctcatcgtgcttcgtgccaaacaagtttgtacaggaaagcctaaaaaacttttggttcgtgctatatcagtccgaagtgtaaaaacagtggctcaggctagcccgaaaccacgttataccttcgttgggtcatgccggttcaagtccggtccgtatatttgaccacataaaatcaaaatattacaacgatataaagttcatagcttactaaattaaagatattaaacaattgtagcattatttaac

SEQ ID NO: 58819 - DNA, 1142 bp, Zea Mays
aaaaacagtatccacactaatccacatcacaaaccccatcccaattcccaggccccgccgcgtgcttgtggccgccgccgccgccgccgcgagagagagagatgtcgctctgctgctgctgcagcaccgccaccggccgcggcgttctcctccctagcctcctcctcggccgacgccactggacgggtcaccacctcctcaacctccgggccaccacgaccgtcgtatcctcctcctccgcggccgccacctcctccctctcgccgccgcagcagcgccagatcaccgtctacgtggacactctccttgaatggaaccaggctggaagtttacgctgttggagtcgatgcggaagcggtgcacgttcttggagcatgctgttgaagccatgaacttgtcaaatgtggatgtggtgtgtgaccgagctgagaaagttggccaaagtcttgatttcagagaaagttatgatatagtagctgcaagagccgttgctgaactgaaagttctagcggagtactgcatcccattggttcgcattggtggtttgtttatagctgcaaaaggacatgatccccatgaagaagtcagaaatgcagaaggtgcaataaagaaattgggtgcttcaatgcttgagttatgtaatgttgaatcaatgggacctcatggtcaacgaacagctgttctatacgtcaaagaacgtgccactccaaaaaagtacccgcgccttccaggtactccttccaaggcgccattatgaggagcatgtagactttttctatcaattaaagaccgataattgtgattgacctagttagtaggccgtcttgctttacaaggatggcagggtatcttggaatcgaatatctgctaagggtttcaggtatatctatgtatggctcatcgtgcttcgtgccaaacaagtttgtacaggaaagcctaaaaaacttttggttcgtgctatatcagtccgaagtgtaaaaacagtggctcaggctagcccgaaaccacgttataccttcgttgggtcatgccggttcaagtccggtccgtatatttgaccacataaaatcaaaatattacaacgatataaagttcatagcttactaaattaaagatattaaacaattgtagcattatttaac

SEQ ID NO: 58820 - DNA, 1147 bp, Zea Mays
aaaaacagtatccacactaatccacatcacaaaccccatcccaattcccaggccccgccgcgtgcttgtggccgccgccgccgccgccgcgagagagagagatgtcgctctgctgctgctgcagcaccgccaccggccgcggcgttctcctccctagcctcctcctcggccgacgccactggacgggtcaccacctcctcaacctccgggccaccacgaccgtcgtatcctcctcctccgcggccgccacctcctccctctcgccgccgcagcagcgccagatcaccgtctacgtggacactctccttgaatggaaccaggctggaagtttacgctgttggagtcgatgcggaagcggtgcacgttcttggagcatgctgttgaagccatgaacttgtcaaatgtggatgtggtgtgtgaccgagctgaggacagaaagttggccaaagtcttgatttcagagaaagttatgatatagtagctgcaagagccgttgctgaactgaaagttctagcggagtactgcatcccattggttcgcattggtggtttgtttatagctgcaaaaggacatgatccccatgaagaagtcagaaatgcagaaggtgcaataaagaaattgggtgcttcaatgcttgagttatgtaatgttgaatcaatgggacctcatggtcaacgaacagctgttctatacgtcaaagaacgtgccactccaaaaaagtacccgcgccttccaggtactccttccaaggcgccattatgaggagcatgtagactttttctatcaattaaagaccgataattgtgattgacctagttagtaggccgtcttgctttacaaggatggcagggtatcttggaatcgaatatctgctaagggtttcaggtatatctatgtatggctcatcgtgcttcgtgccaaacaagtttgtacaggaaagcctaaaaaacttttggttcgtgctatatcagtccgaagtgtaaaaacagtggctcaggctagcccgaaaccacgttataccttcgttgggtcatgccggttcaagtccggtccgtatatttgaccacataaaatcaaaatattacaacgatataaagttcatagcttactaaattaaagatattaaacaattgtagcattatttaac

SEQ ID NO: 58821 - DNA, 1256 bp, Zea Mays
caggtgcccagcgtttgcggacccgtttcagcccacgggcgcctacggtgcttgaaatttaggtccagtatcaatttatgcccacaaaccacaatgccagcccatgtatcaaaccctaggtgtcatcgagtccagcgtcaacaggcaacaggtgtcccagccgcgcgccgcacgccctgttgccttctctcgacttcgagagcaccgccgcacggcataacgctcgcacggccgagccccgacattctaccgcactccctccgctgcacccctttccattctaccgccggcgacgccaaagttcttgggcctcctcatcggcgacttttccgccggcgacaggaaacaacgaaccaaaccacttctctgtcgagaggcgtcgcgctcctctcttcgccctctgctgttatttttcttaacccggctttctctcgattgctgcgtaaagttgaagatgaggaagctcaagttccatgagcagaagctcctcaagaggcacaatttcttggagtacaagagggagggcggccaccgcgaggcgctcgtcacacagcgctaccgcctcgtggagagggacgactacaagaagtacaatgggatatgcttaatggtgcaaaagctcgttaacatcataaagcagatggacccaagagaccctttcagaatccagatgacagacttgattctcgataagctgtataatatgggtgtaatttcaacaaaagagagcttgttaaagtgtgagaaactttcagtgagcgccttctgcaggcggagacttgcaacagttatggtgaagctcaagtttgcagagcaccttaaggaggctgtgacgtacatcgaacaggggcacgtgcgtgtcggtccagatgcagtcacggacccagcctttcttgtgaccagaaacatggaggacttcatcacctgggtggattcctcaaagatcaagaggaaggtcatggagtacaatgatgcattagatgattatgatgccatgttctgagaaaataattctgcagaaatttatgtgcccgtcagtagtgtaatcttaagcctgccacatatgggtcttttctgaacaaatctgtgggagttgtcttctgcatggctacttgcatttgtattgcacctgcagatgtgatgcaattttgtggttggttgaaggcacattataaattcatatctgatgtagttgtgcaattgtctttgttaaagagcgggtttgcccggatttcccctaaaaaaaaaaaggtaaa

SEQ ID NO: 58822 - DNA, 1398 bp, Zea Mays
atgtatcaaaccctaggtgtcatcgagtccagcgtcaacaggcaacaggtgtcccagccgcgcgccgcacgccctgttgccttctctcgacttcgagagcaccgccgcacggcataacgctcgcacggccgagccccgacattctaccgcactccctccgctgcacccctttccattctaccgccggcgacgccaaagttcttgggcctcctcatcggcgacttttccgccggcgacaggaaacaacgaaccaaaccacttctctgtcgagaggcgtcgcgctcctctcttcgccctctgctgttatttttcttaacccggctttctctcgattgctgcgtaaagttgaagatgaggaagctcaagttccatgagcagaagctcctcaagaggcacaatttcttggagtacaagagggagggcggccaccgcgaggcgctcgtcacacagcgctaccgcctcgtggagagggacgactacaagaagtacaatgggatatgcttaatggtgcaaaagctcgttaacatcataaagcagatggacccaagagaccctttcagaatccagatgacagacttgattctcgataagctgtataatatgggtgtaatttcaacaaaagagagcttgttaaagtgtgagaaactttcagtgagcgccttctgcaggtctcttcctccctctccctcttcctctcctccctagcaatctggcacgtttgttttcctttataggatgttgtgttctagccatctcacttcagctcaagtgttctttcttggctaaggtctgcaactctttggtagagtatatcatattattcactttgctagccgcttttatggtaaggtagaacaagtaggaaacaatgacatgtgcagttccatttaccttgtttactcaattcttgcaggcggagacttgcaacagttatggtgaagctcaagtttgcagagcaccttaaggaggctgtgacgtacatcgaacaggggcacgtgcgtgtcggtccagatgcagtcacggacccagcctttcttgtgaccagaaacatggaggacttcatcacctgggtggattcctcaaagatcaagaggaaggtcatggagtacaatgatgcattagatgattatgatgccatgttctgagaaaataattctgcagaaatttatgtgcccgtcagtagtgtaatcttaagcctgccacatatgggtcttttctgaacaaatctgtgggagttgtcttctgcatggctacttgcatttgtattgcacctgcagatgtgatgcaattttgtggttggttgaaggcacattataaattcatatctgatgtagttgtgcaattgtctttgttaaagagcgggtttgcccggatttcccctaaaaaaaaaaaggtaaa

SEQ ID NO: 58823 - DNA, 1581 bp, Zea Mays
atcgagtccagcgtcaacaggcaacaggtgtcccagccgcgcgccgcacgccctgttgccttctctcgacttcgagagcaccgccgcacggcataacgctcgcacggccgagccccgacattctaccgcactccctccgctgcacccctttccattctaccgccggcgacgccaaagttcttgggcctcctcatcggcgacttttccgccggcgacaggaaacaacgaaccaaaccacttctctgtcgagaggcgtcgcgctcctctcttcgccctctgctgttgaagatgaggaagctcaagttccatgagcagaagctcctcaagaggcacaatttcttggagtacaagagggagggcggccaccgcgaggcgctcgtcacacagcgctaccgcctcgtggagagggacgactacaagaagtacaatgggatatgcttaatggtgcaaaagctcgttaacatcataaagcagatggacccaagagaccctttcagaatccagatgacagacttgattctcgataagctgtaagactgctagttcactttacttgatcgtgagattgtatataccattggttatgtaaattttgagctggggttacatcctcaagtaccaaaatcttacaagttcgcctcctgtgtagctattgattgtatctttgactgcttgtagagttaacggtattgaacttcacctgtacctgtttgtagtatgtaaggaaaggcatactgctgtttcctttactacctcacatatataggaacattttataattgcattctcgaatcctgtgttttcctgtgaaattgagatggttcttgtgaaatttctgtgtttcaaatgggccctcagtgtgttgaggtatctacatatgaattgtttgactggttgctcagaactcactgcagtgtaaatgtgccaaaggttgcttggatatctgaaatcatgagatttctaattatatttcctgcgttccaaatggaccctcagtgtgttgaggtatctacatatgaattgtttgactggttcctcagaacttactccagtgtaactgtggcaaaggttgcttggatatctgaaatcatgagatttctaattatatgtttgtattcttcctatgtctggtcatacaatccaatattgaacttcactgcgaaagagtctctagccgatttggttaggtggtctgagtagcactcctcaggttctgagttcgaatccagtgggagcgaattttaggctgaggttaaaaaaggtcactcgctggttcccatggttgtgtgcacgcgagatggactgacctatgggggcggatcctcttgtaggggctaggagggctcaaagcatgagtaaagatctgtcctaaagggggcgcatccgttgcatggggggcagcttttctgacctttctggggctctgattgaaattcttcttaacataatactgtgggggcagtattttccttaccggccgagtttttttaatattgaacttcactagtactatcataatttcttcatctgcattggacttcattgccattgcctgtcatctgtaatagtggtcgttccctg

SEQ ID NO: 58824 - DNA, 1335 bp, Zea Mays
atcgagtccagcgtcaacaggcaacaggtgtcccagccgcgcgccgcacgccctgttgccttctctcgacttcgagagcaccgccgcacggcataacgctcgcacggccgagccccgacattctaccgcactccctccgctgcacccctttccattctaccgccggcgacgccaaagttcttgggcctcctcatcggcgacttttccgccggcgacaggaaacaacgaaccaaaccacttctctgtcgagaggcgtcgcgctcctctcttcgccctctgctgttgaagatgaggaagctcaagttccatgagcagaagctcctcaagaggcacaatttcttggagtacaagagggagggcggccaccgcgaggcgctcgtcacacagcgctaccgcctcgtggagagggacgactacaagaagtacaatgggatatgcttaatggtgcaaaagctcgttaacatcataaagcagatggacccaagagaccctttcagaatccagatgacagacttgattctcgataagctgtataatatgggtgtaatttcaacaaaagagagcttgttaaagtgtgagaaactttcagtgagcgccttctgcaggtctcttcctccctctccctcttcctctcctccctagcaatctggcacgtttgttttcctttataggatgttgtgttctagccatctcacttcagctcaagtgttctttcttggctaaggtctgcaactctttggtagagtatatcatattattcactttgctagccgcttttatggtaaggtagaacaagtaggaaacaatgacatgtgcagttccatttaccttgtttactcaattcttgcaggcggagacttgcaacagttatggtgaagctcaagtttgcagagcaccttaaggaggctgtgacgtacatcgaacaggggcacgtgcgtgtcggtccagatgcagtcacggacccagcctttcttgtgaccagaaacatggaggacttcatcacctgggtggattcctcaaagatcaagaggaaggtcatggagtacaatgatgcattagatgattatgatgccatgttctgagaaaataattctgcagaaatttatgtgcccgtcagtagtgtaatcttaagcctgccacatatgggtcttttctgaacaaatctgtgggagttgtcttctgcatggctacttgcatttgtattgcacctgcagatgtgatgcaattttgtggttggttgaaggcacattataaattcatatctgatgtagttgtgcaattgtctttgttaaagagcgggtttgcccggatttcccctaaaaaaaaaaaggtaaa

SEQ ID NO: 58825 - DNA, 2684 bp, Zea Mays
agccattgatgtgtccgccaaagtaatccgagcggcccattggaaacataccctcctctccccgcggggacatgatactcctgcaaaaccctcgacctagacggtgcagcgccgccggcccgccgccgcggtctctgcctctgcctcgtcatggcgcggacgatgctgccgtctccttcgcctcacaccgccgtcaagagagaaatcgaggacgcagagcccaccgctcacacgccggcgtcactgcctcgcaagaagcgccgccgtggaggccgcctcccagtgactcccacccagcttcccctaagccctcccctcgtcacgccccagaccatcccatcggtggcatcaggggacgcgtccttcgccggcctaacgccgacgcccgtgttctctgccgtcaaggacgagtccggcgcggacaccggggtggggagcaacgggagggcgtccgggaaacggaatgactcgcaggacctccgctccgtcccgaggcccgcggcagcggagcctcccactctctggctcaaccgccggcgtctgggcctcatcctccacgagctcgcgggagcgcaccggtggcgcgacgcggccagcgtcgtctcgacgctccttagcggcaaccgaaagcccgactcctacgaggagacgcgcagaatgttcgtggtggccatggagattcataagcggcttgctgaggacagcagcgtgcagtacggtggcaggagcagctactacctcagaacgcagaagttgttcaatgtttggatgcgaaagctgatttggtttccttcttgcccaaaaaaaaacttggttacacttgaactggccctattttacctttcacaaggcaacatcgacaatgcacacatcgcaacaagaacccttatcgccaatggtaaactgcagacagaaccaatcttaaatctcgttcatggtttaatatcatttgataaatggtactctggcttgcctaaagatatgcaagttgaggattttgatgtttatgatgaatcatgcggtattccgatgaagtcaaatggttctgcaggaactgatcttctggttaattcagatgaggatagcatgaatattgatgagtccagtttggctacttgctcttcagaaagttctatcaataatgagaatatagacaaaaaaatgaataacaaacctggttttcttcaccctaaagaggaaatggatccacttgaatcacaaggaaatgaaaacttgcgaagcatatttttggatacctctgatggtcctacttgtggattggagcagagcttgctgcctttaaagctgaagttcgctactggggcttccaatgattgttttgataaatatatgaagtacaagtcagtgcctaataccttgtatgaagatgcagaaaaatgtctaagattggctctttattcaaatccgccagtgatggctgcattattgccactaatacagattctcctcctaggtgataaactgaaagttgcactaaatgagcttgagaaggcctgcctcagtttagctacagccctccctttcaggttgagaggtaggctgctggaagagtatgaccaaaaccaggtatcaaccattttctcttgctatgaggaggctttgagaagagatcctacatgtagctactccatggagaggctaatcaaaatgcataaaaaagtttaccagagaatcatggaaggcccgatgcagatggtgggcacgccatcatttcagccaaaatgcttatacatcagaagctcagtcaggtgattgcaagctcctggctgccaaggcagcttgtgctgctcatttgtttggaccagaattcccatatgtcaaagcagttggtgtctatattgcaaagcaagaagctctggacgaaatcagtgtcctagtcagaaataagcagaactctgtcaggctattacaaactttggagaaactaacacgatgattctttcaccattgcttggtgttggtaattagcataatgttgacgatattttatagaccccttgatgaagcaaaattttgtaggatcaatagcatgtcactaatgtagtgtgttggcagaaaattttgtagtatcaatagcatgtcactaatgtatgtgttggcagaaccttggcgctggatgaaatcttggcgcgggtgatgccatacgttgtgtagcagcaaaaaaagcaaagacatcagaaacgtaagagatagaagccatttgctcccttgttttttttttgtttttgcgaaatgtaagtacaaggccgagaagagtcctgaaaatttatacttatttcattatccctggagctgcactgagggtctgtttgacaactttacaaatgaaaattttaagcacatgtgatcccttgtaacggttcctcttgtagtcccttgtaggtttctcatgtagtttgctgttcagataaaaacgaattcaactgcagctcagccttgtgaattaagatggactacatttaagaataattgtctctagagagttggatatagagaaaaaaatgaagaacaatgcaggggtattgtaatcactatcctcggtctgcctgagatgcccagatcgtggtcttttgcaacttgttgaacctcctgattgtttttttggggaaaaaactcaacacagggcaaggcgctgctcatggacgcacattcctctatcttgc

SEQ ID NO: 58826 - DNA, 2962 bp, Zea Mays
agccattgatgtgtccgccaaagtaatccgagcggcccattggaaacataccctcctctccccgcggggacatgatactcctgcaaaaccctcgacctagacggtgcagcgccgccggcccgccgccgcggtctctgcctctgcctcgtcatggcgcggacgatgctgccgtctccttcgcctcacaccgccgtcaagagagaaatcgaggacgcagagcccaccgctcacacgccggcgtcactgcctcgcaagaagcgccgccgtggaggccgcctcccagtgactcccacccagcttcccctaagccctcccctcgtcacgccccagaccatcccatcggtggcatcaggggacgcgtccttcgccggcctaacgccgacgcccgtgttctctgccgtcaaggacgagtccggcgcggacaccggggtggggagcaacgggagggcgtccgggaaacggaatgactcgcaggacctccgctccgtcccgaggcccgcggcagcggagcctcccactctctggctcaaccgccggcgtctgggcctcatcctccacgagctcgcgggagcgcaccggtggcgcgacgcggccagcgtcgtctcgacgctccttagcggcaaccgaaagcccgactcctacgaggagacgcgcagaatgttcgtggtggccatggagattcataagcggcttgctgaggacagcagcgtgcagtacggtggcaggagcagctactacctcagaacgcagaagttgttcaatgtttggatgcgaaagctgatttggtttccttcttgcccaaaaaaaaacttggttacacttgaactggccctattttacctttcacaaggcaacatcgacaatgcacacatcgcaacaagaacccttatcgccaatggtaaactgcagacagaaccaatcttaaatctcgttcatggtttaatatcatttgataaatggaactgatcttctggttaattcagatgaggatagcatgaatattgatgagtccagtttggctacttgctcttcagaaagttctatcaataatgagaatatagacaaaaaaatgaataacaaacctggttttcttcaccctaaagaggaaatggatccacttgaatcacaaggaaatgaaaacttgcgaagcatatttttggatacctctgatggtcctacttgtgggactcgaacccgggactttgggtgctacttgagctgtgtgctactacccagtcaagtcgcaggcttgtttgcgatgatgcagcttcatttgtgttttctgtcagaatagtcctcagactgatccacctcattaagctgaactaccaccttatcagattggagcagagcttgctgcctttaaagctgaagttcgctactggggcttccaatgattgttttgataaatatatgaagtacaagtcagtgcctaataccttgtatgaagatgcagaaaaatgtctaagattggctctttattcaaatccgccagtgatggctgcattattgccactaatacagattctcctcctaggtgataaactgaaagttgcactaaatgagcttgagaaggcctgcctcagtttagctacagccctccctttcaggttgagaggtaggctgctggaagagtatgaccaaaaccaggtatcaaccattttctcttgctatgaggaggctttgagaagagatcctacatgtagctactccatggagaggctaatcaaaatgcataaaaaaggatattataacaccatccaactacttgaggcaatagctttacatttagattccgtcaatgggaaatcctgcatctgggaagagcttgtatcatgtttccttcggcttttttctgacaatactgctgactacgaggattgcatatcatgtactaatacccatgggggtgaatcattggaggcttccagtaaattttcttcagtcttttttgagcagtttaccagagaatcatggaaggcccgatgcagatggtgggcacgccatcatttcagccaaaatgcttatacatcagaagctcagtcaggtgattgcaagctcctggctgccaaggcagcttgtgctgctcatttgtttggaccagaattcccatatgtcaaagcagttggtgtctatattgcaaagcaagaagctctggacgaaatcagtgtcctagtcagaaataagcagaactctgtcaggctattacaaactttggagaaactaacacgatgattctttcaccattgcttggtgttggtaattagcataatgttgacgatattttatagaccccttgatgaagcaaaattttgtaggatcaatagcatgtcactaatgtagtgtgttggcagaaaattttgtagtatcaatagcatgtcactaatgtatgtgttggcagaaccttggcgctggatgaaatcttggcgcgggtgatgccatacgttgtgtagcagcaaaaaaagcaaagacatcagaaacgtaagagatagaagccatttgctcccttgttttttttttgtttttgcgaaatgtaagtacaaggccgagaagagtcctgaaaatttatacttatttcattatccctggagctgcactgagggtctgtttgacaactttacaaatgaaaattttaagcacatgtgatcccttgtaacggttcctcttgtagtcccttgtaggtttctcatgtagtttgctgttcagataaaaacgaattcaactgcagctcagccttgtgaattaagatggactacatttaagaataattgtctctagagagttggatatagagaaaaaaatgaagaacaatgcaggggtattgtaatcactatcctcggtctgcctgagatgcccagatcgtggtcttttgcaacttgttgaacctcctgattgtttttttggggaaaaaactcaacacagggcaaggcgctgctcatggacgcacattcctctatcttgc

SEQ ID NO: 58827 - DNA, 2789 bp, Zea Mays
caaagtaatccgagcggcccattggaaacataccctcctctccccgcggggacatgatactcctgcaaaaccctcgacctagacggtgcagcgccgccggcccgccgccgcggtctctgcctctgcctcgtcatggcgcggacgatgctgccgtctccttcgcctcacaccgccgtcaagagagaaatcgaggacgcagagcccaccgctcacacgccggcgtcactgcctcgcaagaagcgccgccgtggaggccgcctcccagtgactcccacccagcttcccctaagccctcccctcgtcacgccccagaccatcccatcggtggcatcaggggacgcgtccttcgccggcctaacgccgacgcccgtgttctctgccgtcaaggacgagtccggcgcggacaccggggtggggagcaacgggagggcgtccgggaaacggaatgactcgcaggacctccgctccgtcccgaggcccgcggcagcggagcctcccactctctggctcaaccgccggcgtctgggcctcatcctccacgagctcgcgggagcgcaccggtggcgcgacgcggccagcgtcgtctcgacgctccttagcggcaaccgaaagcccgactcctacgaggagacgcgcagaatgttcgtggtggccatggagattcataagcggcttgctgaggacagcagcgtgcagtacggtggcaggagcagctactacctcagaacgcagaagttgttcaatgtttggatgcgaaagctgatttggtttccttcttgcccaaaaaaaaacttggttacacttgaactggccctattttacctttcacaaggcaacatcgacaatgcacacatcgcaacaagaacccttatcgccaatggtaaactgcagacagaaccaatcttaaatctcgttcatggtttaatatcatttgataaatggaactgatcttctggttaattcagatgaggatagcatgaatattgatgagtccagtttggctacttgctcttcagaaagttctatcaataatgagaatatagacaaaaaaatgaataacaaacctggttttcttcaccctaaagaggaaatggatccacttgaatcacaaggaaatgaaaacttgcgaagcatatttttggatacctctgatggtcctacttgtggattggagcagagcttgctgcctttaaagctgaagttcgctactggggcttccaatgattgttttgataaatatatgaagtacaagtcagtgcctaataccttgtatgaagatgcagaaaaatgtctaagattggctctttattcaaatccgccagtgatggctgcattattgccactaatacagattctcctcctaggtgataaactgaaagttgcactaaatgagcttgagaaggcctgcctcagtttagctacagccctccctttcaggttgagaggtaggctgctggaagagtatgaccaaaaccaggtatcaaccattttctcttgctatgaggaggctttgagaagagatcctacatgtagctactccatggagaggctaatcaaaatgcataaaaaaggatattataacaccatccaactacttgaggcaatagctttacatttagattccgtcaatgggaaatcctgcatctgggaagagcttgtatcatgtttccttcggcttttttctgacaatactgctgactacgaggattgcatatcatgtactaatacccatgggggtgaatcattggaggcttccagtaaattttcttcagtcttttttgagcagtttaccagagaatcatggaaggcccgatgcagatggtgggcacgccatcatttcagccaaaatgcttatacatcagaagctcagtcaggtgattgcaagctcctggctgccaaggcagcttgtgctgctcatttgtttggaccagaattcccatatgtcaaagcagttggtgtctatattgcaaagcaagaagctctggacgaaatcagtgtcctagtcagaaataagcagaactctgtcaggctattacaaactttggagaaactaacacgatgattctttcaccattgcttggtgttggtaattagcataatgttgacgatattttatagaccccttgatgaagcaaaattttgtaggatcaatagcatgtcactaatgtagtgtgttggcagaaaattttgtagtatcaatagcatgtcactaatgtatgtgttggcagaaccttggcgctggatgaaatcttggcgcgggtgatgccatacgttgtgtagcagcaaaaaaagcaaagacatcagaaacgtaagagatagaagccatttgctcccttgttttttttttgtttttgcgaaatgtaagtacaaggccgagaagagtcctgaaaatttatacttatttcattatccctggagctgcactgagggtctgtttgacaactttacaaatgaaaattttaagcacatgtgatcccttgtaacggttcctcttgtagtcccttgtaggtttctcatgtagtttgctgttcagataaaaacgaattcaactgcagctcagccttgtgaattaagatggactacatttaagaataattgtctctagagagttggatatagagaaaaaaatgaagaacaatgcaggggtattgtaatcactatcctcggtctgcctgagatgcccagatcgtggtcttttgcaacttgttgaacctcctgattgtttttttggggaaaaaactcaacacagggcaaggcgctgctcatggacgcacattcctctatcttgc

SEQ ID NO: 58828 - DNA, 2853 bp, Zea Mays
ggcccattggaaacataccctcctctccccgcggggacatgatactcctgcaaaaccctcgacctagacggtgcagcgccgccggcccgccgccgcggtctctgcctctgcctcgtcatggcgcggacgatgctgccgtctccttcgcctcacaccgccgtcaagagagaaatcgaggacgcagagcccaccgctcacacgccggcgtcactgcctcgcaagaagcgccgccgtggaggccgcctcccagtgactcccacccagcttcccctaagccctcccctcgtcacgccccagaccatcccatcggtggcatcaggggacgcgtccttcgccggcctaacgccgacgcccgtgttctctgccgtcaaggacgagtccggcgcggacaccggggtggggagcaacgggagggcgtccgggaaacggaatgactcgcaggacctccgctccgtcccgaggcccgcggcagcggagcctcccactctctggctcaaccgccggcgtctgggcctcatcctccacgagctcgcgggagcgcaccggtggcgcgacgcggccagcgtcgtctcgacgctccttagcggcaaccgaaagcccgactcctacgaggagacgcgcagaatgttcgtggtggccatggagattcataagcggcttgctgaggacagcagcgtgcagtacggtggcaggagcagctactacctcagaacgcagaagttgttcaatgtttggatgcgaaagctgatttggtttccttcttgcccaaaaaaaaacttggttacacttgaactggccctattttacctttcacaaggcaacatcgacaatgcacacatcgcaacaagaacccttatcgccaatggtaaactgcagacagaaccaatcttaaatctcgttcatggtttaatatcatttgataaatggtactctggcttgcctaaagatatgcaagttgaggattttgatgtttatgatgaatcatgcggtattccgatgaagtcaaatggttctgcaggaactgatcttctggttaattcagatgaggatagcatgaatattgatgagtccagtttggctacttgctcttcagaaagttctatcaataatgagaatatagacaaaaaaatgaataacaaacctggttttcttcaccctaaagaggaaatggatccacttgaatcacaaggaaatgaaaacttgcgaagcatatttttggatacctctgatggtcctacttgtggattggagcagagcttgctgcctttaaagctgaagttcgctactggggcttccaatgattgttttgataaatatatgaagtacaagtcagtgcctaataccttgtatgaagatgcagaaaaatgtctaagattggctctttattcaaatccgccagtgatggctgcattattgccactaatacaggtgataaactgaaagttgcactaaatgagcttgagaaggcctgcctcagtttagctacagccctccctttcaggttgagaggtaggctgctggaagagtatgaccaaaaccaggtatcaaccattttctcttgctatgaggaggctttgagaagagatcctacatgtagctactccatggagaggctaatcaaaatgcataaaaaaggatattataacaccatccaactacttgaggcaatagctttacatttagattccgtcaatgggaaatcctgcatctgggaagagcttgtatcatgtttccttcggcttttttctgacaatactgctgactacgaggattgcatatcatgtactaatacccatgggggtgaatcattggaggcttccagtaaattttcttcagtcttttttgagcagtttaccagagaatcatggaaggcccgatgcagatggtgggcacgccatcatttcagccaaaatgcttatacatcagaagctcagtcaggtgattgcaagctcctggctgccaaggcagcttgtgctgctcatttgtttggaccagaattcccatatgtcaaagcagttggtgtctatattgcaaagcaagaagctctggacgaaatcagtgtcctagtcagaaataagcagaactctgtcaggctattacaaactttggagaaactaacacgatgattctttcaccattgcttggtgttggtaattagcataatgttgacgatattttatagaccccttgatgaagcaaaattttgtaggatcaatagcatgtcactaatgtagtgtgttggcagaaaattttgtagtatcaatagcatgtcactaatgtatgtgttggcagaaccttggcgctggatgaaatcttggcgcgggtgatgccatacgttgtgtagcagcaaaaaaagcaaagacatcagaaacgtaagagatagaagccatttgctcccttgttttttttttgtttttgcgaaatgtaagtacaaggccgagaagagtcctgaaaatttatacttatttcattatccctggagctgcactgagggtctgtttgacaactttacaaatgaaaattttaagcacatgtgatcccttgtaacggttcctcttgtagtcccttgtaggtttctcatgtagtttgctgttcagataaaaacgaattcaactgcagctcagccttgtgaattaagatggactacatttaagaataattgtctctagagagttggatatagagaaaaaaatgaagaacaatgcaggggtattgtaatcactatcctcggtctgcctgagatgcccagatcgtggtcttttgcaacttgttgaacctcctgattgtttttttggggaaaaaactcaacacagggcaaggcgctgctcatggacgcacattcctctatcttgc

SEQ ID NO: 58829 - DNA, 2802 bp, Zea Mays
cattggaaacataccctcctctccccgcggggacatgatactcctgcaaaaccctcgacctagacggtgcagcgccgccggcccgccgccgcggtctctgcctctgcctcgtcatggcgcggacgatgctgccgtctccttcgcctcacaccgccgtcaagagagaaatcgaggacgcagagcccaccgctcacacgccggcgtcactgcctcgcaagaagcgccgccgtggaggccgcctcccagtgactcccacccagcttcccctaagccctcccctcgtcacgccccagaccatcccatcggtggcatcaggggacgcgtccttcgccggcctaacgccgacgcccgtgttctctgccgtcaaggacgagtccggcgcggacaccggggtggggagcaacgggagggcgtccgggaaacggaatgactcgcaggacctccgctccgtcccgaggcccgcggcagcggagcctcccactctctggctcaaccgccggcgtctgggcctcatcctccacgagctcgcgggagcgcaccggtggcgcgacgcggccagcgtcgtctcgacgctccttagcggcaaccgaaagcccgactcctacgaggagacgcgcagaatgttcgtggtggccatggagattcataagcggcttgctgaggacagcagcgtgcagtacggtggcaggagcagctactacctcagaacgcagaagttgttcaatgtttggatgcgaaagctgatttggtttccttcttgcccaaaaaaaaacttggttacacttgaactggccctattttacctttcacaaggcaacatcgacaatgcacacatcgcaacaagaacccttatcgccaatggtaaactgcagacagaaccaatcttaaatctcgttcatggtttaatatcatttgataaatggtactctggcttgcctaaagatatgcaagttgaggattttgatgtttatgatgaatcatgcggtattccgatgaagtcaaatggttctgcaggaactgatcttctggttaattcagatgaggatagcatgaatattgatgagtccagtttggctacttgctcttcagaaagttctatcaataatgagaatatagacaaaaaaatgaataacaaacctggttttcttcaccctaaagaggaaatggatccacttgaatcacaaggaaatgaaaacttgcgaagcatatttttggatacctctgatggtcctacttgtgggactcgaacccgggactttgggtgctacttgagctgtgtgctactacccagtcaagtcgcaggcttgtttgcgatgatgcagcttcatttgtgttttctgtcagaatagtcctcagactgatccacctcattaagctgaactaccaccttatcagattggagcagagcttgctgcctttaaagctgaagttcgctactggggcttccaatgattgttttgataaatatatgaagtacaagtcagtgcctaataccttgtatgaagatgcagaaaaatgtctaagattggctctttattcaaatccgccagtgatggctgcattattgccactaatacagattctcctcctaggtgataaactgaaagttgcactaaatgagcttgagaaggcctgcctcagtttagctacagccctccctttcaggttgagaggtaggctgctggaagagtatgaccaaaaccaggtatcaaccattttctcttgctatgaggaggctttgagaagagatcctacatgtagctactccatggagaggctaatcaaaatgcataaaaaagtttaccagagaatcatggaaggcccgatgcagatggtgggcacgccatcatttcagccaaaatgcttatacatcagaagctcagtcaggtgattgcaagctcctggctgccaaggcagcttgtgctgctcatttgtttggaccagaattcccatatgtcaaagcagttggtgtctatattgcaaagcaagaagctctggacgaaatcagtgtcctagtcagaaataagcagaactctgtcaggctattacaaactttggagaaactaacacgatgattctttcaccattgcttggtgttggtaattagcataatgttgacgatattttatagaccccttgatgaagcaaaattttgtaggatcaatagcatgtcactaatgtagtgtgttggcagaaaattttgtagtatcaatagcatgtcactaatgtatgtgttggcagaaccttggcgctggatgaaatcttggcgcgggtgatgccatacgttgtgtagcagcaaaaaaagcaaagacatcagaaacgtaagagatagaagccatttgctcccttgttttttttttgtttttgcgaaatgtaagtacaaggccgagaagagtcctgaaaatttatacttatttcattatccctggagctgcactgagggtctgtttgacaactttacaaatgaaaattttaagcacatgtgatcccttgtaacggttcctcttgtagtcccttgtaggtttctcatgtagtttgctgttcagataaaaacgaattcaactgcagctcagccttgtgaattaagatggactacatttaagaataattgtctctagagagttggatatagagaaaaaaatgaagaacaatgcaggggtattgtaatcactatcctcggtctgcctgagatgcccagatcgtggtcttttgcaacttgttgaacctcctgattgtttttttggggaaaaaactcaacacagggcaaggcgctgctcatggacgcacattcctctatcttgc

SEQ ID NO: 58830 - DNA, 2695 bp, Zea Mays
cattggaaacataccctcctctccccgcggggacatgatactcctgcaaaaccctcgacctagacggtgcagcgccgccggcccgccgccgcggtctctgcctctgcctcgtcatggcgcggacgatgctgccgtctccttcgcctcacaccgccgtcaagagagaaatcgaggacgcagagcccaccgctcacacgccggcgtcactgcctcgcaagaagcgccgccgtggaggccgcctcccagtgactcccacccagcttcccctaagccctcccctcgtcacgccccagaccatcccatcggtggcatcaggggacgcgtccttcgccggcctaacgccgacgcccgtgttctctgccgtcaaggacgagtccggcgcggacaccggggtggggagcaacgggagggcgtccgggaaacggaatgactcgcaggacctccgctccgtcccgaggcccgcggcagcggagcctcccactctctggctcaaccgccggcgtctgggcctcatcctccacgagctcgcgggagcgcaccggtggcgcgacgcggccagcgtcgtctcgacgctccttagcggcaaccgaaagcccgactcctacgaggagacgcgcagaatgttcgtggtggccatggagattcataagcggcttgctgaggacagcagcgtgcagtacggtggcaggagcagctactacctcagaacgcagaagttgttcaatgtttggatgcgaaagctgatttggtttccttcttgcccaaaaaaaaacttggttacacttgaactggccctattttacctttcacaaggcaacatcgacaatgcacacatcgcaacaagaacgaactgatcttctggttaattcagatgaggatagcatgaatattgatgagtccagtttggctacttgctcttcagaaagttctatcaataatgagaatatagacaaaaaaatgaataacaaacctggttttcttcaccctaaagaggaaatggatccacttgaatcacaaggaaatgaaaacttgcgaagcatatttttggatacctctgatggtcctacttgtggattggagcagagcttgctgcctttaaagctgaagttcgctactggggcttccaatgattgttttgataaatatatgaagtacaagtcagtgcctaataccttgtatgaagatgcagaaaaatgtctaagattggctctttattcaaatccgccagtgatggctgcattattgccactaatacagattctcctcctaggtgataaactgaaagttgcactaaatgagcttgagaaggcctgcctcagtttagctacagccctccctttcaggttgagaggtaggctgctggaagagtatgaccaaaaccaggtatcaaccattttctcttgctatgaggaggctttgagaagagatcctacatgtagctactccatggagaggctaatcaaaatgcataaaaaaggatattataacaccatccaactacttgaggcaatagctttacatttagattccgtcaatgggaaatcctgcatctgggaagagcttgtatcatgtttccttcggcttttttctgacaatactgctgactacgaggattgcatatcatgtactaatacccatgggggtgaatcattggaggcttccagtaaattttcttcagtcttttttgagcagtttaccagagaatcatggaaggcccgatgcagatggtgggcacgccatcatttcagccaaaatgcttatacatcagaagctcagtcaggtgattgcaagctcctggctgccaaggcagcttgtgctgctcatttgtttggaccagaattcccatatgtcaaagcagttggtgtctatattgcaaagcaagaagctctggacgaaatcagtgtcctagtcagaaataagcagaactctgtcaggctattacaaactttggagaaactaacacgatgattctttcaccattgcttggtgttggtaattagcataatgttgacgatattttatagaccccttgatgaagcaaaattttgtaggatcaatagcatgtcactaatgtagtgtgttggcagaaaattttgtagtatcaatagcatgtcactaatgtatgtgttggcagaaccttggcgctggatgaaatcttggcgcgggtgatgccatacgttgtgtagcagcaaaaaaagcaaagacatcagaaacgtaagagatagaagccatttgctcccttgttttttttttgtttttgcgaaatgtaagtacaaggccgagaagagtcctgaaaatttatacttatttcattatccctggagctgcactgagggtctgtttgacaactttacaaatgaaaattttaagcacatgtgatcccttgtaacggttcctcttgtagtcccttgtaggtttctcatgtagtttgctgttcagataaaaacgaattcaactgcagctcagccttgtgaattaagatggactacatttaagaataattgtctctagagagttggatatagagaaaaaaatgaagaacaatgcaggggtattgtaatcactatcctcggtctgcctgagatgcccagatcgtggtcttttgcaacttgttgaacctcctgattgtttttttggggaaaaaactcaacacagggcaaggcgctgctcatggacgcacattcctctatcttgc

SEQ ID NO: 58831 - DNA, 2569 bp, Zea Mays
cattggaaacataccctcctctccccgcggggacatgatactcctgcaaaaccctcgacctagacggtgcagcgccgccggcccgccgccgcggtctctgcctctgcctcgtcatggcgcggacgatgctgccgtctccttcgcctcacaccgccgtcaagagagaaatcgaggacgcagagcccaccgctcacacgccggcgtcactgcctcgcaagaagcgccgccgtggaggccgcctcccagtgactcccacccagcttcccctaagccctcccctcgtcacgccccagaccatcccatcggtggcatcaggggacgcgtccttcgccggcctaacgccgacgcccgtgttctctgccgtcaaggacgagtccggcgcggacaccggggtggggagcaacgggagggcgtccgggaaacggaatgactcgcaggacctccgctccgtcccgaggcccgcggcagcggagcctcccactctctggctcaaccgccggcgtctgggcctcatcctccacgagctcgcgggagcgcaccggtggcgcgacgcggccagcgtcgtctcgacgctccttagcggcaaccgaaagcccgactcctacgaggagacgcgcagaatgttcgtggtggccatggagattcataagcggcttgctgaggacagcagcgtgcagtacggtggcaggagcagctactacctcagaacgcagaagttgttcaatgtttggatgcgaaagctgatttggtttccttcttgcccaaaaaaaaacttggttacacttgaactggccctattttacctttcacaaggcaacatcgacaatgcacacatcgcaacaagaacccttatcgccaatggtaaactgcagacagaaccaatcttaaatctcgttcatggtttaatatcatttgataaatggaactgatcttctggttaattcagatgaggatagcatgaatattgatgagtccagtttggctacttgctcttcagaaagttctatcaataatgagaatatagacaaaaaaatgaataacaaacctggttttcttcaccctaaagaggaaatggatccacttgaatcacaaggaaatgaaaacttgcgaagcatatttttggatacctctgatggtcctacttgtggattggagcagagcttgctgcctttaaagctgaagttcgctactggggcttccaatgattgttttgataaatatatgaagtacaagtcagtgcctaataccttgtatgaagatgcagaaaaatgtctaagattggctctttattcaaatccgccagtgatggctgcattattgccactaatacagattctcctcctaggtgataaactgaaagttgcactaaatgagcttgagaaggcctgcctcagtttagctacagccctccctttcaggttgagaggtaggctgctggaagagtatgaccaaaaccaggtatcaaccattttctcttgctatgaggaggctttgagaagagatcctacatgtagctactccatggagaggctaatcaaaatgcataaaaaagtcttttttgagcagtttaccagagaatcatggaaggcccgatgcagatggtgggcacgccatcatttcagccaaaatgcttatacatcagaagctcagtcaggtgattgcaagctcctggctgccaaggcagcttgtgctgctcatttgtttggaccagaattcccatatgtcaaagcagttggtgtctatattgcaaagcaagaagctctggacgaaatcagtgtcctagtcagaaataagcagaactctgtcaggctattacaaactttggagaaactaacacgatgattctttcaccattgcttggtgttggtaattagcataatgttgacgatattttatagaccccttgatgaagcaaaattttgtaggatcaatagcatgtcactaatgtagtgtgttggcagaaaattttgtagtatcaatagcatgtcactaatgtatgtgttggcagaaccttggcgctggatgaaatcttggcgcgggtgatgccatacgttgtgtagcagcaaaaaaagcaaagacatcagaaacgtaagagatagaagccatttgctcccttgttttttttttgtttttgcgaaatgtaagtacaaggccgagaagagtcctgaaaatttatacttatttcattatccctggagctgcactgagggtctgtttgacaactttacaaatgaaaattttaagcacatgtgatcccttgtaacggttcctcttgtagtcccttgtaggtttctcatgtagtttgctgttcagataaaaacgaattcaactgcagctcagccttgtgaattaagatggactacatttaagaataattgtctctagagagttggatatagagaaaaaaatgaagaacaatgcaggggtattgtaatcactatcctcggtctgcctgagatgcccagatcgtggtcttttgcaacttgttgaacctcctgattgtttttttggggaaaaaactcaacacagggcaaggcgctgctcatggacgcacattcctctatcttgc

SEQ ID NO: 58832 - DNA, 2816 bp, Zea Mays
cattggaaacataccctcctctccccgcggggacatgatactcctgcaaaaccctcgacctagacggtgcagcgccgccggcccgccgccgcggtctctgcctctgcctcgtcatggcgcggacgatgctgccgtctccttcgcctcacaccgccgtcaagagagaaatcgaggacgcagagcccaccgctcacacgccggcgtcactgcctcgcaagaagcgccgccgtggaggccgcctcccagtgactcccacccagcttcccctaagccctcccctcgtcacgccccagaccatcccatcggtggcatcaggggacgcgtccttcgccggcctaacgccgacgcccgtgttctctgccgtcaaggacgagtccggcgcggacaccggggtggggagcaacgggagggcgtccgggaaacggaatgactcgcaggacctccgctccgtcccgaggcccgcggcagcggagcctcccactctctggctcaaccgccggcgtctgggcctcatcctccacgagctcgcgggagcgcaccggtggcgcgacgcggccagcgtcgtctcgacgctccttagcggcaaccgaaagcccgactcctacgaggagacgcgcagaatgttcgtggtggccatggagattcataagcggcttgctgaggacagcagcgtgcagtacggtggcaggagcagctactacctcagaacgcagaagttgttcaatgtttggatgcgaaagctgatttggtttccttcttgcccaaaaaaaaacttggttacacttgaactggccctattttacctttcacaaggcaacatcgacaatgcacacatcgcaacaagaacccttatcgccaatggtaaactgcagacagaaccaatcttaaatctcgttcatggtttaatatcatttgataaatggtactctggcttgcctaaagatatgcaagttgaggattttgatgtttatgatgaatcatgcggtattccgatgaagtcaaatggttctgcaggaactgatcttctggttaattcagatgaggatagcatgaatattgatgagtccagtttggctacttgctcttcagaaagttctatcaataatgagaatatagacaaaaaaatgaataacaaacctggttttcttcaccctaaagaggaaatggatccacttgaatcacaaggaaatgaaaacttgcgaagcatatttttggatacctctgatggtcctacttgtgggactcgaacccgggactttgggtgctacttgagctgtgtgctactacccagtcaagtcgcaggcttgtttgcgatgatgcagcttcatttgtgttttctgtcagaatagtcctcagactgatccacctcattaagctgaactaccaccttatcagattggagcagagcttgctgcctttaaagctgaagttcgctactggggcttccaatgattgttttgataaatatatgaagtacaagtcagtgcctaataccttgtatgaagatgcagaaaaatgtctaagattggctctttattcaaatccgccagtgatggctgcattattgccactaatacagattctcctcctaggtgataaactgaaagttgcactaaatgagcttgagaaggcctgcctcagtttagctacagccctccctttcaggttgagaggtaggctgctggaagagtatgaccaaaaccaggtatcaaccattttctcttgctatgaggaggctttgagaagagatcctacatgtagctactccatggagaggctaatcaaaatgcataaaaaagtcttttttgagcagtttaccagagaatcatggaaggcccgatgcagatggtgggcacgccatcatttcagccaaaatgcttatacatcagaagctcagtcaggtgattgcaagctcctggctgccaaggcagcttgtgctgctcatttgtttggaccagaattcccatatgtcaaagcagttggtgtctatattgcaaagcaagaagctctggacgaaatcagtgtcctagtcagaaataagcagaactctgtcaggctattacaaactttggagaaactaacacgatgattctttcaccattgcttggtgttggtaattagcataatgttgacgatattttatagaccccttgatgaagcaaaattttgtaggatcaatagcatgtcactaatgtagtgtgttggcagaaaattttgtagtatcaatagcatgtcactaatgtatgtgttggcagaaccttggcgctggatgaaatcttggcgcgggtgatgccatacgttgtgtagcagcaaaaaaagcaaagacatcagaaacgtaagagatagaagccatttgctcccttgttttttttttgtttttgcgaaatgtaagtacaaggccgagaagagtcctgaaaatttatacttatttcattatccctggagctgcactgagggtctgtttgacaactttacaaatgaaaattttaagcacatgtgatcccttgtaacggttcctcttgtagtcccttgtaggtttctcatgtagtttgctgttcagataaaaacgaattcaactgcagctcagccttgtgaattaagatggactacatttaagaataattgtctctagagagttggatatagagaaaaaaatgaagaacaatgcaggggtattgtaatcactatcctcggtctgcctgagatgcccagatcgtggtcttttgcaacttgttgaacctcctgattgtttttttggggaaaaaactcaacacagggcaaggcgctgctcatggacgcacattcctctatcttgc

SEQ ID NO: 58833 - DNA, 654 bp, Zea Mays
agaaactgtatttttgtgttttttacaccgacactcacaaatgcatgcacataataaactctccgcgttgaggaagtcatcacagtcatcttgatatcgatgggaacgtcagccagcgattatgttaggttgagttaggtgtgacaggaagtggtccatgtgaagtgagaacaacgagcttcagcaataaggccgggtgtttgaagacgatcccactgttggtgtattttcgaaattttcttttctccaagcttagagctgagatcgtatgtcctatactcctatggggcttttattcatgaattgtcaagggttcagacagcctaaactctaaagcaagacgccaagaccctcgccgctggctcggtaaccatacgatggtttagcagtgagaaaaattgagaatcgacactcattgtccagtcatggatgtaccttgtactgcttgtaaatagtttctatacagtgattcatgtgctcgcaagtcgcaaggtgttgtcccacgaaaattcgttgggtgtgctgagatcattcaagtagggaaaaggttcagagcgcgacaaatgtgtagggtaacggcatgtggctatgcttcaataatctcttttagagttggtttggtgacaaaagaattaaaagggatccattggaaag

SEQ ID NO: 58834 - DNA, 546 bp, Zea Mays
acctggacagccaagagaaacagtcatcaaccaaatttgatagtggtactgggtggccatcctattataaaccaattggtgaaaatgtcaagagcaagcttgatatgtcaatcatttttatgccccggaccgaggtgctctgtgcaacctgtgatgctcatctggggcatgtcttcgatgacgggccaccaccaacagggaagagatactgtatcaatagtgcatctctgaaattgaagccccaatagttgctggatactttagcaagaagtcaactataacgctggtccgccctatgtaaacttcggggttatgtatataaactactcgagttgtagcatatttattattctctttgttatgtaatatatgtgttcacaaaccgatgaaagtatgaaacaaacagccgctacttcactctggtattctggtctagaattaaggtgttgtttggttgacgaattgtaacgtaaatggcaacggtaatggtttgcactcgagtgacagttgacaacggtaataaatttaaatagatctttattaatt

SEQ ID NO: 58835 - DNA, 2916 bp, Zea Mays
cgaaaaaaaaatcacttcaggtaagggcgaagaagagcattccctctcccggtctccccatctcccgaaccgcgtgagccaaaccctcccagctcgcgcgccctcgatggatgcctccgccgccacccccgcccccgggccttccttctctggcgccgagtcctccgcggccgccgcccagccgccggcggaggctccgcagttgcgcgtccacggcgccggcagcggcagcggcgtcgcgcgagcctgccgccaccacgcgtacagccgcaagcagaagtcgctcggccttctctgctccaacttcgtggcgctgtacgaccgggaggacgtggaggtgattgggctggacgacgcggccaagcgtctcggcgtcgagcgacgccggatctacgacatagtcaacgttctcgagagcgtcgggattcttgtgcggagggccaagaatcggtatacatggctcggattcgggggagtccctgctgcgctgaaagaactcaaggagagggcgctaaggaagatgtccggatcaccggtgttactgtcaatggaggactcctctactgccaacttatcagatgatgaggatgatgaaaaattgggcgatgctgatgaagatgctgagagcgagaagctcagccaacctgttgacaatacgtctgataagcctgacgcacccagctgccgccttagatctgatcatcggaaggagaagtcccttgggctcctcactcagaattttgtcaagctcttcctcaacatggaggttgggacaatctcacttgacgaagctgcaaggcttctccttggagagggacatgcagacagcaacatgagaaccaaagttcgtcgattgtatgacattgccaatgtgctgtcttctttgaacctcattgagaagacgcagcaagcagacacaagaaaacctgcattccggtggctaggccaggcaaagcgaaagcaagataacaatgtcatggtttctgtacctccatcgatgaaggcaatgcccaataagagagcatttggtactgatcttacaaacattgacaataagcgaggcaagttagactcagcagcggagaacaaagtcaagctcatgcagggtgctggtaacatagtgaagacttttgagaggcagctggtgcaagggaaaaggagtgactttgtttatgggcccttccaccctgctggtgcaaagaaacacgaaactgatgatcaaactgttaagcagcaggagaggaagaacattcaggactgggaaaaccttgctgtgtccttccgtccacaatatcagaatcaagcactgaatgatctttttggtcattatgtggaagcatggaaatcatggtacgtggatcttacccaggaaacggcatcatgaagcagaatgttggcaggatcagagaaaatatcataagctagtcatcgaccttggttcatctaacaaaaacagaaatcagtaaattttgacgtattctggcgcctgggctgggattagcatcatatcgaggagatgcaagacatgcagatgcccaatcaaactcagtcatagttcacacactgcagaaggagcgaacttcacaagacggtaccattaccagtatccaaatgacaattttatcactgaagtgcggcaaatccagatgacagatgaatatgaacatcaagcatggacgatcaaactcatccaccatcatacatataccaagtcatcaccaagcgctcaaagtacttttagaggtcatggatgtccccaacatattgagttgccagcaaagtgtaaaatccccagtagcaagtagtagtagtagtatgccaatcaacatgcttcacttagggtcagtgaagaacttgttaactgcaggcatgatctcaggagtcttgtcgtgcacaaagcttcttaggccatgcatggcgtaacgtctcccctcctcatggttctcaagcacaccagctgccctccctgccttgtttaccctgtaaaattcaaggcattcgtgttgatagtgttacaggattaatgtatatgtaaacatggatgcatgtaactaggtaagcacaaacaaacagctacaattgtgacatcctcgtgttgtcaaatagtggacaatcagactgaagatgtgaacagcgtgcctacatgcatatgccgttttaaactcagaaaaaaaaatactgtaattggcaccatgcatgtaaacaaactattaagatgtcatgtaaagaacagaagcatatgcatacattttatgcttatagccacgaattagcactcccaaaccttacacttcggttcctacaatctgaccgaacagctacaaatggtctagtcgttttcaaccttgcccagcaaaaggaactagttttccaaccgggaaaactaccaagacaaatttcacctgatggatacaatacaactctggttctggcaagtcaacggctcaacgccgaaccatggttcagcctttcagacaagacaaagaaataaagcgactactgaactagtgaacttgaactacatatagactaaaacttcaacagcacccaaaccaagcagatctaccctgatccagcaggagcagcacatttcttgcaagaataaaacaggcaggagttaagagcacggagcggacctgacttccgggttgccagtgatgttccggaagagctgaaacccgcagatgccgacggccacgcccgtcgccgcgaacagcgggtacacctgcgctgcaccaccatgagagagagagagagagagagagagagagagagagagagagagagagagtgcaatcgaagagatcgaggaagctgacctcgggccggacccagcggctggccatctgagtcggagtctcttcgcactgggacgcggcctcgacggcggagaagcacggggaaagtggacaggcg

SEQ ID NO: 58836 - DNA, 1578 bp, Zea Mays
aaaaaatcacttcaggtaagggcgaagaagagcattccctctcccggtctccccatctcccgaaccgcgtgagccaaaccctcccagctcgcgcgccctcgatggatgcctccgccgccacccccgcccccgggccttccttctctggcgccgagtcctccgcggccgccgcccagccgccggcggaggctccgcagttgcgcgtccacggcgccggcagcggcagcggcgtcgcgcgagcctgccgccaccacgcgtacagccgcaagcagaagtcgctcggccttctctgctccaacttcgtggcgctgtacgaccgggaggacgtggaggtgattgggctggacgacgcggccaagcgtctcggcgtcgagcgacgccggatctacgacatagtcaacgttctcgagagcgtcgggattcttgtgcggagggccaagaatcggtatacatggctcggattcgggggagtccctgctgcgctgaaagaactcaaggagagggcgctaaggaagatgtccggatcaccggtgttactgtcaatggaggactcctctactgccaacatgatgaggatgatgaaaaattgggcgatgctgatgaagatgctgagagcgagaagctcagccaacctgttgacaatacgtctgataagcctgacgcacccagctgccgccttagatctgatcatcggaaggagaagtcccttgggctcctcactcagaattttgtcaagctcttcctcaacatggaggttgggacaatctcacttgacgaagctgcaaggcttctccttggagagggacatgcagacagcaacatgagaaccaaagttcgtcgattgtatgacattgccaatgtgctgtcttctttgaacctcattgagaagacgcagcaagcagacacaagaaaacctgcattccggtggctaggccaggcaaagcgaaagcaagataacaatgtcatggtttctgtacctccatcgatgaaggcaatgcccaataagagagcatttggtactgatcttacaaacattgacaataagcgaggcaagttagactcagcagcggagaacaaagtcaagctcatgcagggtgctggtaacatagtgaagacttttgagaggcagctggtgcaagggaaaaggagtgactttgtttatgggcccttccaccctgctggtgcaaagaaacacgaaactgatgatcaaactgttaagcagcaggagaggaagaacattcaggactgggaaaaccttgctgtgtccttccgtccacaatatcagaatcaagcactgaatgatctttttggtcattatgtggaagcatggaaatcatggtacgtggatcttacccaggaaacggcatcatgaagcagaatgttggcaggtcagttgtaacttgtaagccgtttccagtagttagatcaactgagttgttgatgcttgcttagggaaccaccctgtacaagatggaataaaaacacgaaggcaattttgtctttcgactgtatttactcgaatgctagaagtgaggccattttttcataaggaaaaaagcagggaaaatgggaaatcga

SEQ ID NO: 58837 - DNA, 370 bp, Zea Mays
caggctttcaccttgggaaggagacagcggagtttccaatcgaaccggagataaccctggagcttatgatggccgcaaactatctggacacttgatgaggagcctgagggatttgatctgatctgatccgatccagtgtggtctggcacaatgtaatgtaaaggtgggagggaagcagaaaccaaggaatacattttgcaatctacagtgtgtgctactatcaactcttggtagtgttttgttgtctcctgggaggccgtgactgctgctgctgtttgatgtatgtattactttttgctttggacggttccgatggaaaaccgaacggagacgctttgatatattgttgctgaattctgatcgtgtcgct

SEQ ID NO: 58838 - DNA, 421 bp, Zea Mays
ttgcagaactgcagaacttcatgttttccatgctgccaaacagctctgctaactaatgaatcattgggaaggagacagcggagtttccaatcgaaccggagataaccctggagcttatgatggccgcaaactatctggacacttgatgaggagcctgagggatttgatctgatctgatccgatccagtgtggtctggcacaatgtaatgtaaaggtgggagggaagcagaaaccaaggaatacattttgcaatctacagtgtgtgctactatcaactcttggtagtgttttgttgtctcctgggaggccgtgactgctgctgctgtttgatgtatgtattactttttgctttggacggttccgatggaaaaccgaacggagacgctttgatatattgttgctgaattctgatcgtgtcgct

SEQ ID NO: 58839 - DNA, 3424 bp, Zea Mays
aagcaaacgagtccgttgatgtgctcctcgcctcctccagtcccaccttctccgctgtatgtgagtctgtccctctcgtgtgtcgcccaaatccatcaccccccacgtctctcccatcccatccccgtgtagatttcaaatccgcgtcagagctcaggtctgggtctcctccttcgccgccagttgcctcctccagtcgagatccgccgtcggggagaccactgaccatggaggccatggaggagctatcggagctcgccgagtcgatgcgccaggcggcgtcactcctcgccgacgacgacccctccgacgacgccgcgccgcgtcgccccaccaccttcctcaacgccgtcgccctcggcaacgtcggcgctggcaagtcggccgtgctgaacagcctcatcggccacccggtcttgccgacgggggagaacggggcgacgcgggcgccgatagtggttgacctgcagagggagccggggctcagcagcaagtccatcgtgctgcagatcgacagcaagtcgcagcaggtttccgcaagtgctctccggcattcactgcaggacagactcagcaggggagcatctggtggatcagggaggggccgtgttgatgagatttacctcaaactgcggaccagtacagctccctcattaaagctgattgatttacctgggatagaccagcgagctgttgatgattccatgatcaatgagtatgctgggcacaatgatgcaatactgctcattgtcatacccgcaatgcaagctgctgatgttgcatcatctcgagctctgaggttggccaaggatatcgatgcagatgggacaagaacagttggtgttataagcaaagttgatcaagcaaatggagatgcaaaaactatagcctgtgttcaggccctactgtcaaacaagggcccaaaaaaccttcctgacattgagtgggttgctctaattggacaatctgttgcaattgcgtcagcacaatcagttgggtctgaaaactcactagaaacagcctggagagctgaagctgaaagcctgaaaaacatcttaactggatctcctcagaataagcttggtagaattgctttggttgacacaattgctaagcaaatccgtaaaagaatgaaagtgcgggttcctaacctattgagtggacttcagggtaagtctcaaatggtgcaagatgaactggcaaggctgggagaatctatggtacaaagtgccgaaggaacccgagcagttgctttggagctgtgccgagaatttgaggacaagtttcttgctcacataacatctgggatctggatggaaaattgttgcaagttttgaaggcaagtttccagacagaattaaacagctaccgttggaccgacatttcgatctcaacaacgtcaaaaggattgtcttggaagcagatggttatcaaccatatttgatatctccagagaaagggttgagatccttaataaaaatagtactggaaatggcaaaggagccatcacgactatgtgttgaagaggttcatcgtgtattgttagacatagtcaatgcttccgcaaatgccacaccaggacttgggagatatcctccattcaagcgtgaggttgttgcaatagcatcaaatgcattggagaccttcaaaaacgacgccaaaaagatggtcgttgcgcttgttgatatggaacgtgcttttgttcctccccaacatttcatccgcttagtacaaagaagaatggaaagacagcgtcgggaggatgaattgagaaatcgatcttctaagaaaacacaagaagctgaacagccaacatctaagagggcctcaagtccccaaacagatgctgagcaaggtggtggcagcttaaaatcaatgaaagacaaatctggccagcaagataaagacacaaaagagggatcaaatttgcaagttgctggtcctgctggtgaaattactgcaggttaccttttaaagaaaagcgcaaaaactaatgggtggagcaaaagatggtttgttcttaatgagaagagtggaaagcttgggtacacaaagaaacaagaggagagacattttcgtggtgtcatcactcttgaggagtgcaaccttgaggaggtagaggaggaagagccttctaaaagttcaaaggactcaaaaaaggcaaatggatcagaaaaaatctcaagtcttgtatttaagattactaatagggttgcatacaaaacggtcctcaaagctcacagtgctgttgtgttaaaggctgagagcatggccgacaaggttgagtgggtaaataagatcaaagctgttattcagagcaaagggggttctttcaagggtccaagtactgagggtagttcaatgaggcaaagcaattcggatggcgctttagatactatggcacgtagacctgctgatcctgaagaagaacttagatggatgtctcaagaagttcgtggttatgtcgaggctgttttgaatagtctggcagcaaatgttccaaaggctattgtgctttgtcaagtggagaaagcaaaggaagacatgcttaaccagctatacagctcgataagcgggcaaagcaatgctaagattgaagagctgcttcaagaggaccataatgctaagcgcagaagggagaagtaccaaaaacaatcatctctcctgtcaaaacttactcgtcaactcagtatccatgataacagggcatctgtttcctcttattctaatgacaccactgaagccgagagccctcgaacaccaacccgctcaggtgaggactggaggtcagcttttgattccgcttcaaatggtcctgttgctggaagcacaaacagtcaatcaaggtccaaaagtgctgacggtcgcagtcggcgctatgagaacggggacgtgagctcaggtgccaactctggcagccggcgcacaccaaaccggttgccaccagcaccgccaaaatactaatcgtgctgattggtattcatgaacatttatgtattcttgcctggcacatgcgcccagatcggctgctagagattgtggtgtagtggatggagtatcgggtgattgcgtgaacattgtgttcgcaggtcgctgcgtctcagatgagctgtttatagaaaaatatacaggtaaccgtggtttctactgtttattatctctgtatatttatgacgtccctgccttttgattttgttggggcattcgatctgcttccgcacttggtcgatctaggacaacggctgtcagactaagatttatcttgtcctgccccgcatattgttcgttgccactgacgattcttatttagtcgtggtttatctctactacttattaaggtagtaagggtagtctgtcattttctgttctgtcttttttcattttctgttttgccctcatccctgttatggcttaaaaaataaaa

SEQ ID NO: 58840 - DNA, 2763 bp, Zea Mays
gtgctcctcgcctcctccagtcccaccttctccgctgtatgtgagtctgtccctctcgtgtgtcgcccaaatccatcaccccccacgtctctcccatcccatccccgtgtagatttcaaatccgcgtcagagctcaggtctgggtctcctccttcgccgccagttgcctcctccagtcgagatccgccgtcggggagaccactgaccatggaggccatggaggagctatcggagctcgccgagtcgatgcgccaggcggcgtcactcctcgccgacgacgacccctccgacgacgccgcgccgcgtcgccccaccaccttcctcaacgccgtcgccctcggcaacgtcggcgctggcaagtcggccgtgctgaacagcctcatcggccacccggtcttgccgacgggggagaacggggcgacgcgggcgccgatagtggttgacctgcagagggagccggggctcagcagcaagtccatcgtgctgcagatcgacagcaagtcgcagcaggtttccgcaagtgctctccggcattcactgcaggacagactcagcaggggagcatctggtggatcagggaggggccgtgttgatgagatttacctcaaactgcggaccagtacagctccctcattaaagctgattgatttacctgggatagaccagcgagctgttgatgattccatgatcaatgagtatgctgggcacaatgatgcaatactgctcattgtcatacccgcaatgcaagctgctgatgttgcatcatctcgagctctgaggttggccaaggatatcgatgcagatgggacaagaacagttggtgttataagcaaagttgatcaagcaaatggagatgcaaaaactatagcctgtgttcaggccctactgtcaaacaagggcccaaaaaaccttcctgacattgagtgggttgctctaattggacaatctgttgcaattgcgtcagcacaatcagttgggtctgaaaactcactagaaacagcctggagagctgaagctgaaagcctgaaaaacatcttaactggatctcctcagaataagcttggtagaattgctttggttgacacaattgctaagcaaatccgtaaaagaatgaaagtgcgggttcctaacctattgagtggacttcagggtaagtctcaaatggtgcaagatgaactggcaaggctgggagaatctatggtacaaagtgccgaaggaacccgagcagttgctttggagctgtgccgagaatttgaggacaagtttcttgctcacataacatctgggatctggatggaaaattgttgcaagttttgaaggcaagtttccagacagaattaaacagctaccgttggaccgacatttcgatctcaacaacgtcaaaaggattgtcttggaagcagatggttatcaaccatatttgatatctccagagaaagggttgagatccttaataaaaatagtactggaaatggcaaaggagccatcacgactatgtgttgaagaggttcatcgtgtattgttagacatagtcaatgcttccgcaaatgccacaccaggacttgggagatatcctccattcaagcgtgaggttgttgcaatagcatcaaatgcattggagaccttcaaaaacgacgccaaaaagatggtcgttgcgcttgttgatatggaacgtgcttttgttcctccccaacatttcatccgcttagtacaaagaagaatggaaagacagcgtcgggaggatgaattgagaaatcgatcttctaagaaaacacaagaagctgaacagccaacatctaagagggcctcaagtccccaaacagatgctgagcaaggtggtggcagcttaaaatcaatgaaagacaaatctggccagcaagataaagacacaaaagagggatcaaatttgcaagttgctggtcctgctggtgaaattactgcaggttaccttttaaagaaaagcgcaaaaactaatgggtggagcaaaagatggtttgttcttaatgagaagagtggaaagcttgggtacacaaagaaacaagaggagagacattttcgtggtgtcatcactcttgaggagtgcaaccttgaggaggtagaggaggaagagccttctaaaagttcaaaggactcaaaaaaggcaaatggatcagaaaaaatctcaagtcttgtatttaagattactaatagggttgcatacaaaacggtcctcaaagctcacagtgctgttgtgttaaaggctgagagcatggccgacaaggttgagtgggtaaataagatcaaagctgttattcagagcaaagggggttctttcaagggtccaagtactgagggtagttcaatgaggcaaagcaattcggatggcgctttagatactatggcacgtagacctgctgatcctgaagaagaacttagatggatgtctcaagaagttcgtggttatgtcgaggctgttttgaatagtctggcagcaaatgttccaaaggctattgtgctttgtcaagtggagaaagcaaaggaagacatgcttaaccagctatacagctcgataagcgggcaaagcaatgctaagattgaagagctgcttcaagaggaccataatgctaagcgcagaagggagaagtaccaaaaacaatcatctctcctgtcaaaacttactcgtcaactcagtatccatgataacagggcatctgtttcctcttattctaatgacaccactgaagccgccactgcatcatgcacgtgcgtctagagagagcacac

SEQ ID NO: 58841 - DNA, 2765 bp, Zea Mays
ctcctcgcctcctccagtcccaccttctccgctgtatgtgagtctgtccctctcgtgtgtcgcccaaatccatcaccccccacgtctctcccatcccatccccgtgtagatttcaaatccgcgtcagagctcaggtctgggtctcctccttcgccgccagttgcctcctccagtcgagatccgccgtcggggagaccactgaccatggaggccatggaggagctatcggagctcgccgagtcgatgcgccaggcggcgtcactcctcgccgacgacgacccctccgacgacgccgcgccgcgtcgccccaccaccttcctcaacgccgtcgccctcggcaacgtcggcgctggcaagtcggccgtgctgaacagcctcatcggccacccggtcttgccgacgggggagaacggggcgacgcgggcgccgatagtggttgacctgcagagggagccggggctcagcagcaagtccatcgtgctgcagatcgacagcaagtcgcagcaggtttccgcaagtgctctccggcattcactgcaggacagactcagcaggggagcatctggtggatcagggaggggccgtgttgatgagatttacctcaaactgcggaccagtacagctccctcattaaagctgattgatttacctgggatagaccagcgagctgttgatgattccatgatcaatgagtatgctgggcacaatgatgcaatactgctcattgtcatacccgcaatgcaagctgctgatgttgcatcatctcgagctctgaggttggccaaggatatcgatgcagatgggacaagaacagttggtgttataagcaaagttgatcaagcaaatggagatgcaaaaactatagcctgtgttcaggccctactgtcaaacaagggcccaaaaaaccttcctgacattgagtgggttgctctaattggacaatctgttgcaattgcgtcagcacaatcagttgggtctgaaaactcactagaaacagcctggagagctgaagctgaaagcctgaaaaacatcttaactggatctcctcagaataagcttggtagaattgctttggttgacacaattgctaagcaaatccgtaaaagaatgaaagtgcgggttcctaacctattgagtggacttcagggtaagtctcaaatggtgcaagatgaactggcaaggctgggagaatctatggtacaaagtgccgaaggaacccgagcagttgctttggagctgtgccgagaatttgaggacaagtttcttgctcacataacatctggtgagggatctggatggaaaattgttgcaagttttgaaggcaagtttccagacagaattaaacagctaccgttggaccgacatttcgatctcaacaacgtcaaaaggattgtcttggaagcagatggttatcaaccatatttgatatctccagagaaagggttgagatccttaataaaaatagtactggaaatggcaaaggagccatcacgactatgtgttgaagaggttcatcgtgtattgttagacatagtcaatgcttccgcaaatgccacaccaggacttgggagatatcctccattcaagcgtgaggttgttgcaatagcatcaaatgcattggagaccttcaaaaacgacgccaaaaagatggtcgttgcgcttgttgatatggaacgtgcttttgttcctccccaacatttcatccgcttagtacaaagaagaatggaaagacagcgtcgggaggatgaattgagaaatcgatcttctaagaaaacacaagaagctgaacagccaacatctaagagggcctcaagtccccaaacagatgctgagcaaggtggtggcagcttaaaatcaatgaaagacaaatctggccagcaagataaagacacaaaagagggatcaaatttgcaagttgctggtcctgctggtgaaattactgcaggttaccttttaaagaaaagcgcaaaaactaatgggtggagcaaaagatggtttgttcttaatgagaagagtggaaagcttgggtacacaaagaaacaagaggagagacattttcgtggtgtcatcactcttgaggagtgcaaccttgaggaggtagaggaggaagagccttctaaaagttcaaaggactcaaaaaaggcaaatggatcagaaaaaatctcaagtcttgtatttaagattactaatagggttgcatacaaaacggtcctcaaagctcacagtgctgttgtgttaaaggctgagagcatggccgacaaggttgagtgggtaaataagatcaaagctgttattcagagcaaagggggttctttcaagggtccaagtactgagggtagttcaatgaggcaaagcaattcggatggcgctttagatactatggcacgtagacctgctgatcctgaagaagaacttagatggatgtctcaagaagttcgtggttatgtcgaggctgttttgaatagtctggcagcaaatgttccaaaggctattgtgctttgtcaagtggagaaagcaaaggaagacatgcttaaccagctatacagctcgataagcgggcaaagcaatgctaagattgaagagctgcttcaagaggaccataatgctaagcgcagaagggagaagtaccaaaaacaatcatctctcctgtcaaaacttactcgtcaactcagtatccatgataacagggcatctgtttcctcttattctaatgacaccactgaagccgccactgcatcatgcacgtgcgtctagagagagcacac

SEQ ID NO: 58842 - DNA, 3286 bp, Zea Mays
ctcctcgcctcctccagtcccaccttctccgctgtatgtgagtctgtccctctcgtgtgtcgcccaaatccatcaccccccacgtctctcccatcccatccccgtgtagatttcaaatccgcgtcagagctcaggtctgggtctcctccttcgccgccagttgcctcctccagtcgagatccgccgtcggggagaccactgaccatggaggccatggaggagctatcggagctcgccgagtcgatgcgccaggcggcgtcactcctcgccgacgacgacccctccgacgacgccgcgccgcgtcgccccaccaccttcctcaacgccgtcgccctcggcaacgtcggcgctggcaagtcggccgtgctgaacagcctcatcggccacccggtcttgccgacgggggagaacggggcgacgcgggcgccgatagtggttgacctgcagagggagccggggctcagcagcaagtccatcgtgctgcagatcgacagcaagtcgcagcaggtttccgcaagtgctctccggcattcactgcaggacagactcagcaggggagcatctggtggatcagggaggggccgtgttgatgagatttacctcaaactgcggaccagtacagctccctcattaaagctgattgatttacctgggatagaccagcgagctgttgatgattccatgatcaatgagtatgctgggcacaatgatgcaatactgctcattgtcatacccgcaatgcaagctgctgatgttgcatcatctcgagctctgaggttggccaaggatatcgatgcagatgggacaagaacagttggtgttataagcaaagttgatcaagcaaatggagatgcaaaaactatagcctgtgttcaggccctactgtcaaacaagggcccaaaaaaccttcctgacattgagtgggttgctctaattggacaatctgttgcaattgcgtcagcacaatcagttgggtctgaaaactcactagaaacagcctggagagctgaagctgaaagcctgaaaaacatcttaactggatctcctcagaataagcttggtagaattgctttggttgacacaattgctaagcaaatccgtaaaagaatgaaagtgcgggttcctaacctattgagtggacttcagggtaagtctcaaatggtgcaagatgaactggcaaggctgggagaatctatggtacaaagtgccgaaggaacccgagcagttgctttggagctgtgccgagaatttgaggacaagtttcttgctcacataacatctggtgagggatctggatggaaaattgttgcaagttttgaaggcaagtttccagacagaattaaacagctaccgttggaccgacatttcgatctcaacaacgtcaaaagggttcatcgtgtattgttagacatagtcaatgcttccgcaaatgccacaccaggacttgggagatatcctccattcaagcgtgaggttgttgcaatagcatcaaatgcattggagaccttcaaaaacgacgccaaaaagatggtcgttgcgcttgttgatatggaacgtgcttttgttcctccccaacatttcatccgcttagtacaaagaagaatggaaagacagcgtcgggaggatgaattgagaaatcgatcttctaagaaaacacaagaagctgaacagccaacatctaagagggcctcaagtccccaaacagatgctgagcaaggtggtggcagcttaaaatcaatgaaagacaaatctggccagcaagataaagacacaaaagagggatcaaatttgcaagttgctggtcctgctggtgaaattactgcaggttaccttttaaagaaaagcgcaaaaactaatgggtggagcaaaagatggtttgttcttaatgagaagagtggaaagcttgggtacacaaagaaacaagaggagagacattttcgtggtgtcatcactcttgaggagtgcaaccttgaggaggtagaggaggaagagccttctaaaagttcaaaggactcaaaaaaggcaaatggatcagaaaaaatctcaagtcttgtatttaagattactaatagggttgcatacaaaacggtcctcaaagctcacagtgctgttgtgttaaaggctgagagcatggccgacaaggttgagtgggtaaataagatcaaagctgttattcagagcaaagggggttctttcaagggtccaagtactgagggtagttcaatgaggcaaagcaattcggatggcgctttagatactatggcacgtagacctgctgatcctgaagaagaacttagatggatgtctcaagaagttcgtggttatgtcgaggctgttttgaatagtctggcagcaaatgttccaaaggctattgtgctttgtcaagtggagaaagcaaaggaagacatgcttaaccagctatacagctcgataagcgggcaaagcaatgctaagattgaagagctgcttcaagaggaccataatgctaagcgcagaagggagaagtaccaaaaacaatcatctctcctgtcaaaacttactcgtcaactcagtatccatgataacagggcatctgtttcctcttattctaatgacaccactgaagccgagagccctcgaacaccaacccgctcaggtgaggactggaggtcagcttttgattccgcttcaaatggtcctgttgctggaagcacaaacagtcaatcaaggtccaaaagtgctgacggtcgcagtcggcgctatgagaacggggacgtgagctcaggtgccaactctggcagccggcgcacaccaaaccggttgccaccagcaccgccaaaatactaatcgtgctgattggtattcatgaacatttatgtattcttgcctggcacatgcgcccagatcggctgctagagattgtggtgtagtggatggagtatcgggtgattgcgtgaacattgtgttcgcaggtcgctgcgtctcagatgagctgtttatagaaaaatatacaggtaaccgtggtttctactgtttattatctctgtatatttatgacgtccctgccttttgattttgttggggcattcgatctgcttccgcacttggtcgatctaggacaacggctgtcagactaagatttatcttgtcctgccccgcatattgttcgttgccactgacgattcttatttagtcgtggtttatctctactacttattaaggtagtaagggtagtctgtcattttctgttctgtcttttttcattttctgttttgccctcatccctgttatggcttaaaaaataaaa

SEQ ID NO: 58843 - DNA, 3357 bp, Zea Mays
cccaccttctccgctgtatgtgagtctgtccctctcgtgtgtcgcccaaatccatcaccccccacgtctctcccatcccatccccgtgtagatttcaaatccgcgtcagagctcaggtctgggtctcctccttcgccgccagttgcctcctccagtcgagatccgccgtcggggagaccactgaccatggaggccatggaggagctatcggagctcgccgagtcgatgcgccaggcggcgtcactcctcgccgacgacgacccctccgacgacgccgcgccgcgtcgccccaccaccttcctcaacgccgtcgccctcggcaacgtcggcgctggcaagtcggccgtgctgaacagcctcatcggccacccggtcttgccgacgggggagaacggggcgacgcgggcgccgatagtggttgacctgcagagggagccggggctcagcagcaagtccatcgtgctgcagatcgacagcaagtcgcagcaggtttccgcaagtgctctccggcattcactgcaggacagactcagcaggggagcatctggtggatcagggaggggccgtgttgatgagatttacctcaaactgcggaccagtacagctccctcattaaagctgattgatttacctgggatagaccagcgagctgttgatgattccatgatcaatgagtatgctgggcacaatgatgcaatactgctcattgtcatacccgcaatgcaagctgctgatgttgcatcatctcgagctctgagggacaagaacagttggtgttataagcaaagttgatcaagcaaatggagatgcaaaaactatagcctgtgttcaggccctactgtcaaacaagggcccaaaaaaccttcctgacattgagtgggttgctctaattggacaatctgttgcaattgcgtcagcacaatcagttgggtctgaaaactcactagaaacagcctggagagctgaagctgaaagcctgaaaaacatcttaactggatctcctcagaataagcttggtagaattgctttggttgacacaattgctaagcaaatccgtaaaagaatgaaagtgcgggttcctaacctattgagtggacttcagggtaagtctcaaatggtgcaagatgaactggcaaggctgggagaatctatggtacaaagtgccgaaggaacccgagcagttgctttggagctgtgccgagaatttgaggacaagtttcttgctcacataacatctgggatctggatggaaaattgttgcaagttttgaaggcaagtttccagacagaattaaacagctaccgttggaccgacatttcgatctcaacaacgtcaaaaggattgtcttggaagcagatggttatcaaccatatttgatatctccagagaaagggttgagatccttaataaaaatagtactggaaatggcaaaggagccatcacgactatgtgttgaagaggttcatcgtgtattgttagacatagtcaatgcttccgcaaatgccacaccaggacttgggagatatcctccattcaagcgtgaggttgttgcaatagcatcaaatgcattggagaccttcaaaaacgacgccaaaaagatggtcgttgcgcttgttgatatggaacgtgcttttgttcctccccaacatttcatccgcttagtacaaagaagaatggaaagacagcgtcgggaggatgaattgagaaatcgatcttctaagaaaacacaagaagctgaacagccaacatctaagagggcctcaagtccccaaacagatgctgagcaaggtggtggcagcttaaaatcaatgaaagacaaatctggccagcaagataaagacacaaaagagggatcaaatttgcaagttgctggtcctgctggtgaaattactgcaggttaccttttaaagaaaagcgcaaaaactaatgggtggagcaaaagatggtttgttcttaatgagaagagtggaaagcttgggtacacaaagaaacaagaggagagacattttcgtggtgtcatcactcttgaggagtgcaaccttgaggaggtagaggaggaagagccttctaaaagttcaaaggactcaaaaaaggcaaatggatcagaaaaaatctcaagtcttgtatttaagattactaatagggttgcatacaaaacggtcctcaaagctcacagtgctgttgtgttaaaggctgagagcatggccgacaaggttgagtgggtaaataagatcaaagctgttattcagagcaaagggggttctttcaagggtccaagtactgagggtagttcaatgaggcaaagcaattcggatggcgctttagatactatggcacgtagacctgctgatcctgaagaagaacttagatggatgtctcaagaagttcgtggttatgtcgaggctgttttgaatagtctggcagcaaatgttccaaaggctattgtgctttgtcaagtggagaaagcaaaggaagacatgcttaaccagctatacagctcgataagcgggcaaagcaatgctaagattgaagagctgcttcaagaggaccataatgctaagcgcagaagggagaagtaccaaaaacaatcatctctcctgtcaaaacttactcgtcaactcagtatccatgataacagggcatctgtttcctcttattctaatgacaccactgaagccgagagccctcgaacaccaacccgctcaggtgaggactggaggtcagcttttgattccgcttcaaatggtcctgttgctggaagcacaaacagtcaatcaaggtccaaaagtgctgacggtcgcagtcggcgctatgagaacggggacgtgagctcaggtgccaactctggcagccggcgcacaccaaaccggttgccaccagcaccgccaaaatactaatcgtgctgattggtattcatgaacatttatgtattcttgcctggcacatgcgcccagatcggctgctagagattgtggtgtagtggatggagtatcgggtgattgcgtgaacattgtgttcgcaggtcgctgcgtctcagatgagctgtttatagaaaaatatacaggtaaccgtggtttctactgtttattatctctgtatatttatgacgtccctgccttttgattttgttggggcattcgatctgcttccgcacttggtcgatctaggacaacggctgtcagactaagatttatcttgtcctgccccgcatattgttcgttgccactgacgattcttatttagtcgtggtttatctctactacttattaaggtagtaagggtagtctgtcattttctgttctgtcttttttcattttctgttttgccctcatccctgttatggcttaaaaaataaaa

SEQ ID NO: 58844 - DNA, 1817 bp, Zea Mays
ctccctcattaaagctgattgatttacctgggatagaccagcgagctgttgatgattccatgatcaatgagtatgctgggcacaatgatgcaatactgctcattgtcatacccgcaatgcaagctgctgatgttgcatcatctcgagctctgaggttggccaaggatatcgatgcagatgggacaagaacagttggtgttataagcaaagttgatcaagcaaatggagatgcaaaaactatagcctgtgttcaggccctactgtcaaacaagggcccaaaaaaccttcctgacattgagtgggttgctctaattggacaatctgttgcaattgcgtcagcacaatcagttgggtctgaaaactcactagaaacagcctggagagctgaagctgaaagcctgaaaaacatcttaactggatctcctcagaataagcttggtagaattgctttggttgacacaattgctaagcaaatccgtaaaagaatgaaagtgcgggttcctaacctattgagtggacttcagggtaagtctcaaatggtgcaagatgaactggcaaggctgggagaatctatggtacaaagtgccgaaggaacccgagcagttgctttggagctgtgccgagaatttgaggacaagtttcttgctcacataacatctggtgagggatctggatggaaaattgttgcaagttttgaaggcaagtttccagacagaattaaacagctaccgttggaccgacatttcgatctcaacaacgtcaaaaggattgtcttggaagcagatggttatcaaccatatttgatatctccagagaaagggttgagatccttaataaaaatagtactggaaatggcaaaggagccatcacgactatgtgttgaagaggttcatcgtgtattgttagacatagtcaatgcttccgcaaatgccacaccaggacttgggagatatcctccattcaagcgtgaggttgttgcaatagcatcaaatgcattggagaccttcaaaaacgacgccaaaaagatggtcgttgcgcttgttgatatggaacgtgcttttgttcctccccaacatttcatccgcttagtacaaagaagaatggaaagacagcgtcgggaggatgaattgagaaatcgatcttctaagaaaacacaagaagctgaacagccaacatctaagagggcctcaagtccccaaacagatgctgagcaaggtggtggcagcttaaaatcaatgaaagacaaatctggccagcaagataaagacacaaaagagggatcaaatttgcaagttgctggtcctgctggtgaaattactgcaggttaccttttaaagaaaagcgcaaaaactaatgggtggagcaaaagatggtttgttcttaatgagaagagtggaaagcttgggtacacaaagaaacaagaggagagacattttcgtggtgtcatcactcttgaggagtgcaaccttgaggaggtagaggaggaagagccttctaaaagttcaaaggactcaaaaaaggcaaatggatcagaaaaaatctcaagtcttgtatttaagattactaatagggttgcatacaaaacggtcctcaaagctcacagtgctgttgtgttaaaggctgagagcatggccgacaaggttgagtgggtaaataagatcaaagctgttattcagagcaaagggggttctttcaagggtccaagtactgagggtagttcaatgaggcaaagcaattcggatggcgctttagtccccttgtatattttggatgtgccaatataaatatttttccattaaaatacacaaactaacatc

SEQ ID NO: 58845 - DNA, 1945 bp, Zea Mays
gtccatttaggttttggtctatcaagtgttttctatgtgctagtatatgttcatcgtgtattgttagacatagtcaatgcttccgcaaatgccacaccaggacttgggagatatcctccattcaagcgtgaggttgttgcaatagcatcaaatgcattggagaccttcaaaaacgacgccaaaaagatggtcgttgcgcttgttgatatggaacgtgcttttgttcctccccaacatttcatccgcttagtacaaagaagaatggaaagacagcgtcgggaggatgaattgagaaatcgatcttctaagaaaacacaagaagctgaacagccaacatctaagagggcctcaagtccccaaacagatgctgagcaaggtggtggcagcttaaaatcaatgaaagacaaatctggccagcaagataaagacacaaaagagggatcaaatttgcaagttgctggtcctgctggtgaaattactgcaggttaccttttaaagaaaagcgcaaaaactaatgggtggagcaaaagatggtttgttcttaatgagaagagtggaaagcttgggtacacaaagaaacaagaggagagacattttcgtggtgtcatcactcttgaggagtgcaaccttgaggaggtagaggaggaagagccttctaaaagttcaaaggactcaaaaaaggcaaatggatcagaaaaaatctcaagtcttgtatttaagattactaatagggttgcatacaaaacggtcctcaaagctcacagtgctgttgtgttaaaggctgagagcatggccgacaaggttgagtgggtaaataagatcaaagctgttattcagagcaaagggggttctttcaagggtccaagtactgagggtagttcaatgaggcaaagcaattcggatggcgctttagatactatggcacgtagacctgctgatcctgaagaagaacttagatggatgtctcaagaagttcgtggttatgtcgaggctgttttgaatagtctggcagcaaatgttccaaaggctattgtgctttgtcaagtggagaaagcaaaggaagacatgcttaaccagctatacagctcgataagcgggcaaagcaatgctaagattgaagagctgcttcaagaggaccataatgctaagcgcagaagggagaagtaccaaaaacaatcatctctcctgtcaaaacttactcgtcaactcagtatccatgataacagggcatctgtttcctcttattctaatgacaccactgaagccgagagccctcgaacaccaacccgctcaggtgaggactggaggtcagcttttgattccgcttcaaatggtcctgttgctggaagcacaaacagtcaatcaaggtccaaaagtgctgacggtcgcagtcggcgctatgagaacggggacgtgagctcaggtgccaactctggcagccggcgcacaccaaaccggttgccaccagcaccgccaaaatactaatcgtgctgattggtattcatgaacatttatgtattcttgcctggcacatgcgcccagatcggctgctagagattgtggtgtagtggatggagtatcgggtgattgcgtgaacattgtgttcgcaggtcgctgcgtctcagatgagctgtttatagaaaaatatacaggtaaccgtggtttctactgtttattatctctgtatatttatgacgtccctgccttttgattttgttggggcattcgatctgcttccgcacttggtcgatctaggacaacggctgtcagactaagatttatcttgtcctgccccgcatattgttcgttgccactgacgattcttatttagtcgtggtttatctctactacttattaaggtagtaagggtagtctgtcattttctgttctgtcttttttcattttctgttttgccctcatccctgttatggcttaaaaaataaaa

SEQ ID NO: 58846 - DNA, 1487 bp, Zea Mays
cttcaaccactttgcatgtgttcatggttaccttttaaagaaaagcgcaaaaactaatgggtggagcaaaagatggtttgttcttaatgagaagagtggaaagcttgggtacacaaagaaacaagaggagagacattttcgtggtgtcatcactcttgaggagtgcaaccttgaggaggtagaggaggaagagccttctaaaagttcaaaggactcaaaaaaggcaaatggatcagaaaaaatctcaagtcttgtatttaagattactaatagggttgcatacaaaacggtcctcaaagctcacagtgctgttgtgttaaaggctgagagcatggccgacaaggttgagtgggtaaataagatcaaagctgttattcagagcaaagggggttctttcaagggtccaagtactgagggtagttcaatgaggcaaagcaattcggatggcgctttagatactatggcacgtagacctgctgatcctgaagaagaacttagatggatgtctcaagaagttcgtggttatgtcgaggctgttttgaatagtctggcagcaaatgttccaaaggctattgtgctttgtcaagtggagaaagcaaaggaagacatgcttaaccagctatacagctcgataagcgggcaaagcaatgctaagattgaagagctgcttcaagaggaccataatgctaagcgcagaagggagaagtaccaaaaacaatcatctctcctgtcaaaacttactcgtcaactcagtatccatgataacagggcatctgtttcctcttattctaatgacaccactgaagccgagagccctcgaacaccaacccgctcaggtgaggactggaggtcagcttttgattccgcttcaaatggtcctgttgctggaagcacaaacagtcaatcaaggtccaaaagtgctgacggtcgcagtcggcgctatgagaacggggacgtgagctcaggtgccaactctggcagccggcgcacaccaaaccggttgccaccagcaccgccaaaatactaatcgtgctgattggtattcatgaacatttatgtattcttgcctggcacatgcgcccagatcggctgctagagattgtggtgtagtggatggagtatcgggtgattgcgtgaacattgtgttcgcaggtcgctgcgtctcagatgagctgtttatagaaaaatatacaggtaaccgtggtttctactgtttattatctctgtatatttatgacgtccctgccttttgattttgttggggcattcgatctgcttccgcacttggtcgatctaggacaacggctgtcagactaagatttatcttgtcctgccccgcatattgttcgttgccactgacgattcttatttagtcgtggtttatctctactacttattaaggtagtaagggtagtctgtcattttctgttctgtcttttttcattttctgttttgccctcatccctgttatggcttaaaaaataaaa

SEQ ID NO: 58847 - DNA, 1432 bp, Zea Mays
aatcagttcttcagaacatttcttttgaactcttgatttgtttgatatcttgggtacacaaagaaacaagaggagagacattttcgtggtgtcatcactcttgaggagtgcaaccttgaggaggtagaggaggaagagccttctaaaagttcaaaggactcaaaaaaggcaaatggatcagaaaaaatctcaagtcttgtatttaagattactaatagggttgcatacaaaacggtcctcaaagctcacagtgctgttgtgttaaaggctgagagcatggccgacaaggttgagtgggtaaataagatcaaagctgttattcagagcaaagggggttctttcaagggtccaagtactgagggtagttcaatgaggcaaagcaattcggatggcgctttagatactatggcacgtagacctgctgatcctgaagaagaacttagatggatgtctcaagaagttcgtggttatgtcgaggctgttttgaatagtctggcagcaaatgttccaaaggctattgtgctttgtcaagtggagaaagcaaaggaagacatgcttaaccagctatacagctcgataagcgggcaaagcaatgctaagattgaagagctgcttcaagaggaccataatgctaagcgcagaagggagaagtaccaaaaacaatcatctctcctgtcaaaacttactcgtcaactcagtatccatgataacagggcatctgtttcctcttattctaatgacaccactgaagccgagagccctcgaacaccaacccgctcaggtgaggactggaggtcagcttttgattccgcttcaaatggtcctgttgctggaagcacaaacagtcaatcaaggtccaaaagtgctgacggtcgcagtcggcgctatgagaacggggacgtgagctcaggtgccaactctggcagccggcgcacaccaaaccggttgccaccagcaccgccaaaatactaatcgtgctgattggtattcatgaacatttatgtattcttgcctggcacatgcgcccagatcggctgctagagattgtggtgtagtggatggagtatcgggtgattgcgtgaacattgtgttcgcaggtcgctgcgtctcagatgagctgtttatagaaaaatatacaggtaaccgtggtttctactgtttattatctctgtatatttatgacgtccctgccttttgattttgttggggcattcgatctgcttccgcacttggtcgatctaggacaacggctgtcagactaagatttatcttgtcctgccccgcatattgttcgttgccactgacgattcttatttagtcgtggtttatctctactacttattaaggtagtaagggtagtctgtcattttctgttctgtcttttttcattttctgttttgccctcatccctgttatggcttaaaaaataaaa

SEQ ID NO: 58848 - DNA, 2439 bp, Zea Mays
cgagccgattcgttccaacttccaagggttttagcggcagcggcagccggagatgggggagcgggcgaaggaatggctcctcgcagcaggcgccggcgccgccgtcggcgcgctctctgccgccgctgtcatcgatcttctctcgagatccaagcggagagagaggtacgcgcgggacctgctggagtccaatggaatgacgactgggaacactcggtccagcaagcacctgggctctcttggtagctcggctcttctctctgatgaagtggtctctgaacagcttacaaggaatatacaattttttggcatggactctcagaagaaagtgactgaatcctatgttgtggttattggtcttggaggggttggcagtcatgcagcatcaatgctcctgagatctggtgttggcaggttgcttcttgtggattttgatcaggtaagcattaacaaggcactcatgatatgttgaaaggtatcactctcatcactaaatcggcatgctgtggcaaccagagatgacgttggaacttcaaaagcgttgtgcctcaagaagcatttttcaatgatatacccagagtgccaaatagatgcaaaagtgcaattgtatgatgcatcgtctgaggaggaaattctttctggacagcctgactttgttcttgattgcatagataacattgataccaaggtgtcactccttgcagcttgcgtgcgcagaggtttgaaggtactttctgcaatgggggctggagctcgagctgatcccaccagaattcgtgtcgcagatttgagagaatcaagcaatgaccccctctctcgatcggtgaggtacaggctcaagaaagaacatggaattgagggtggaataccagtagtcttttcattggaaaagccaaaggcaaagcttcttccttttcaagcttcaaaagaagaggaaactccatcagattaccagattgtgccaggattcagggttcgcattataccagtattgggaaccatccctgcaatatttggtcaagttatggcctcctatgtggtcactcagcttgctggattagattttcaaactgaaccagttgttaacctggatttggatcattaccgtatacttcatcagcgtcttattgagcatgaggaactgatgtatggcacagccgagcaagttctggtagatgctgaagaggtaatgtacattgtcaaagaattgtggcgtggtcgaagtgctagagaccaaagccaggacactggccggaagatgtggagatctgtgaacgaactaatgcttgttcggtgggacaaatcaaaggctgctggcatctcaaacttaatacttgtcaagttcagtgaggctgacgcccatgaatccaccacactcgaccgaataaaagaacaagaacctgaattctactctatggtttcactttcgacgcgtgtcgaactagactgccacggacgcgaagatctcaaccacttgccacagcgcacatggtatggagcgagcggacccagagccacctctccagcttcgccccaggcccagcgtgctcgctgcctcgctctgccggagcctccctccaccatggtccacgtggccacagcaagaagaagaatccccatgcggcggcggtggcgaccgcattggaggaagcagggatgtgcggcgcgaggccaaggccatggcacgcctacgagatggcctagattctcgtgggacccacgatgccgcgcgcgcagtagcatcgcaccccgccacaggaaacaggatgctgcagggagggcgaggacgccgatgacaatgagggcaacacggaggagtggaggacattgtctagcgcctccgactaagctagactgcaacttttaaaatgtatgtaaatagttaatttagcatctcacttccagcaaagatgatactcacacgtagtttcatgttataatgatttacgtgttccagtttcttttatatcttccaagttgggttgatcaaagcttattctgaaaccagattacccaaaaaaatgtttgtatgaaattaagattttgtttcgtattcctcttggaaactaatgtttttacaatgtttgtccagcggatataaaattaagtttttgtcatttttgtatgatgccaaggttatagagagagtagtgtctgcaagatttgcagaaatagaaaacaaagagtggatatgataatttggtgatccaagtcatgcctaaatgtttggttgttcttattatcttctagaaaagatatgcatcaacttgcatatatactttgaactactcatgaccaattagtgaccatatacttattatattatggagggtggatcttggtatgtaatcacattggatattttcttttaattacatgcttgtatggcaccctttgtggctattgcattgccatatgtacaaaaatgctgaaaagtat

SEQ ID NO: 58849 - DNA, 2758 bp, Zea Mays
cgagccgattcgttccaacttccaagggttttagcggcagcggcagccggagatgggggagcgggcgaaggaatggctcctcgcagcaggcgccggcgccgccgtcggcgcgctctctgccgccgctgtcatcgatcttctctcgagatccaagcggagagagaggtacgcgcgggacctgctggagtccaatggaatgacgactgggaacactcggtccagcaagcacctgggctctcttggtagctcggctcttctctctgatgaagtggtctctgaacagcttacaaggaatatacaattttttggcatggactctcagaagaaagtgactgaatcctatgttgtggttattggtcttggaggggttggcagtcatgcagcatcaatgctcctgagatctggtgttggcaggttgcttcttgtggattttgatcaggtaagcattaacaaggcactcatgatatgttgaaaggtatcactctcatcactaaatcggcatgctgtggcaaccagagatgacgttggaacttcaaaagcgttgtgcctcaagaagcatttttcaatgatatacccagagtgccaaatagatgcaaaagtgcaattgtatgatgcatcgtctgaggaggaaattctttctggacagcctgactttgttcttgattgcatagataacattgataccaaggtgtcactccttgcagcttgcgtgcgcagaggtttgaaggtactttctgcaatgggggctggagctcgagctgatcccaccagaattcgtgtcgcagatttgagagaatcaagcaatgaccccctctctcgatcggtgaggtacaggctcaagaaagaacatggaattgagggtggaataccagtagtcttttcattggaaaagccaaaggcaaagcttcttccttttcaagcttcaaaagaagaggaaactccatcagattaccagattgtgccaggattcagggttcgcattataccagtattgggaaccatccctgcaatatttggtcaagttatggcctcctatgtggtcactcagcttgctggattagattttcaaactgaaccagttgttaacctggatttggatcattaccgtatacttcatcagcgtcttattgagcatgaggaactgatgtatggcacagccgagcaagttctggtagatgctgaagaggtaatgtacattgtcaaagaattgtggcgtggtcgaagtgctagagaccaaagccaggacactggccggaagatgtggagatctgtgaacgaactaatgcttgttcggtgggacaaatcaaaggctgctggcatctcaaacttaatacttgtcaagttcagtgaggctgacgcccatgaatccaccacactcgaccgaataaaagaacaagaacctgaattctactctatggtttcactttcgacgcgtgtcgaactagactgccacggacgcgaagatctcaaccacttgccacagcgcacatggtatggagcgagcggacccagagccacctctccagcttcgccccaggcccagcgtgctcgctgcctcgctctgccggagcctccctccaccatggtccacgtggccacagcaagaagaagaatccccatgcggcggcggtggcgaccgcattggaggaagcagggatgtgcggcgcgaggccaaggccatggcacgcctacgagatggcctagattctcgtgggacccacgatgccgcgcgcgcagtagcatcgcaccccgccacaggaaacaggatgctgcagggaggcgcccgaagcgccgccacggggacgaggacaacccatccccgaccccgacggcgttgtgctggcagacaccgccatcgtgggcgaggacgaccgctgaggtggaggcggcggaggagaagaggctgaggatcagcccgaggccggactcgtctgccgctgcggcggcggagcgcgcgccaggcgaaggcggccgagatggaggcagccgccagcaaccaccgccaagagctggcgtctttggagcccaagcctcgtggcaccacaccaactactttcccatcaccgatgacccgctcgagcccaccgccgccgaggagggcgaggacgccgatgacaatgagggcaacacggaggagtggaggacattgtctagcgcctccgactaagctagactgcaacttttaaaatgtatgtaaatagttaatttagcatctcacttccagcaaagatgatactcacacgtagtttcatgttataatgatttacgtgttccagtttcttttatatcttccaagttgggttgatcaaagcttattctgaaaccagattacccaaaaaaatgtttgtatgaaattaagattttgtttcgtattcctcttggaaactaatgtttttacaatgtttgtccagcggatataaaattaagtttttgtcatttttgtatgatgccaaggttatagagagagtagtgtctgcaagatttgcagaaatagaaaacaaagagtggatatgataatttggtgatccaagtcatgcctaaatgtttggttgttcttattatcttctagaaaagatatgcatcaacttgcatatatactttgaactactcatgaccaattagtgaccatatacttattatattatggagggtggatcttggtatgtaatcacattggatattttcttttaattacatgcttgtatggcaccctttgtggctattgcattgccatatgtacaaaaatgctgaaaagtat

SEQ ID NO: 58850 - DNA, 4360 bp, Zea Mays
cgagccgattcgttccaacttccaagggttttagcggcagcggcagccggagatgggggagcgggcgaaggaatggctcctcgcagcaggcgccggcgccgccgtcggcgcgctctctgccgccgctgtcatcgatcttctctcgagatccaagcggagagagaggtacgcgcgggacctgctggagtccaatggaatgacgactgggaacactcggtccagcaagcacctgggctctcttggtagctcggctcttctctctgatgaagtggtctctgaacagcttacaagtcatgcagcatcaatgctcctgagatctggtgttggcaggttgcttcttgtggattttgatcaggtaagcattaacaaggcactcatgatatgttgaaaggtatcactctcatcactaaatcggcatgctgtggcaaccagagatgacgttggaacttcaaaagcgttgtgcctcaagaagcatttttcaatgatatacccagagtgccaaatagatgcaaaagtgcaattgtatgatgcatcgtctgaggaggaaattctttctggacagcctgactttgttcttgattgcatagataacattgataccaagcttgcgtgcgcagaggtttgaaggtactttctgcaatgggggctggagctcgagctgatcccaccagaattcgtgtcgcagatttgagagaatcaagcaatgaccccctctctcgatcggtgaggtacaggctcaagaaagaacatggaattgagggtggaataccagtagtcttttcattggaaaagccaaaggcaaagcttcttccttttcaagcttcaaaagaagaggaaactccatcagattaccagattgtgccaggattcagggttcgcattataccagtattgggaaccatccctgcaatatttggtcaagttatggcctcctatgtggtcactcagcttgctggattagattttcaaactgaaccagttgttaacctggatttggatcattaccgtatacttcatcagcgtcttattgagcatgaggaactgatgtatggcacagccgagcaagttctgatgctgaagaggtaatgtacattgtcaaagaattgtggcgtggtcgaagtgctagagaccaaagccaggacactggccggaagatgtggagatctgtgaacgaactaatgcttgttcggtgggacaaatcaaaggctgctggcatctcaaacttaatacttgtcaagttcagtgaggctgacgcccatgaatccaccacactcgaccgaataaaagaacaagaacctgaattctactctatggtttcacgtgtcctgaaacgagctgagatggagtttgccttatgacttgatgagtagcgagggttgatcctgttggactcccacagttgctattcagtgatggccttggaacagcattcagtttggcgggaatcacacttggggtacctgattggtgtgctatggtgaaaatgtgatgtgcaaagtttcttcttgaggccgctgaaacatcagctctgtgttatcactgagttgtgcacttgtggccatctatgtatgttttttttttctgcacgccaaatctgaaattttgtttctagtctgattgtctgatgtagttttgatgtgatttatgcttgctgtttaccacgaacatagccacttgtagacttaccgatcaccgatgataatgatatgacacgggtttgcgctcccggtccccagtttcgacgcgtgtcgaactagactgccacggacgcgaagatctcaaccacttgccacagcgcacatggtatggagcgagcggacccagagccacctctccagcttcgccccaggcccagcgtgctcgctgcctcgctctgccggagcctccctccaccatggtccacgtggccacagcaagaagaagaatccccatgcggcggcggtggcgaccgcattggaggaagcagggatgtgcggcgcgaggccaaggccatggcacgcctacgagatggcctagattctcgtgggacccacgatgccgcgcgcgcagtagcatcgcaccccgccacaggaaacaggatgctgcagggaggcgcccgaagcgccgccacggggacgaggacaacccatccccgaccccgacggcgttgtgctggcagacaccgccatcgtgggcgaggacgaccgctgaggtggaggcggcggaggagaagaggctgaggatcagcccgaggccggactcgtctgccgctgcggcggcggagcgcgcgccaggcgaaggcggccgagatggaggcagccgccagcaaccaccgccaagagctggcgtctttggagcccaagcctcgtggcaccacaccaactactttcccatcaccgatgacccgctcgagcccaccgccgccgaggagggcgaggacgccgatgacaatgagggcaacacggaggagtggaggacattgtctagcgcctccgactaagctagactgcaacttttaaaatgtatgtaaatagttaatttagcatctcacttccagcaaagatgatactcacacgtagtttcatgttataatgatttacgtgttccagtttcttttatatcttccaagttgggttgatcaaagcttattctgaaaccagattacccaaaaaaatgtttgtatgaaattaagattttgtttcgtattcctcttggaaactaatgtttttacaatgtttgtccagcggatataaaattaagtttttgtcatttttgtatgatgccaaggttatagagagagtagtgtctgcaagatttgcagaaatagaaaacaaagagtggatatgataatttggtgatccaagtcatgcctaaatgtttggttgttcttattatcttctagaaaagatatgcatcaacttgcatatatactttgaactactcatgaccaattagtgaccatatacttattatattatggagggtggatcttggtatgtaatcacattggatattttcttttaattacatgcttgtatggcaccctttgtggctattgcattgccatatgtacaaaaatgctgaaaagtatatcacagaatttaaacgtcatgcacttagtttgccaaaaggatctgttttgtttgtgatttggttcagtgccaagtgccaaatagaggtccattggataagttctgccagtcaactatataaggtaacctcttctttgtctggtgaggagaaagaagatatgtgagagaatgaagcttcttcaagatcttgttcctagatgcagtaagatcactggcaagacagtcatcagtcatgctcgatgagattatcaaatatgtgcaagtcattgcaacgacaagttgagtccttgtcaatggaaggtcattccgattgtgatgtggttgctgctgtcaaatgaataataagtttggcatgggagaaaagaaatcatgctgctcaccatctaagatcaaagatagttcaggtggagctgtgcttcgttatgctttgcacctgcgatttctttgcccctccaagaaatcatcaaaaccaatgcttcggtgcaaatctgagccaacatcgtcaccatatagtagcattgcagtactcgaggaagagcgaaggttctatctctacaatgatcttaggagttgtatttcctcgttcctcgaaggcactcatatgcagatgaaggccaggtacacagaacttccaatgttgttgaagtttttagccttggcagcactgcctttttcatttctacattccatcatcagtcagaacagaagtcgtgtcagtttacatttagttttttttttggccaaaatgcacatgcttaatacaatattctgtttttttttttacaaaatgtgcatgcctaatatgatattcttttacttgctagttgacgttagaccatctttttatgttccgtagaatggtttcgaatacttagttagattgctctaatagcctatccgtgtcaacgagactgttcctcgcttatttcttgttctgttagatctgtagaatttagtgtggcatgctccaactttgctgcagctgagtggagcatgactttagtgtggcatgctccaactttgttgcagctgagagtggagcatgacttccctgccgatcccaagtacttcgacatatgctcccattcatatgagcagcaaatgcagaattgacgaagagagctgcaggaatgggatacctgaattgtctgatgagatcattgaaagatatgaaaacatgttggcaaaggaaacgtgtacaagtggctccatatgctcatggataccaaaaagatttctcaagctgacgagaagaccgaattttttgtattttagcccttaaaccgaag

SEQ ID NO: 58851 - DNA, 1505 bp, Zea Mays
cgcaaggttcttacaaatccttataagggtgttggtgcccctatgcaaagaaaaacccacatgagggtcaagcacccagtcagataactccatagataactacgtgtcttctccatgcgcaagtggtgctccacttccgacctctcttggatgcatcctcgtcgtctcaattatcaagcttctagctaaaacactgatggtctcattctctccgatatacagtggcagtcacaacataaacatagttagtgtgatctcgtaagactcttgtcccactcaatataattacaatgacacgtgcaagcatcaagagctttgggatgtcaattcctcaattctctcggtagggataaacctagaacaagtgatatagttgcggtctaactaacctaatttattcataaagcacctactaatcaccgagtcattttattaagcactcaagtgtttaagagctctaagacggagtctcaactcacatccttatctcccagacttagaaatggcagattgtgatggtattaatagctccaacactcaaaagaggcattgaaaagtcacaaacttttttgtgcagcaccagacatgtctagtgcgccaccggtgtgtcatctgactagtccgatgccttccacatcagctagccattgtaagctagccgataccacccattaagcctctaggtaaccagcgtatcactgatgatacatcagacatgttcaatgccttaaacctatctaagtgtcgcatctgatgtggagtcgggtgccctttaactctcagggtcgctctatagtgctctctacacgccctgtccgatgcctcatgttcgatgtacactctggtgtcctgtgcactcagtcttcagcaaaatatttagcccaagcaacacatatgttcgacgtgacatctagcgtgccatcgaagacatctggtagctttgtgcaacctgttttctttgtgccttcgtgtttttttgcttgggcttattttgtcatgtaccttatactcttgcatgatcttaataagtcttctaatgtctttatttgaggtgttgatttccttgatcaccttgttgcatttgtccacactgcatctttgaactatgaacataaacacaagaaaacatattaatctagatggttatgttgaccatcaaaccctaaaagttttaattaaataggtcaaggtccattttccttactgtcctcatcaagaacacaaggttgacgttatagaaatcacaaataaaatttaatgaatattgaagcaagcatttattactttatttcccttactaaatataggagaggaaactaatttgcagtcttacttgtcaactcttcacattgatacttcattgtcatcggtgcaatgtcttacaatcctactgcatattggaaccacagatgaaaaatatgctgcaacaaaaccatgagcacgaaaaaaatatatttaaaacttcctctacgtgccatacttccaatgagaaaactatgttctag

SEQ ID NO: 58852 - DNA, 163 bp, Zea Mays
tgtgggtatgtagagtttgccatttagttaacaaataaccagctgacatgaattcaacatctgggaaccaatatataaaaagtaccaaatctacccagcaaactcaaaaaaatttaaagctcagatggttttctatattgttgaattctatgcagcaattgac

SEQ ID NO: 58853 - DNA, 421 bp, Zea Mays
ctccctatcctcccctcccctcatcagggcactgcctcgcccccgatcccctatgccaccacctctggattttgaatcgatccatcccttccaccccctctcttttggaagatccaataatgagccccttgcgctatcagatcttcctgccctcgatcttctctctaacggctgcacggatcgggcagatcatgcgctaggattcatgtccatcgtatggtagacttggggtgagctctgagcggaatgatcaatggttggtgaaggaagcgggtgcggaggaagatggggctcacattcggaaagcttttcagcctctcttcgctaaggagattccgattttttggtgcccacacacatgttgtacagtggcttgttcattctgttgcactatcttattcttacggttttggaatgtaat

SEQ ID NO: 58854 - DNA, 405 bp, Zea Mays
atcctcccctcccctcatcagggcactgcctcgcccccgatcccctatgccaccacctctggattttgaatcgatccatcccttccaccccctctcttttggaagatccaataatgagccccttgcgctatcagatcttcctgccctcgatcttctctctaacggctgcacggatcgggcagatcatgcgctaggattcatgtccatcgtatggtagacttggggtgagctctgagcggaatgatcaatggttggtgaaggaagcgggtgcggaggaagatggggctcacattcggaaagcttttcagcctctcttcgctaaggagattccgattttttggtgcccacacacatgttgtacagtggcttgttcattctggtacacgcccccccattcttcgcctt

SEQ ID NO: 58855 - DNA, 1234 bp, Zea Mays
ctatggcctcgccgcgggggaccctacaccgtgctccccatcgcctccgtcctctccgtccaccctttccccaatctggaccgcgctgcctgggcctaggcgcaccaccccgggtagagatcttgtgggcgtcgctgctcctcgccaccaccgggacgttcttcctggctagcgctccaatttgtgcctgcttgggacgacgagatgctctaatttctgctttctgatctttttccagattgaaggatttacctgaagggaattatggatcggattgataggtagttgtggaatttcttgaggtagcagtcagctgcatcgtcttcctcgaaggcttatattctcctcatgagagtgctcttcatttgagttggttcagtcaagaattttttgtgccatcaaagaagtagctcatcatggcttgcattagggaacctgcttccattttgcttttttatgaaggatttgagaattgtgcaacagcagtttcagggaagccatttgtgtcatcagactttgggatagtgccattgtttcgggatagtgccattgtttctggatgagccaaacatgtactcatacttcgggatagtgccattgttttcctacagtgaaggaagcatcatggggacttgcttgatatgctgatattgttcaggtgctatttgcaacggcattctaccagtccctcaagatcaacacaacccatcatgacccaacttctcaagctgaagatattgagagagaaatgctaataagttccttcggtttcttctcttcaatctctctgtgctaaagacatttcccaacatcttcgctctctctacgttccagtgccaaagacatttcccaacatctttgctctctctacgttcctccacgaaaggcacttcatgggataccaaacattctaattctacctgattgaagaagagctgacaattgaggtaccatgtgtatcatatttaactcatgagtcacaaggatcatttttgttagcaatctgttctacaacattcatcagagaaggatgaaaagatattgattgataatgtgtttttcatacttgagtgttggatccaactgtgcttgaacatcagtacagagattgtgtagaaattatttggtacatttgagtttgaaatacagtgaactggaggtaactccaccctaaacttctggagcagcgttacttcatgtggaccaaacattccatgtatttgattactttctt

SEQ ID NO: 58856 - DNA, 1145 bp, Zea Mays
ctatggcctcgccgcgggggaccctacaccgtgctccccatcgcctccgtcctctccgtccaccctttccccaatctggaccgcgctgcctgggcctaggcgcaccaccccgggtagagatcttgtgggcgtcgctgctcctcgccaccaccgggacgttcttcctggctagcgctccaatttgtgcctgcttgggacgacgagatgctctaatttctgctttctgatctttttccagattgaaggatttacctgaagggaattatggatcggattgataggtagttgtggaatttcttgaggtagcagtcagctgcatcgtcttcctcgaaggcttatattctcctcatgagagtgctcttcatttgagttggttcagtcaagaattttttgtgccatcaaagaagtagctcatcatggcttgcattagggaacctgcttccattttgcttttttatgaaggatttgagaattgtgcaacagcagtttcagggaagccatttgtgtcatcagatcataagggcagactttgggatagtgccattgtttcgggatagtgccattgtttctggatgagccaaacatgtactcatacttcgggatagtgccattgttttcctacagtgaaggaagcatcatggggacttgcttgatatgctgatattgttcaggtgctatttgcaacggcattctaccagtccctcaagatcaacacaacccatcatgacccaacttctcaagctgaagatattgagagagaaatgctaataagttccttcggtttcttctcttcaatctctctgtgctaaagacattacattctaattctacctgattgaagaagagctgacaattgaggtaccatgtgtatcatatttaactcatgagtcacaaggatcatttttgttagcaatctgttctacaacattcatcagagaaggatgaaaagatattgattgataatgtgtttttcatacttgagtgttggatccaactgtgcttgaacatcagtacagagattgtgtagaaattatttggtacatttgagtttgaaatacagtgaactggaggtaactccaccctaaacttctggagcagcgttacttcatgtggaccaaacattccatgtatttgattactttctt

SEQ ID NO: 58857 - DNA, 2924 bp, Zea Mays
cggcggccgacggtctctcttcccatccgtgcctgtgcactgtgcctctgctttctgtgatccggcgatcggcgagtcggcgactcctgtgcctcagccagcggagctgtggagcacctctgcaatccggtcggcggcagctagctgcatgcctgcatcttgtacgagcgctgcttgaagttgcagagattaatcgatggaaagatttttcaaaagaaaagcgccagagccagatagtgccaacattgctagcaatctgtgtttggatgatatcaactgggaagaggagattaaatatgatccaggtttgcggaaacaaatagatgactaccatcctaatctcagagaaatggtgagaagaaagtacttggaaaaagggccttgtcaacctcgcacatgtagttttcctgtaacaaatattggaggagggccaagaaggtttattccagattggtttgatgagtttggaagttggcttgaatacagtgaatctaaagatagagcgtattgtttttcctgtttcctattcagaggaaagaaagatggtggatatgaagcttttgtgaaaaatggttggaatggttttcacagaaaacaaaggctgagagaacatgtgggtgatgttggtcgctcgcactatctagcaatgaagaagtgtgatgatttgttgcaaacaagacaacacattaatgtggctttccgtggtgtaagtgaaagtgctaagagggactatatgattcgactgaatgggtctattgatgtcgctagaatgttagcaaagcaaggcttgcctttccgaggccatgatgagtcaaaggattccctaaatagagggaatttcagggaatttcgtgattttgcagcggagcaaaatccagtattaaggaaggcaacaagtaaaggaaaatcagaaaatagtcttttggtttctcctgaaatacaaagggacattgtgcattgttttgcaaaggaggtgttacaggctattctagaagaaattcggaatgatgttttttgcttgctagttgatgagtcaagagatgtttcttggaaagaacaaatggctgtggtcttgagatatgtagataaatgtggaattgtgaaagaaagatttgttggacttgttcatgtaagtgaaacaacttcagcccatcttaagtcttccattgatgcactatttgctgagcttaacttaagtttgaagcaagttagaggccaaggatatgatggtgctagcaatatgagaggtgagttcaatggcttgcaatcattgatcatgagagaaaatagttcagcttattatgtgcattgttttgctcaccaactccaattagtccttgtggctattgtgagaaagcataaaggggttagtgatttttttaccaaggtttccatattattaaatgttgttggtggatcagctaagagaagggaaatgattagagatattaaccttaaagaaatgagtaaggcacttgggtgtgggcaacttcaaactggtacagggttaaatcaagagcaaagtgttcaaagacctagagatactcgttggagttctcattataaatctctgaagagtatagttgacatgttttctacaataatgaaggtactagaaattgtggaaaaggataaggactggaaaattagagatcaagcatcaaatcttcgggagtatttccagtcttttgactccatcttctatttgcatctcatgttgactatattaggaatcacaaataccttgtgcttagcactgcagcgcaaggatcaagacatagtgaatgctattaactgtgtgagagccactagatgccaattagatgagcttagaagagaaaagtgggaaaaactaatagatgatgtgtatgaattttgtgagaagaatgatattgccaaattggaaatggaagatgaatatattgatccaaagaagaggaggcacaaatctggaatcacaaacaagcattactatcaagtagattgtttcaatgatattattgattgggtactccaagagcttgacagccgctttaacgagacaagctctcaattgcttgtatgctcggcctcttttagtccaagagactcgttttgtgattttaatgtggacaagttgttgagcctagcaaagctttatccacatgattttgattctgggaatctgagggaccttagcaatgaacttggcctctacatatttgatgtgagaaatgatgatagattctccaacatacaaactattgctgagctttctcagaaaatggtggagactagaaaacatgatcgttacccactagtttatcgacttctgaagcttgtactagtactgccagttgctactgctacagttgagaggattttctctggcatgaagattgtgaaaacaaatttgcgcaaccgcatcggtgatcaatttatgagcgattgtcttatttgctatgtggagaaagaagaaatgatgaaagtcacgaatgagtctgtgattcgtcgcttcatgaaaatgcaagaacgcagatttgatgataattaaaggtaacaattaacatataatgtattttgcctattttgatagttttgaccatgctagtagtatttatattgccattttcttttgttactcttttatagtcgcacccccctctgttacgctctagcttcgccactgctatccgcactcatacaactctaaatttctactctaaaaagaatattttgtccttgtcagcaaggttctctactctataccataattctccgcagtcatatttactccatatctcaaccctataccaactaccatatattatatcatttttttatttcactttcatacacgtcacgcttttacattgggcggccttttcagttgcgctgcccctgcaggctacacgtcgcagcggctggcttgtggctgcatagag

SEQ ID NO: 58858 - DNA, 107 bp, Zea Mays
ctcgaattcaacttttaatacacctaatgccttggctaattcacctattacagcccataaaaagattaatacgacccaagcactaatactcgaaagactcagctaat

SEQ ID NO: 58859 - DNA, 422 bp, Zea Mays
aacaaacacctggttttacacttgtttaagaaccttgtcaagacgaacagaagaactcgcataactgaggtaatgagtcttagtcagaatactaacctcacatccaacaagagttaagaaattttctttctttatatttcttgaaatatgctcagttctgagcatatgaattgcaaaagaaaaggcgctcaagaggttcagaagatcaccaacctgatggaagcaagggatgagatcatgagaacatcaatcaatatggcaggcgcaatccctagtggtgtagttctcaaaacattcataatatccaaattactaaagcagcgatataaaaagttaaaactttcaagacaatagtaaccttgacagagcagtgtcatgggccataagacaagcaaacaaaaggtcaagacaaacatgttaac

SEQ ID NO: 58860 - DNA, 1505 bp, Zea Mays
aaaagggatggctgctatagtgaaccttaacatattgaaaaggtcagggtccaaaagagcctctgcctgtttcacaactgaaatgttgctagctgaaagaaataaaattgagtcttagctgaatatgtacgaggcaattcagcatgcagaataactaccagcactagttcaaacacaaaacatatccgtgtaagaaaaacacacacacacaaagcagatgataagataatgcaactttcgcatgctgattactatgtgttgaaaatttatatatgtgtcatgtgtgtatgttttgaactcaacactattaaaatgcatcctcttattattgtacatataagaaatgtagaataaactgaaccaaatgtgaccttttctgctgacaccacaaaagatgaaatgaaaacgaagtggccacatcatttagcaaaaggacaaatggacaatttgaccaaaaggaatgtacagcaatagctctcacacggttgaagcctgtagtaggatcaccattcatatcggtaaatttgatttgatggctacattaatccccagtgaaaaaatcaatcaaacacacattaatatccgcagcaaaactcagggaattgagcacagaagaaacagcccccaccccaaacctgctccaccattttattgtcaaccataacatcgaacaggtgaggtgcaatcataaacaacccgtccggccgtcggtctcaagaaggcgaggctctgtatgatcgtaccgaatataagagtgaccagattgagtagtacgaggctccgggccttcctgggcacccaagacaccaccttccgccacgcagcgcgtgccctccgcctcgccgaccagagggccgtccgcggcggtgatgggtcctcagtttcagtttcagggtcagcggactcgcgcattccaggcgacaccgccttccacctcctgatttcatccggcggcttattctgcgatgaccccttcgcggcagagagtggggaatccctggacgggaagctggaggaggcagcggccgacgaccgaaggagatgtcgccgttctgataatgtcgtcgcggggatgcgggagcgagggcgaacgagaggaacgcctggttgcaggcaggtgcgccccggacgggtagggctcggatgcttgggaaggaacatccggagcccggaggagaagattccgaaaggaggcgatgcgcgatcggacgagagcgccgggcaggctagtaggagacgtgtgagtggccctcaaaagacgaggatactatttggagcctccaaatgctatgacctaaaataggtacctttcaactttcatgttttaaagatattaatataccgtgcatcctgcgtacgatatcagaatcatttgtataacttttacatgattgtagtactcaacaaaaaataagatcatacaacattgtgatagcggtgtttatggatactaatgtggctgcatcagatgtttctgttttagcatttaaaaaggttggcatgaa

SEQ ID NO: 58861 - DNA, 1100 bp, Zea Mays
cttctatatactatttctactttcctaaattatttctttgggttaaattcaaaatttctcaaattactatcatctttattcaatgcacaaacaaaattccaatatgatgcatgtagcatttttattagttatttttttcactcaattaggatgttccatgttataatgagtagatggcataacatttaaggagatcaactctactttctttgaatacatttttgggtattacactgggtaacactaggttagtgttgttaggcgacgaccacttgacgagtatccctcgatcgagcacttgattgatttaaccatcttcaagttggtccatcagcttcatcttgcggattagcccgtgcttggggtcgacttggcttgtctttcgcatcacgtggttaattcacgtacctgaatggaatgcattatgcacatgaatgcatatagatcggaatatttcaaacctaaatagtattacgcgatagcgaattaaacacctagcgacgagactttgtataattttgtacaataatattagttatcgacatacgactaagcgcaataattacgcttctctagattaacgatcctaacgcaaacatcacaaacaacaaatcatacactttaaattcaattagcctaaacgcgacttatcagctaattaattgaattctaaacttatccctcgttttatgaattatactacatcgctcacaaagaactattttaattttattttactcctcacatgtttttcatgtcaacaattactcaaatatttctttatcgtaaatatatacacatctgtataagtgattaaactatttcatcaacacacatgcctactaatattctgctcggtacactaattcagcgaattgaccgaaatagcgaaatgactcgccatagctgaatctggctcgataatcgcaagaaccgtgaagtcgacgagagtttcatgactcgtgcaatttatcgagcaccttaatgagcatcgcactagcacattaatttatttatcgatcgaactattctgaataatttatcagcttactgtttccatagctgacacgaatccgcgagattggtagtgattttccgat

SEQ ID NO: 58862 - DNA, 917 bp, Zea Mays
tatctaataaggtatggatatcaaggaaggcaatgcatcaaagggtttcaagcaactcctataaacctaatgcacatttcactagacttaaagtgtacgaaaattatttaaaaacacaaggaagaggttgcatgcaccagggcttgcctgggtaacactaggttagtgttgttaggcgacgaccacttgacgagtatccctcgatcgagcacttgattggtttaaccatcttcaagttggtccatcagcttcatcttgcggattagcccgtgcttggggtcgacttggcttgtctttcgcatcacgtggttaattcacgtacctgaatggaatgcattatgcacatgaatgcatatagaccggaatatttcaaacctaaatagtattacgcgatagcgaattaaacacctagcggtgagactttgtacaattttgtacgataatattagttatcgacatacgactaagcgcaataattacgcttctctagattaacgatcctaacgcaaacatcacaaacaataaatcatacactttaaattcaattagcctaaacgcgacttatcagctaattaattgaattctaaacttatccctcgttttatgaattatactacatcgctcacaaagaactattttaattttattttactcctcacatgtttttcatgtcaacaattactcaaatatttctttatcgtaaatatatacacatctgtataagtgattaaactatttcatcaacacacaggcctactaatattctgcttggtacactaattcagcgaattgaccgaaatagcgaaatgactcgccatagctgaatctggctcgataatcgtaagaaccgcgaagtcgacgagagtttcatgactcgtgcaatttatcgagcaccttaatgagcatcgcactagcac

SEQ ID NO: 58863 - DNA, 11271 bp, Zea Mays
atatgtgaacagaaatgcaaaaggatgaagatagtaattgtatcttgttaattcattcatatttgcatcccataaaacatgtatgaatatcaacataattcatattacattgataccttcggcttgctcgaagctgaagacgcgagagagtgactataattcagcgtgaacagtacggtgctactgtttatctatttataggcacgggacacattccaggtaaaagtacatttatgtccctggcatctatttataatcataacatgaatcattaaggactaaatagtcttttcccctttcggtcagcatcatatttggtcttcgtcaccatattaagtcgaagctctttggctatagcttcggcgaccattcttatcaccttcgggttacatcttcacactgtatgtctttgccatgagagaagacctttatgccgaagcccccttataataatcatatactgaaaacatatggtcagtcacatttttagaaccttcgaaagaggaaggcccccaacacatgataacatcatttcatcatgacatcatgcataacatctcttacaatttcatacaaaagagagcaagaaggaaatatcctcttctttttgaaatctatgaaaaggttcagccaattggtaatagtgtcaagaacctgaagcaatttagaaaaagcctcgtcgaaagcactcagaagcatttacctatttcgaaaaggtaactctttcgggaacattattgaaaacatcatcaacaactttgtctactgttttatacaacatgtccagatgtgctagccaatcctgcagtagtgaatcttcatctggattgtactctttgggttctggcgaaagggcatctgtataagaaatatgtaatttcactctcaatgaaacataagaaaatatctgaagcttcctcaagtaagtgtgcaagttaccttcgagttcctttaatcttaaaggttcctttattgcttccgccttttttgtaagcttgtgagtctttgtgtaaacactaaaattctaagtcccgaaacagaaaaataaacgataaaaagaaacatttcttacattttctctagcaacttcatctactaacttcttccctccaccaagccagacatcggtataaaactttctcccaagctcggttgcttcagctaaaggaatcttattgtcatcaacataatatttaaactctggctagctggcaacttttacatgctcgcatctagccttgtcaagcagcaaagttgcaacgtgtgcccctatacacgcacaataatcaccacgggtggataatacttcatcgaaggcctccacttctcctatccacttcaccgcactagaggcgtcgccgcgcacaaattctttttcacttgaaaatgctcctatggagacgaaggtattttttaaattttttacaacactgggcagtggagtagaagcattcttcgctagactcccaaagttcatcaacaattttctataatgtggttctctcattatcagaaattttatgcttcaccttttcaacctcaaaaattacactagtatctttgaccttctctttcaatttggccattttgcctttgtgtgctacaacttgctcttttatctaggcctcaagctctgcaatgtgtttcatgctctacgagttgtcaacttctagcttcgaaattttgttgtctttctctttagaggatttctagaacttagtgtggtcttcaatcagatctttggcaaaagtatttagctttatttctttttcttcaagatcacggtgaagcccaataacttcagactacaggttgcctatggccatctgagcacttgcatctttgacgtctttctgcgcctttaaagctttacttaaaataagtccctacatgtcacgaagagtaatttaaaaccacatcatgaaaactttgtttatttaaaagctgaaagtgcatttatcccttttgtgagctttggtgatttggataacaacacatttaaaggtctaacaagtttgctaagtgttgaacagaaaaatcagtatgatgaacatacttgaatagtgtataatgatcaatgaacaaaggttcaacacaaggttaaataaccagtgagacaatgcaaatggatagaatatgatctctatattggtttgaatatatggacaatactgagaaatcactactaacatatgatcagaatagaggataaagtgattaagaggattggtcaagccaaagtgaataagatatgaggaatcgtgaattgtcttgaccatattactatcattccatatatgcttctatgagaatcaaactagagtttgattgatctgagcagttatatctagaagacattcaagcaaggttcacaatattaaagaaatgattctctcaatggatgctcaatatgatgtgactcaagaatggcttgatagggtgaagatagcaaggaaatggcttcgaggaactaagcgaaggttaaggccaagtgacggcttgtggaccgaggtactatggctaaggtgaagaagagagtatttgcactaagtcgatgaactaatcagttatgaagagttataacatattgatgcattagtaaggtgacttgaaaccatgatttgaactcacatatggtgatatggtacaagtcacagggtttgatttgtgtttgctttcaaaaggtgagacaaagatgtttgtgatccttttgaaagcaacgcccatggagaaatcacacatgagacatcaattactcaaggagtttacttaattatattttatttaacttgagtatagaaatcgtcgtactatcaaggggatccaaaaagaaggttggtgtttgccaaaactcaagcctctatattcaaaagctatttcgaaaaaacaaaatcccttggacactttgtgtctgactgttgttaagattgagaaactgagagtgttcctgttgaaaagcagttaagcttttcttcatctgcagttaagttttttcagctgagttgaacttcagctgagttgagcttctttagctgcaattaagctttttcagttgagttgaacttcttcaactgcagtttagctttttcagccacagttgagctttttcaactgcagttgaacttcaacttcaactgtgaacctctttgaccatacaccagttgaacctgcctctgggccagttgaactggggttttctctcctaaactttctggtcaagaccagtttaactggtccccaggggcagttcaaccgggtctctgacccctcttgccagacttcgcagtagtctgtcagtcagactggcagataggctgacaggtctgccaaggggcagttcaaccgccccccaacgaggttcaaccggttttggtcaacttgactagctggcagacaggctgacagttagaccaggggcggttcaaccggtccttcccagaaatttagcccaacgactagtttcgaagccccacctatatatactcactcctacctctctgtccataaaagagcacgatttgaactccatttctaacctgagaaacacctcccactctctctcacacatctcttgcctctcccatttcaaatctttggagagaaatttttgagtgagtttgagagctgcggtttttgtgcttaatctttaaatccctcttgctcttcttggttcgagctttggtactacatcgagttctttgtggattcattactcttagagcttctaactcctaaacgactaggtgtcgcttgtgagtctccaaatcttgtggaagatcacaagaaagtttgtattacccgctcgtttgagcaaagattagtgtgtgggcttgacggtcggcaaagggaggattagggttgaaagagacccgaccctttgtgggtgcctcaacgaggaaatagggcaccttggtggtgtgaccgaacctcgggataaatctgatgtctcttgtgttcttgctcattgtgtttgtttgtgttcttcattctctcaccattctgtggaagatttgtttatatcttttttgtgtgtggattttgagaagtgcccttctcagatctactactttgaaccctgtggattatctagaacatctcatttccaaagttaactaggtgaattttgagatcaattcagttttatatgtcattctttagttgagctcgttcaaaccggttgaaccagttttggcaccggctgaaccggttttacctagtttgtttctagtttttattgaaaaatatttctgtttgcctatccacccgcccccctctaggcaactttcaaaagcaaagaactaaaacctcacctttaggctattatagtctaggccatctgcaagctggcccttcggcattgcggaaagtccacactcgatcttcagctaacctatgttattcatcatcacgcggcacacatcaatctctctactgtctggaagatagtagaggcattcatcttcatcatttccgtcgtaaatgagcgtgtctgtccgatattgtaaatcttcagcataatcttgtactttgacgatctgctcagcagtcaactcccctccagaggcgtgtcggatggtgtattcaggctgcacagttgattcctcttcagctatcgtagttgcctcctcttccaaatcttcaacttgttcttcttatttatccttggatttatcaggaatggtgtaaaccttcgaagctacaatcttatctgaagcagggtcaccttttagagcgtcatctagtttttgcgcaagttcaatttcgacgttctcaacaccaagtgcgctatctctctttggagagggtggagcaaccttcgtctagaaagattcctcagtctttgtgaacttgaggattgctctcaaaatattatccatcctcttacctttccgaggtgtcccctcataagtcggcttcgactctggtcttggccttggtgcaagctgcaagctagccaaaggaatttcatcatggatgggtagctcaactacctcctccttaaccttattctccttctcctgcaatgaaggtaaaactattataaaacacttcaaggtaaactcacatgtctcagagaagattagaggaaaatcattaccttcggtagctcagaagaatcaaccttcgattcgatagccggtgcgggctcggcagcgatctcctcaataagaataattgtcataggcaatcttggctcaataatagccaccctatcttcataataaaccttcgactgcttccctgatatttttaccgtttttctattttggggcacctaccgatggcttcaatgtgcatttccttttcctcccactgctttatatcagttgagggtagttgaaaagtaaatggccttaaccatattatataatcaattttggtgcttgacgaccatcacaaatcttatggactaactagtttgcctagttgattatttcttaggtgcataagttcatctacatcaattctaagtcgactatccgaaatgtcatagattattccggacaggaaaagcttttttgcaaaattcacatgtgcacggatcgttcgggcccttctggcagaccgtccgcgacaccaaggtgtgtctcgaacaggaactgtgcaaaaattccatttatactacgcactgtctgaagcagaagagagcatcgtccgggaccaagctcagaccgtctggcctcaggcgcagaccgtccgctcgttgaaaaacaaaaaaacgaaggtgacgggttcggtaaaatgcatttttagcatcctcgcggaccatcaagggtgcacagccagaccatctatgactgctttatctgacatctgacaacgcatttaatgcacttatagccgttgatatagccgttactgctgactgttgcgatttcagccgttgatgtgcagggacggaccgtccgcggttggcaaaaaggagacaacggctagaaagttgttggtggctataaatataaccccaaccacttccattcaatccacccaagcattctacacactcacattcaatacaagagcaagcaattcattccaagatacattcaaagctttcaaacctctccaagtgccataattgtgactaataatcattagtgattagtgacttgagatagtgtgatctggtgttttcatttgttgctcttgttgcttggtttcttaattgtgctttcttcatctccttctaaactttcaagtgacttgtatagctagcaagagacacctaagtgtgtggtgatccttgcggggtctgagtgaccctcgagattaaggagtactcaaccgatctaagtgagcactcaaccgatttaagtgatcgtttgagagaggtaaagggttgaaagagaccgggcctacgtgacctcctcaacggggagtaggttctttggaaccgaacctcgccaaacaaattgttgtgttcaattatgttgatcattagcttacgatttgattcttcctttcctctcctctctttctaagttatattgcttacaatccttttgagtttgctcccaaagtcatctgcattaattgagcaactcatagcaaaaagaactttctttcgcactctgatctcgctattacttatttctgatcctaaccccgggtgaagttcgtgttcaaaatttataattttcaggtttcatctattcaccccttttaggcgactttcagtagtctagatagatgaagtgtataacgtcaaatactcggtttgatcttctcttccctctggctccaaaggtagtcgttaaggctttgttttctttcttgacgaagttacctagaacttcattgcattttgattcataggcttctagccattcatcatctgtctcaccaaactgttgcccaaacttgtatgtatatttcaatatagtaagccacccttttagcctcttgcatcgatggactatcctccttcgatttcggtatttcccaattagcctgaagcggccaaacgttgaaggctaagtgctcttgcacaagatctctggtacctatgtagatgcataccgcgttaaaagctacaagggcatcttgagcttcatcactcataacgcatgtcgacctctttatgccgaagtgtagttttataggtctttggatgatattctcaagtttgttcgttacatagaaccattcccttgtctaagcattcgatcatttgcttcagtatgccaaggcagggtatcgagcatctttcaggtatgtgaagatgaggcaaccaaagtcgttgtgttgttgctccttcctagttgcttttatctgataatgaagctcatggatttagagaaaaaaacaacatttggctctacgctctagctcttcactgtctagataaatatccctaacctcattaaggcattcagggtcaacaaatgtaggtatatatcaaattttttcagaatctccactagcatcttatgaagtggaaatcaaagtcggcctttaagaagcttcagaacactaccacttcatctttcttcagaagaggggtggtatctttgcctccaagcctcacaatcgaagtatcgcctatataattagtattcttcagtacctcaatatgacccttcttcatggttgatttgccgaagataacatggctaggcttcaatggtcgaccttcatcatcagcatcgtctgcttcaaaatcaaactcttcattgtcgtcagaatcatcaaacaagccaaccaagatctctttagtaatcctttcaactctggccttctctgcggcatcaaagtatgccaccaaggcgagttaatcactctttccttctctagccatttcataaactacaaagattgcaaaaagtgaagttgtgtcgaaaaagggtcttgaagtaagcttcggagtgcgaacaaatggcagcagcgggatgacaaaagcaagagaatattgtgtctacatgcatcaaagtcgatatgttttataagcaaaatgagcgaaattaaaaattcaaattttaacccaccattgcgagtggaccctcatgacatgatttttacaaagacctattttaaaagaattcattttagctaacgagatcaaggaaggtgttttcggaccttcgatacgaggccttcatttgtttcgcgatctgagttcgttatgaaaaagcgaactaataccgtgagtagctactgttgggggacctccttgaccaaaggtcctcaaaatacttactctagttattcttaggtatgttttaagtgcaagtacacatgggaaccttaatctaggaggtgaggtgtgactgtcatggttataaggtcaaagcagcaagctttggttcaacagagcgtgcacatgaagagggaatcagcgataacaaagcaaagtccctgacttgcccagcaagactacaaaaggaaaggacgtcgatgcccatgttcaaatttatagcttgagggcatgattgtaatttgtcaaagttgtatctcacgactataaatagaggaatattgccatgcattgtgaggaccttttttagccaaggtgaatcatattactcagattacgaagctatgtttttcttcatcttcgtgctattgactgtaaggccgaaggtacatttgtaatcacttgtgatattgcaaagaatgaaacaaagtgtgaacacattcagatgagtagtccgctctaccttgtttttttagtatttttcagcttttggccaccaaaagctgttgcggactgccagacgtcctagctttccaacccgcttctataagaatcactttggtaaaaaccatctaaaatcaacatgaacacagaatcggtcgagtcgtcgagattgtaggaatccattgctttcaagatcctgaaccatttggaccacttcatcttcctccgcatgtaatccccacgatacttagattcttctcacaaccagattctctccacagtcggattctcaaaaaagttggtcagaaaaaagctgaaccaaacaggtcatatgtattgtactttgcttcgatcgatatcttttcatatcttcaaccttctatcttaaattaaacttcaaagaagagttaattggagggagaaacttgtgatttatccactcgtgttgacttgttcttgatatcctctaggattaaaaaacgagcgaccaacatcatgtgtgtgtatttatattgcataaagctgctacacccctaactgtccggcaccccaaggcatgaagggcccagacacttccactattagttacctcaagacacgaggggcaccaaaggcttacaatatcaattgtctcatgtgcaaggggcaccgaaggcttaaactactaggtgcccagaggcgcaagaaaccctagaggttcatacagttagatgccctaagacgtgagtgagcccaaggatttatattgttaagtgccccgagcacaatgggcagcaggggctttgtttgtcaggcgccctgaggcgcaaggggacttagagccttagaccatcaggtgccccatgaagcgaagggcctcgaggacttgttgctataggtgtacatttgggtcgggcctaatgggccggcacgaagcacggaaaaaaaaagcacggcccaggcacggcacgacccgaaatattttagtgccaggccggcacaacccgatatatcgggccgagtttgggccgaggtcgtggcacatgggcgggcacgagcacgacccgtttaaggcgggcacgaaatgggctatatagaggcacgaaaaggcccatatatttattaaaatcacacttcattccacactttcatgtacttggtaaagaacacaaagctagagataatgttggttagatgttttttgtagctttgaattagagtatgtgatgtaattttatttttgttatgaacattagataatgaactcaacttacgaactttatatagagttgattatactctttttctttctaacaaaatgatttgtaaatgaggtagtcattgcatagctctggtaacttaatacaaatattaagtttgcttttggtcaaatttatttgtcttatcttttatttgttttattaaatttattttgaatttcggactctgatgtgaatttcaggccctgatgtgaatttcgggccaaaaattgaatttaaagccctaatgtgaatttcgggccgcccaaaatgagcccgggacatttaagcaattacgggccaggccgtgggccgagggctaggcccatgtgccggcccggcgtggcccgaaattcaaacgggccgggccggcccgaaattcaatcaatacgagcctattcgggcttgggccggatcaggcagcccgaatgtacacctatacttgttgctaggtgccccaaagcacgagaaaccctaagggattagacccatatcatgcgaccaagcaggcttagtcaaaagcaccaagagaggtcctcccctagtataaggtctcaaggtggtgacatttccattacaacctaagagtcaatctcctaggtaagactctttccaacaaggagcgataaaatatcatgtactctaagtttagcgaatgagacgtccgctaatatctccagcagcagcctgtccaatgtacgataatgtagcggacgagttcggcgaacgctaaacctggaggatacatgttcatccgctatcctgcttcttgcatacagttgttgaggagtgtgcaatagctttacttggttgtagtctgtaatagaaattaattagtccctaattatttttggctcacatgaacgatgttatgtttgcacgtatgataagataaaatatataatacaaatttctagtaaattgtttggctaaatatgacttatgagtaattcatatataaaactaaatgtattgtaagaagtattttttaaaatttcaaaacatatgaatttttttttataagcaatatgttaaaatagtgtagattatgaaattcaataatactatatatagggagaatcgaatttaggaaacgttgctggagataaagaagatataaagaataaaatcttttagaggatgctgtaaaagatagaatatttctttaaaaataaaatttagaggaaatggctaaagacagcctaaggatccatgagaacatcttgacagaagtcaaagataacatttcacctagcgcatgctcgcgtgtagtgatgttcctagaacattcaaattatatgacaaatctaatattttaatatagatatgtatagaatttggtgctatttttttgtcatgttattaaaaatattatgaagtacaacaataaaattt

SEQ ID NO: 58864 - DNA, 2966 bp, Zea Mays
gttcaaaaaccaaatgttctccctgctccaccccgttctcactccgtcgccgcgtgctcgccggaaccctaggaccctgcggccgtggtaggaagcgctgccgcagccatgacagggacaacttggataattgacagccaaagatttgccaccaaaataaaaaatgcttctgggtcttcagatccaagtaaacagaaatggatcggcaacccaagtaaagagtgcccaaagtgcagtcatgtgattgataacagtgatgttgttcaccagtggcccggtttgcctaaaggtgtaaaatttgatccttctgaccaggaattaatctggcacttaatggcaaaacatggaaaatctggaataaaaccacatccgttcattgatgaattcattccaacagttgaggaagatgaaggcatctgttacactcatccacagaaacttccaggtgttaaacaaaatggaagtgtatcacatttcttccacagaacatttaaggcttacaacactgggactaggaagcgtcgaaggataaacactgacgatgctgatgtccgttggcacaagacaggcaacacaaagccagtactagttgatggaaaacaccttggttgtaagaaaataatggtgctttatataagcccgttgaagggtggaaaggctgagaagaccaattgggtgatccaccagtaccacctaggcactggagaggatgagagagatggtgaatatgttgtctccaaaatattttttcagcaacagtttaaacctagggacaagaatgctcaagagctaactacatccgatgatctggaatcaatggctgctgaatcaaatctcccagattttactacattgcccactgacaaacatgttggtacagtccaagaagttgttcataatcctgagcataatctttaccaggttgttcaccagtggcccggtttgcctaaaggtgtaaaatttgatccttctgaccaggaattaatctggcacttaatggcaaaacatggaaaatctggaataaaacctcatccgttcattgatgaattcattccaacagttgaggaagatgaaggcatctgttacactcatccacagaaacttccaggtgttaaacaaaatggaagtgtatcacatttcttccacagaacatttaaggcttacaacactgggactaggaagcgtcgaaggataaacactgacgatgctgatgtccgttggcacaagacaggcaagacaaagccagtactagttgatggaaaacaccttggttgtaagaaaataatggtgctttatataagcccgttgaagggtggaaaggctgagaagaccaattgggtgatccaccagtaccacctaggcgctggagaggatgagagagatggtgaatatgttgtctccaaactattttttcagcaacagtttaaacctggggacaagaatgctcaagagctaactacatccgatgatctggaatcaatggctgctgaatcaaatctcccagattttactacattgcccactgacaaacatgttggtacagtccaagaagttgttcataatcctgagcataatctttaccaggttgttcaccagtggcccggtttgcctaaaggtgtaaaatttgatccttctgaccaggaattaatctggcacttaatggcaaaacatggaaaatctggaataaaacctcatccgttcattgatgaattcattccaacagttgaggaagatgaaggcatctgttacactcatccacaaaaacttccaggtgttaaacaaaatggaagtgtatcacatttcttccacagaacatttaaggcttacaacactgggactaggaagcgtcgaaggataaacactgacgatgctgatgtccgttggcacaagacaggcaagacaaagccagtactagttgatggaaaacaccttggttgtaagaaaataatggtgctttatataagcccgttgaagggtggaaaggctgagaagaccaattgggtgatccaccagtaccacctaggcactggagaggatgagagagatggtgaatatgttgtctccaaactattttttcagcaacagtttaaacctggggacaagaatgctcaagagctaactacatccgatgatctggaatcaatggctgctgaatcaaatctcccagattttactacattgcccactgacaaacatgttggtacagtccaagaagttgttcataatcctgagcataatctttaccagcttaatagaaactgtgaaataagcattgaagagactgttgtcctcccaccctctgtaaaaacaacaaaggacggagataatctccaatcacaagatcagaagttgtgggaaggcgattcccagtttgaattgttagactctcagcagctggcagaaggactcgctctctgtgacgagttcctcctgagtcagtctcagacctcttgtggaggtggagatgaacctagagagaccaaaccctgcctggctgcttatgcccatctgtcagcagaggacttcaagaaggatttagagtgccagcggttggagcccacagataacacaaaccttgagcttgacaacactgatgagtttcgactcagccaaattgaattttcacaggatagctttatgacatgggcagctgaaaagattactgacgactgacgctgctctagtgcactctcggcaccattttggtacatgaagaaacaactgatctgtttttttgtgggacggcagtgaagtctgcaacaacagtggtctcgcttttgctttgagtagctctggtgcacataaaataatttatatgaaatatgaaaggctgaggaatcatgcggtaccaactgtggagtactgttcagtgtgagattggccttggttgcatcagcttgtacattttgtaatgaatatgctcattttagttggcagaccagttgcttgtttggaattggtactga

SEQ ID NO: 58865 - DNA, 5892 bp, Zea Mays
cttgtctggccccatccgacagtggcacagatttcctttgcgcgagcataaataggcgatttcccagggtgtgcgatacaagtatgcggcaactctgacagtctgctccagtgctcctccagggtctaatacgaaaaagccgacttgttatcaatcgaaccaagcaactatcgcttccgtcgccggcgagcctccttctccgcaaccaccgacgccgccgcgaaaggggaagcgatggggttcttggacggcttccgtcccgacacgctgctaaagcgcgtctgcaagtcgctgctcaagaagcggctgggggatctgatcctcggcgacctggacctcgatcagttcgacatccagcttggccacggcacgctgcagctcaacgacctcgctctcaacgctgagttcatcaaccgtaagttatcaggatcccctattacgctgaaagaaggatcaataaaatccttgctagtaagattcgctgctagctgcgagattgttgttgaagaattggagcttgtgctttctccatctgttgcaagtgaagttgatgatgtgcatactgaatgctctgtctctggtagtactagtgacacacacactttagtcaagatccaaagaaatgaatccgatagtaatcagtgttccacttctgtatctcgagatgtggatgatggtgtaaagagaattgccaatgccgtcaaacggtttctgacaagctttaatatcaagttaaagaatgcctatgtcatatttgatcctcaaaccagtttgagtagtagatttccagaaactagtcgatctctagttttccgaattaaagagttggaatttggaacccaacttggtctatttaaactggacaactttttaactttccgtgaggcagtcattgagtttttgaagatggatgatgtcgacacactgcttcaaaatgatctaaatagaggaacagctgacatttcagcacatcatagtactaccgcagtcttaaccggtcccattggtggattctcagggaaactcaatttaagcatcccatggaataagggttgcttgagctttgagaaaattgatgcagatgtatcagttgattcattagaattacgtttacaattcagcagcatccggtggatcatgaatgtatgggattctctccaaagaaagccagtagacgaacagagttgtgttcataatattgcagatatctctattagtgcttcgagctctgcctactgtccacctgcttcaagctctttgaagccatgttcagattctgtgatagccagtgactacatggcacagagcacattttctcaaaacaggcaggataaagttcaggattctttccttacaagcgcacacgtgataacagactggatggagcctgttgctcgtaaggatctgtgtgaccctgattcagattgtgatgaaagcattgatcagttctttgaatgttttgaggaattgaggaactcccagtcaagtttaggaaacagtggtatatgggactggacgtgttcagtattcaatgccataagttttgcatccactttagcttctggatctgatcaagttcctaaagaaccagttgtcgagaggaccttacgagcctccatcaccgagatatctgttcttcttttgttcagtgatgacacagatataaaaaattccagtgttcctatcagtgcattggatgatatgagacattctgaaatgttttcgagctgcctttcctctgagcattttgagaaatcaattatatctcctgctacagcttccagcttaaatatgcatcatctcaaagccaagtgtgagaacattcatcttgatctacagacttatccaaaaaatgtaaggctcaaggcatcaattgcccaaattaaacttgatgaatactaccacgccggaaacaatatttcagatgattcaaaccttggtaatcacttcttgaacaataacttgcggcaaggagttcaagcttccctccctcagtgcctgtttgctgttggagatcattcggtggaaacctatgaattttgtggcaatagttcaactgaattgactagagttgaattgctaaaaacttttggcgagtgcacattctgttatgatgtcagtaccaaagatcaagatggcaatttagtgagctcaacttccatgtcgatctatttggctcctttgcttttatgggtgcactttcatacaatatacatgctactgagttttgtaagtaatgttgagtctgatttgtcacatggagagcataaaattcaaaagcatggtgacgaaaagggaagcagattgactaccagcacaaccatgtcctcaagtggaagtctaaaagttcagatatccctagcacaggcaagaattgtcctgtgctttccatctgagttttcatgggatttgagccacccatctgtcctggataagttcctggtgatcgaccatacttcatgtctgaacatggtagaaactgcatcacaccctcaaaacgaaatgcaaaatgaggttcatcttagcaagtcgtgtacctcaatacatttggctgtaggggacatagatgtatatttggttaagccagtcaataatgtattggttggtagaatctgttcttcaagtaggcaaactttctctgcaatgaaaattctttctgttactggatccagttataatgactctggcatcacactgatcaggagaaagtatcctgtaactggccctgagattttgaacaatgcttggagtttgccaaagatgcatgatgaaaagatcactaaaaatcaaaacagcaaatgggctggcatttccccttcttcaaatgatcttttagagacaggatctagtatgcgccaggagctccttaagagcactgagctcttatttcatgttcaactttcttgtgtttcattacgacttagtaaaaaggattgtgagttactaaataagctgctagatcatgtcattaaggggatatcaaatgaacaaacaagcatttctggaaattccaaggaccaatctgttctgatcaatgataccttcattcaaacgtctgtcctttttgaatgcagtatattggaaatttgcactgaattgaatgaaacagtggaagttggtcctttattacaggcagaactaaaaggatcctggaactctgttaagttgaatgtttcaaaattttgtcttttctcctgttcaaatgttggaggcctcaacaatgccagttttctttgggtgaatcatggtgaaggtgagctttggggttctgttagtgctaagaatgataaaatccctggagaaagtaaagattttcttatagtggcttgcaaggactctgcctgcaggcggggtgatggtgaaggtactaatgtgctgtctattggtgctgctggctgttctgtgacccacatcaggaacccaaagctaaaagagaattacacttctgttgatgttcgttctggcacaattgtagcacctggtggccgtatggattggatcaatgcgatatgcctgctgttcagttcaggctcagatagaactgaaaagtcagatgatagtaacacaccaaatagctatcagtctggtgaaccttattcatcatctttatttatcgagttggctgatgttgctgttagctatgaacctcattttaaacattccactctcagtgctggagcagccgaccgcaagtttttctcatgccttttagctgcatcatcatttaaactccataataaatctgcatcagcctctgcagctactgattttgatatccaattacgtgatcttggagtcctcatttctcaatcatctggttcaacaaatggtacttgcagttatggtgtagattaccttcgtcaagcaggttatactaaggttgtccagaacacattcattgaagcttctctaagattagattcttccttttggaagcttgaaatatctgattcccaatttgacattggtacatgtcatgacacaacttatggtcttattggtttgggatctcaactccagcagctatatggtccagatatgcaggatgctttagatcatctgcagtctaggtggaatagtgttcagcaagcaaacaagcaaaatatggctgctgatgcatcagacaagtctgagagcagtttggagattttggtcgattctggggattaccagtcagatggacttcttgatgatattattgagaatgcttttaacacagaggattgcatggacaccaatttttgggagaacaattaccatcacttatttagtagcagtgagacggatgatggatttgagctgaatgcggccacttcacatgtatttcctatatctactccagaaggcaatgttactcaaatatcactagaacagaacgtctgtcctgatcaaatcattgattcatattgtgtgcctgaatttcatcaatcattatcaactctatgtgatgaagagcataaatgtacatctggtgacaattctcatagaaccctggaaagtgaagatgctggatggtataacaatgttcccttaacaatagttgagaatcatgttttgaaaaagaaaaacgagcaagtacttcaacacaaagtgtcttctgtttgcagtttgaatcctgatgaatattgtaatctgaaaggaaaggttcatattcatgatatagatgtaaagtggcggatgtatgctggagatgactggttattacctcagaaagatttgactagcttaacatgcacagatggaagaaataggagctcttcactggaatttactgtgagagggctcaatatccaagttgacatgtatccaaatggggatgtttctatatctaggctatctgtagctgctgaggacataactctttgtgatcaaagtatccatgctccatggaaactggttcttggatgttacaactcaaaggattacccaagagagtcatgctccagtgcattcaggttagaattggagtctgtgaggccggagccacaggctcctttggaagactacaggctccatcttgagattttgcctctacagttgcatcttgatcaagagcaacttaacttcctaataaatttcttcaagaatgattcatgtaacaatgatcctcatttgcattgcgaaaatgatactgttgatgtgaagagcacaagcaatggaagcaatatggttgtggatgaggcattacttcctttctttcagaaatttgacgtaaagccacttattctgcacattaattatataccccgtcagtttgacccgattgccctaagcaagggaaattacgcagaacttctcaacattcttccatggaagggaattgatttgaagcttaagcatgtttctgcaatgggcatttacggatggaacagcataggtgatacggtagcagcggaatggttggaagacatttctaaaaatcaggtgcacaaattgctaaaagggcttcctccaataagatcactagttgctgttggttcagggaccagaaagttggtctcgttgcccatcaaaagctacaagaaggatcggaaattgctcaagggaatgcaaagaggcgcagttgcttttattagaagtgttaccattgaggcagtagggcttggagtccatttggctgcaggagctcatgatatgcttgtgaagacagaatgcgcccttacaactgttccaccacctttagcctcatgtgaagtgaaacgaacaaagcacaacattagagctaaccaacctgaaagtgcacagcaaggaatgaaacagtgcttaaaaaaactccgtcggtaggggaaagaccgctcggcgctcgcacagtattatattaagaagcttaatcgaagccccaaccaagaaaggttacgaaagctgccccccttgcagcatgagggtccgtcc

SEQ ID NO: 58866 - DNA, 6298 bp, Zea Mays
tatcaatcgaaccaagcaactatcgcttccgtcgccggcgagcctccttctccgcaaccaccgacgccgccgcgaaaggggaagcgatggggttcttggacggcttccgtcccgacacgctgctaaagcgcgtctgcaagtcgctgctcaagaagcggctgggggatctgatcctcggcgacctggacctcgatcagttcgacatccagcttggccacggcacgctgcagctcaacgacctcgctctcaacgctgagttcatcaaccgtaagttatcaggatcccctattacgctgaaagaaggatcaataaaatccttgctagtaagattcgctgctagctgcgagattgttgttgaagaattggagcttgtgctttctccatctgttgcaagtgaagttgatgatgtgcatactgaatgctctgtctctggtagtactagtgacacacacactttagtcaagatccaaagaaatgaatccgatagtaatcagtgttccacttctgtatctcgagatgtggatgatggtgtaaagagaattgccaatgccgtcaaacggtttctgacaagctttaatatcaagttaaagaatgcctatgtcatatttgatcctcaaaccagtttgagtagtagatttccagaaactagtcgatctctagttttccgaattaaagagttggaatttggaacccaacttggtctatttaaactggacaactttttaactttccgtgaggcagtcattgagtttttgaagatggatgatgtcgacacactgcttcaaaatgatctaaatagaggaacagctgacatttcagcacatcatagtactaccgcagtcttaaccggtcccattggtggattctcagggaaactcaatttaagcatcccatggaataagggttgcttgagctttgagaaaattgatgcagatgtatcagttgattcattagaattacgtttacaattcagcagcatccggtggatcatgaatgtatgggattctctccaaagaaagccagtagacgaacagagttgtgttcataatattgcagatatctctattagtgcttcgagctctgcctactgtccacctgcttcaagctctttgaagccatgttcagattctgtgatagccagtgactacatggcacagagcacattttctcaaaacaggcaggataaagttcaggattctttccttacaagcgcacacgtgataacagactggatggagcctgttgctcgtaaggatctgtgtgaccctgattcagattgtgatgaaagcattgatcagttctttgaatgttttgaggaattgaggaactcccagtcaagtttaggaaacagtggtatatgggactggacgtgttcagtattcaatgccataagttttgcatccactttagcttctggatctgatcaagttcctaaagaaccagttgtcgagaggaccttacgagcctccatcaccgagatatctgttcttcttttgttcagtgatgacacagatataaaaaattccagtgttcctatcagtgcattggatgatatgagacattctgaaatgttttcgagctgcctttcctctgagcattttgagaaatcaattatatctcctgctacagcttccagcttaaatatgcatcatctcaaagccaagtgtgagaacattcatcttgatctacagacttatccaaaaaatgtaaggctcaaggcatcaattgcccaaattaaacttgatgaatactaccacgccggaaacaatatttcagatgattcaaaccttggtaatcacttcttgaacaataacttgcggcaaggagttcaagcttccctccctcagtgcctgtttgctgttggagatcattcggtggaaacctatgaattttgtggcaatagttcaactgaattgactagagttgaattgctaaaaacttttggcgagtgcacattctgttatgatgtcagtaccaaagatcaagatggcaatttagtgagctcaacttccatgtcgatctatttggctcctttgcttttatgggtgcactttcatacaatatacatgctactgagttttgtaagtaatgttgagtctgatttgtcacatggagagcataaaattcaaaagcatggtgacgaaaagggaagcagattgactaccagcacaaccatgtcctcaagtggaagtctaaaagttcagatatccctagcacaggcaagaattgtcctgtgctttccatctgagttttcatgggatttgagccacccatctgtcctggataagttcctggtgatcgaccatacttcatgtctgaacatggtagaaactgcatcacaccctcaaaacgaaatgcaaaatgaggttcatcttagcaagtcgtgtacctcaatacatttggctgtaggggacatagatgtatatttggttaagccagtcaataatgtattggttggtagaatctgttcttcaagtaggcaaactttctctgcaatgaaaattctttctgttactggatccagttataatgactctggcatcacactgatcaggagaaagtatcctgtaactggccctgagattttgaacaatgcttggagtttgccaaagatgcatgatgaaaagatcactaaaaatcaaaacagcaaatgggctggcatttccccttcttcaaatgatcttttagagacaggatctagtatgcgccaggagctccttaagagcactgagctcttatttcatgttcaactttcttgtgtttcattacgacttagtaaaaaggattgtgagttactaaataagctgctagatcatgtcattaaggggatatcaaatgaacaaacaagcatttctggaaattccaaggaccaatctgttctgatcaatgataccttcattcaaacgtctgtcctttttgaatgcagtatattggaaatttgcactgaattgaatgaaacagtggaagttggtcctttattacaggcagaactaaaaggatcctggaactctgttaagttgaatgtttcaaaattttgtcttttctcctgttcaaatgttggaggcctcaacaatgccagttttctttgggtgaatcatggtgaaggtgagctttggggttctgttagtgctaagaatgataaaatccctggagaaagtaaagattttcttatagtggcttgcaaggactctgcctgcaggcggggtgatggtgaaggtactaatgtgctgtctattggtgctgctggctgttctgtgacccacatcaggaacccaaagctaaaagagaattacacttctgttgatgttcgttctggcacaattgtagcacctggtggccgtatggattggatcaatgcgatatgcctgctgttcagttcaggctcagatagaactgaaaagtcagatgatagtaacacaccaaatagctatcagtctggtgaaccttattcatcatctttatttatcgagttggctgatgttgctgttagctatgaacctcattttaaacattccactctcagtgctggagcagccgaccgcaagtttttctcatgccttttagctgcatcatcatttaaactccataataaatctgcatcagcctctgcagctactgattttgatatccaattacgtgatcttggagtcctcatttctcaatcatctggttcaacaaatggtacttgcagttatggtgtagattaccttcgtcaagcaggttatactaaggttgtccagaacacattcattgaagcttctctaagattagattcttccttttggaagcttgaaatatctgattcccaatttgacattggtacatgtcatgacacaacttatggtcttattggtttgggatctcaactccagcagctatatggtccagatatgcaggatgctttagatcatctgcagtctaggtggaatagtgttcagcaagcaaacaagcaaaatatggctgctgatgcatcagacaagtctgagagcagtttggagattttggtcgattctggggattaccagtcagatggacttcttgatgatattattgagaatgcttttaacacagaggattgcatggacaccaatttttgggagaacaattaccatcacttatttagtagcagtgagacggatgatggatttgagctgaatgcggccacttcacatgtatttcctatatctactccagaaggcaatgttactcaaatatcactagaacagaacgtctgtcctgatcaaatcattgattcatattgtgtgcctgaatttcatcaatcattatcaactctatgtgatgaagagcataaatgtacatctggtgacaattctcatagaaccctggaaagtgaagatgctggatgtttgaatcctgatgaatattgtaatctgaaaggaaaggttcatattcatgatatagatgtaaagtggcggatgtatgctggagatgactggttattacctcagaaagatttgactagcttaacatgcacagatggaagaaataggagctcttcactggaatttactgtgagagggctcaatatccaagttgacatgtatccaaatggggatgtttctatatctaggctatctgtagctgctgaggacataactctttgtgatcaaagtatccatgctccatggaaactggttcttggatgttacaactcaaaggattacccaagagagtcatgctccagtgcattcaggttagaattggagtctgtgaggccggagccacaggctcctttggaagactacaggctccatcttgagattttgcctctacagttgcatcttgatcaagagcaacttaacttcctaataaatttcttcaagaatgattcatgtaacaatgatcctcatttgcattgcgaaaatgatactgttgatgtgaagagcacaagcaatggaagcaatatggttgtggatgaggcattacttcctttctttcagaaatttgacgtaaagccacttattctgcacattaattatataccccgtcagtttgacccgattgccctaagcaagggaaattacgcagaacttctcaacattcttccatggaagggaattgatttgaagcttaagcatgtttctgcaatgggcatttacggatggaacagcataggtgatacggtagcagcggaatggttggaagacatttctaaaaatcaggtgcacaaattgctaaaagggcttcctccaataagatcactagttgctgttggttcagggaccagaaagttggtctcgttgcccatcaaaagctacaagaaggatcggaaattgctcaagggaatgcaaagaggcgcagttgcttttattagaagtgttaccattgaggcagtagggcttggagtccatttggctgcaggagctcatgatatgcttgtgaagacagaatgcgcccttacaactgttccaccacctttagcctcatgtgaagtgaaacgaacaaagcacaacattagagctaaccaacctgaaagtgcacagcaaggaatgaaacaggcatatgaaagtttaactgacgggtttggaagaacttcctctgctatcattggcaatcctattaaagtttataaccgaggggctggtgtcggatcagttctggctactgcaatctgtggagcaccagctgctgcagtagctccaatctcagcatctgctcgtgctttacattatgcacttcttgggctaaggaacagccttgatcctgagcataagaaggaatccatgtacaaataccagggaccctcccaagcatagacgtcattggtggtcggttcattctttggcgagccttacaccatctccctgaaactggttttaggagctcctttgccagtctcgtccaatggtgaggtgcaaacttgtacagtgtgtacagatcgtaagacagattatatttggcatcaaagccacacactaaattgacacataagggtttaattagcactcatattttgcaccacgaaggcacgtggaagttttgtaatccctcttcgttgcatgactgcccccgatgtacataatgtggttgctgtgtgggttgtgcggatgtaaattatcttcatgactgtccccaatgtacataatgtggctgctgcgtgagttgtgcggatgtaaatatctcttttgctttggttgcgtgtgcgcgcgcctctggtccgctgttcaagagtgtgttttgagctgctgctgctggtgtcatttgccgcagcccatgaacctgatcattctggctttctagtgttatcacgctaaaatatctgatatagaagttgtgc

SEQ ID NO: 58867 - DNA, 6248 bp, Zea Mays
cgaaccaagcaactatcgcttccgtcgccggcgagcctccttctccgcaaccaccgacgccgccgcgaaaggggaagcgatggggttcttggacggcttccgtcccgacacgctgctaaagcgcgtctgcaagtcgctgctcaagaagcggctgggggatctgatcctcggcgacctggacctcgatcagttcgacatccagcttggccacggcacgctgcagctcaacgacctcgctctcaacgctgagttcatcaaccgtaagttatcaggatcccctattacgctgaaagaaggatcaataaaatccttgctagtaagattcgctgctagctgcgagattgttgttgaagaattggagcttgtgctttctccatctgttgcaagtgaagttgatgatgtgcatactgaatgctctgtctctggtagtactagtgacacacacactttagtcaagatccaaagaaatgaatccgatagtaatcagtgttccacttctgtatctcgagatgtggatgatggtgtaaagagaattgccaatgccgtcaaacggtttctgacaagctttaatatcaagttaaagaatgcctatgtcatatttgatcctcaaaccagtttgagtagtagatttccagaaactagtcgatctctagttttccgaattaaagagttggaatttggaacccaacttggtctatttaaactggacaactttttaactttccgtgaggcagtcattgagtttttgaagatggatgatgtcgacacactgcttcaaaatgatctaaatagaggaacagctgacatttcagcacatcatagtactaccgcagtcttaaccggtcccattggtggattctcagggaaactcaatttaagcatcccatggaataagggttgcttgagctttgagaaaattgatgcagatgtatcagttgattcattagaattacgtttacaattcagcagcatccggtggatcatgaatgtatgggattctctccaaagaaagccagtagacgaacagagttgtgttcataatattgcagatatctctattagtgcttcgagctctgcctactgtccacctgcttcaagctctttgaagccatgttcagattctgtgatagccagtgactacatggcacagagcacattttctcaaaacaggcaggataaagttcaggattctttccttacaagcgcacacgtgataacagactggatggagcctgttgctcgtaaggatctgtgtgaccctgattcagattgtgatgaaagcattgatcagttctttgaatgttttgaggaattgaggaactcccagtcaagtttaggaaacagtggtatatgggactggacgtgttcagtattcaatgccataagttttgcatccactttagcttctggatctgatcaagttcctaaagaaccagttgtcgagaggaccttacgagcctccatcaccgagatatctgttcttcttttgttcagtgatgacacagatataaaaaattccagtgttcctatcagtgcattggatgatatgagacattctgaaatgttttcgagctgcctttcctctgagcattttgagaaatcaattatatctcctgctacagcttccagcttaaatatgcatcatctcaaagccaagtgtgagaacattcatcttgatctacagacttatccaaaaaatgtaaggctcaaggcatcaattgcccaaattaaacttgatgaatactaccacgccggaaacaatatttcagatgattcaaaccttggtaatcacttcttgaacaataacttgcggcaaggagttcaagcttccctccctcagtgcctgtttgctgttggagatcattcggtggaaacctatgaattttgtggcaatagttcaactgaattgactagagttgaattgctaaaaacttttggcgagtgcacattctgttatgatgtcagtaccaaagatcaagatggcaatttagtgagctcaacttccatgtcgatctatttggctcctttgcttttatgggtgcactttcatacaatatacatgctactgagttttgtaagtaatgttgagtctgatttgtcacatggagagcataaaattcaaaagcatggtgacgaaaagggaagcagattgactaccagcacaaccatgtcctcaagtggaagtctaaaagttcagatatccctagcacaggcaagaattgtcctgtgctttccatctgagttttcatgggatttgagccacccatctgtcctggataagttcctggtgatcgaccatacttcatgtctgaacatggtagaaactgcatcacaccctcaaaacgaaatgcaaaatgaggttcatcttagcaagtcgtgtacctcaatacatttggctgtaggggacatagatgtatatttggttaagccagtcaataatgtattggttggtagaatctgttcttcaagtaggcaaactttctctgcaatgaaaattctttctgttactggatccagttataatgactctggcatcacactgatcaggagaaagtatcctgtaactggccctgagattttgaacaatgcttggagtttgccaaagatgcatgatgaaaagatcactaaaaatcaaaacagcaaatgggctggcatttccccttcttcaaatgatcttttagagacaggatctagtatgcgccaggagctccttaagagcactgagctcttatttcatgttcaactttcttgtgtttcattacgacttagtaaaaaggattgtgagttactaaataagctgctagatcatgtcattaaggggatatcaaatgaacaaacaagcatttctggaaattccaaggaccaatctgttctgatcaatgataccttcattcaaacgtctgtcctttttgaatgcagtatattggaaatttgcactgaattgaatgaaacagtggaagttggtcctttattacaggcagaactaaaaggatcctggaactctgttaagttgaatgtttcaaaattttgtcttttctcctgttcaaatgttggaggcctcaacaatgccagttttctttgggtgaatcatggtgaaggtgagctttggggttctgttagtgctaagaatgataaaatccctggagaaagtaaagattttcttatagtggcttgcaaggactctgcctgcaggcggggtgatggtgaaggtactaatgtgctgtctattggtgctgctggctgttctgtgacccacatcaggaacccaaagctaaaagagaattacacttctgttgatgttcgttctggcacaattgtagcacctggtggccgtatggattggatcaatgcgatatgcctgctgttcagttcaggctcagatagaactgaaaagtcagatgatagtaacacaccaaatagctatcagtctggtgaaccttattcatcatctttatttatcgagttggctgatgttgctgttagctatgaacctcattttaaacattccactctcagtgctggagcagccgaccgcaagtttttctcatgccttttagctgcatcatcatttaaactccataataaatctgcatcagcctctgcagctactgattttgatatccaattacgtgatcttggagtcctcatttctcaatcatctggttcaacaaatggtacttgcagttatggtgtagattaccttcgtcaagcaggttatactaaggttgtccagaacacattcattgaagcttctctaagattagattcttccttttggaagcttgaaatatctgattcccaatttgacattggtacatgtcatgacacaacttatggtcttattggtttgggatctcaactccagcagctatatggtccagatatgcaggatgctttagatcatctgcagtctaggtggaatagtgttcagcaagcaaacaagcaaaatatggctgctgatgcatcagacaagtctgagagcagtttggagattttggtcgattctggggattaccagtcagatggacttcttgatgatattattgagaatgcttttaacacagaggattgcatggacaccaatttttgggagaacaattaccatcacttatttagtagcagtgagacggatgatggatttgagctgaatgcggccacttcacatgtatttcctatatctactccagaaggcaatgttactcaaatatcactagaacagaacgtctgtcctgatcaaatcattgattcatattgtgtgcctgaatttcatcaatcattatcaactctatgtgatgaagagcataaatgtacatctggtgacaattctcatagaaccctggaaagtgaagatgctggatggtataacaatgttcccttaacaatagttgagaatcatgttttgaaaaagaaaaacgagcaagtacttcaacacaaagtgtcttctgtttgcagtttgaatcctgatgaatattgtaatctgaaaggaaaggttcatattcatgatatagatgtaaagtggcggatgtatgctggagatgactggttattacctcagaaagatttgactagcttaacatgcacagatggaagaaataggagctcttcactggaatttactgtgagagggctcaatatccaagttgacatgtatccaaatggggatgtttctatatctaggctatctgtagctgctgaggacataactctttgtgatcaaagtatccatgctccatggaaactggttcttggatgttacaactcaaaggattacccaagagagtcatgctccagtgcattcaggttagaattggagtctgtgaggccggagccacaggctcctttggaagactacagagcacaagcaatggaagcaatatggttgtggatgaggcattacttcctttctttcagaaatttgacgtaaagccacttattctgcacattaattatataccccgtcagtttgacccgattgccctaagcaagggaaattacgcagaacttctcaacattcttccatggaagggaattgatttgaagcttaagcatgtttctgcaatgggcatttacggatggaacagcataggtgatacggtagcagcggaatggttggaagacatttctaaaaatcaggtgcacaaattgctaaaagggcttcctccaataagatcactagttgctgttggttcagggaccagaaagttggtctcgttgcccatcaaaagctacaagaaggatcggaaattgctcaagggaatgcaaagaggcgcagttgcttttattagaagtgttaccattgaggcagtagggcttggagtccatttggctgcaggagctcatgatatgcttgtgaagacagaatgcgcccttacaactgttccaccacctttagcctcatgtgaagtgaaacgaacaaagcacaacattagagctaaccaacctgaaagtgcacagcaaggaatgaaacaggcatatgaaagtttaactgacgggtttggaagaacttcctctgctatcattggcaatcctattaaagtttataaccgaggggctggtgtcggatcagttctggctactgcaatctgtggagcaccagctgctgcagtagctccaatctcagcatctgctcgtgctttacattatgcacttcttgggctaaggaacagccttgatcctgagcataagaaggaatccatgtacaaataccagggaccctcccaagcatagacgtcattggtggtcggttcattctttggcgagccttacaccatctccctgaaactggttttaggagctcctttgccagtctcgtccaatggtgaggtgcaaacttgtacagtgtgtacagatcgtaagacagattatatttggcatcaaagccacacactaaattgacacataagggtttaattagcactcatattttgcaccacgaaggcacgtggaagttttgtaatccctcttcgttgcatgactgcccccgatgtacataatgtggttgctgtgtgggttgtgcggatgtaaattatcttcatgactgtccccaatgtacataatgtggctgctgcgtgagttgtgcggatgtaaatatctcttttgctttggttgcgtgtgcgcgcgcctctggtccgctgttcaagagtgtgttttgagctgctgctgctggtgtcatttgccgcagcccatgaacctgatcattctggctttctagtgttatcacgctaaaatatctgatatagaagttgtgc

SEQ ID NO: 58868 - DNA, 6366 bp, Zea Mays
gaaccaagcaactatcgcttccgtcgccggcgagcctccttctccgcaaccaccgacgccgccgcgaaaggggaagcgatggggttcttggacggcttccgtcccgacacgctgctaaagcgcgtctgcaagtcgctgctcaagaagcggctgggggatctgatcctcggcgacctggacctcgatcagttcgacatccagcttggccacggcacgctgcagctcaacgacctcgctctcaacgctgagttcatcaaccgtaagttatcaggatcccctattacgctgaaagaaggatcaataaaatccttgctagtaagattcgctgctagctgcgagattgttgttgaagaattggagcttgtgctttctccatctgttgcaagtgaagttgatgatgtgcatactgaatgctctgtctctggtagtactagtgacacacacactttagtcaagatccaaagaaatgaatccgatagtaatcagtgttccacttctgtatctcgagatgtggatgatggtgtaaagagaattgccaatgccgtcaaacggtttctgacaagctttaatatcaagttaaagaatgcctatgtcatatttgatcctcaaaccagtttgagtagtagatttccagaaactagtcgatctctagttttccgaattaaagagttggaatttggaacccaacttggtctatttaaactggacaactttttaactttccgtgaggcagtcattgagtttttgaagatggatgatgtcgacacactgcttcaaaatgatctaaatagaggaacagctgacatttcagcacatcatagtactaccgcagtcttaaccggtcccattggtggattctcagggaaactcaatttaagcatcccatggaataagggttgcttgagctttgagaaaattgatgcagatgtatcagttgattcattagaattacgtttacaattcagcagcatccggtggatcatgaatgtatgggattctctccaaagaaagccagtagacgaacagagttgtgttcataatattgcagatatctctattagtgcttcgagctctgcctactgtccacctgcttcaagctctttgaagccatgttcagattctgtgatagccagtgactacatggcacagagcacattttctcaaaacaggcaggataaagttcaggattctttccttacaagcgcacacgtgataacagactggatggagcctgttgctcgtaaggatctgtgtgaccctgattcagattgtgatgaaagcattgatcagttctttgaatgttttgaggaattgaggaactcccagtcaagtttaggaaacagtggtatatgggactggacgtgttcagtattcaatgccataagttttgcatccactttagcttctggatctgatcaagttcctaaagaaccagttgtcgagaggaccttacgagcctccatcaccgagatatctgttcttcttttgttcagtgatgacacagatataaaaaattccagtgttcctatcagtgcattggatgatatgagacattctgaaatgttttcgagctgcctttcctctgagcattttgagaaatcaattatatctcctgctacagcttccagcttaaatatgcatcatctcaaagccaagtgtgagaacattcatcttgatctacagacttatccaaaaaatgtaaggctcaaggcatcaattgcccaaattaaacttgatgaatactaccacgccggaaacaatatttcagatgattcaaaccttggtaatcacttcttgaacaataacttgcggcaaggagttcaagcttccctccctcagtgcctgtttgctgttggagatcattcggtggaaacctatgaattttgtggcaatagttcaactgaattgactagagttgaattgctaaaaacttttggcgagtgcacattctgttatgatgtcagtaccaaagatcaagatggcaatttagtgagctcaacttccatgtcgatctatttggctcctttgcttttatgggtgcactttcatacaatatacatgctactgagttttgtaagtaatgttgagtctgatttgtcacatggagagcataaaattcaaaagcatggtgacgaaaagggaagcagattgactaccagcacaaccatgtcctcaagtggaagtctaaaagttcagatatccctagcacaggcaagaattgtcctgtgctttccatctgagttttcatgggatttgagccacccatctgtcctggataagttcctggtgatcgaccatacttcatgtctgaacatggtagaaactgcatcacaccctcaaaacgaaatgcaaaatgaggttcatcttagcaagtcgtgtacctcaatacatttggctgtaggggacatagatgtatatttggttaagccagtcaataatgtattggttggtagaatctgttcttcaagtaggcaaactttctctgcaatgaaaattctttctgttactggatccagttataatgactctggcatcacactgatcaggagaaagtatcctgtaactggccctgagattttgaacaatgcttggagtttgccaaagatgcatgatgaaaagatcactaaaaatcaaaacagcaaatgggctggcatttccccttcttcaaatgatcttttagagacaggatctagtatgcgccaggagctccttaagagcactgagctcttatttcatgttcaactttcttgtgtttcattacgacttagtaaaaaggattgtgagttactaaataagctgctagatcatgtcattaaggggatatcaaatgaacaaacaagcatttctggaaattccaaggaccaatctgttctgatcaatgataccttcattcaaacgtctgtcctttttgaatgcagtatattggaaatttgcactgaattgaatgaaacagtggaagttggtcctttattacaggcagaactaaaaggatcctggaactctgttaagttgaatgtttcaaaattttgtcttttctcctgttcaaatgttggaggcctcaacaatgccagttttctttgggtgaatcatggtgaaggtgagctttggggttctgttagtgctaagaatgataaaatccctggagaaagtaaagattttcttatagtggcttgcaaggactctgcctgcaggcggggtgatggtgaaggtactaatgtgctgtctattggtgctgctggctgttctgtgacccacatcaggaacccaaagctaaaagagaattacacttctgttgatgttcgttctggcacaattgtagcacctggtggccgtatggattggatcaatgcgatatgcctgctgttcagttcaggctcagatagaactgaaaagtcagatgatagtaacacaccaaatagctatcagtctggtgaaccttattcatcatctttatttatcgagttggctgatgttgctgttagctatgaacctcattttaaacattccactctcagtgctggagcagccgaccgcaagtttttctcatgccttttagctgcatcatcatttaaactccataataaatctgcatcagcctctgcagctactgattttgatatccaattacgtgatcttggagtcctcatttctcaatcatctggttcaacaaatggtacttgcagttatggtgtagattaccttcgtcaagcaggttatactaaggttgtccagaacacattcattgaagcttctctaagattagattcttccttttggaagcttgaaatatctgattcccaatttgacattggtacatgtcatgacacaacttatggtcttattggtttgggatctcaactccagcagctatatggtccagatatgcaggatgctttagatcatctgcagtctaggtggaatagtgttcagcaagcaaacaagcaaaatatggctgctgatgcatcagacaagtctgagagcagtttggagattttggtcgattctggggattaccagtcagatggacttcttgatgatattattgagaatgcttttaacacagaggattgcatggacaccaatttttgggagaacaattaccatcacttatttagtagcagtgagacggatgatggatttgagctgaatgcggccacttcacatgtatttcctatatctactccagaaggcaatgttactcaaatatcactagaacagaacgtctgtcctgatcaaatcattgattcatattgtgtgcctgaatttcatcaatcattatcaactctatgtgatgaagagcataaatgtacatctggtgacaattctcatagaaccctggaaagtgaagatgctggatggtataacaatgttcccttaacaatagttgagaatcatgttttgaaaaagaaaaacgagcaagtacttcaacacaaagtgtcttctgtttgcagtttgaatcctgatgaatattgtaatctgaaaggaaaggttcatattcatgatatagatgtaaagtggcggatgtatgctggagatgactggttattacctcagaaagatttgactagcttaacatgcacagatggaagaaataggagctcttcactggaatttactgtgagagggctcaatatccaagttgacatgtatccaaatggggatgtttctatatctaggctatctgtagctgctgaggacataactctttgtgatcaaagtatccatgctccatggaaactggttcttggatgttacaactcaaaggattacccaagagagtcatgctccagtgcattcaggttagaattggagtctgtgaggccggagccacaggctcctttggaagactacaggctccatcttgagattttgcctctacagttgcatcttgatcaagagcaacttaacttcctaataaatttcttcaagaatgattcatgtaacaatgatcctcatttgcattgcgaaaatgatactgttgatgtgaagagcacaagcaatggaagcaatatggttgtggatgaggcattacttcctttctttcagaaatttgacgtaaagccacttattctgcacattaattatataccccgtcagtttgacccgattgccctaagcaagggaaattacgcagaacttctcaacattcttccatggaagggaattgatttgaagcttaagcatgtttctgcaatgggcatttacggatggaacagcataggtgatacggtagcagcggaatggttggaagacatttctaaaaatcaggtgcacaaattgctaaaagggcttcctccaataagatcactagttgctgttggttcagggaccagaaagttggtctcgttgcccatcaaaagctacaagaaggatcggaaattgctcaagggaatgcaaagaggcgcagttgcttttattagaagtgttaccattgaggcagtagggcttggagtccatttggctgcaggagctcatgatatgcttgtgaagacagaatgcgcccttacaactgttccaccacctttagcctcatgtgaagtgaaacgaacaaagcacaacattagagctaaccaacctgaaagtgcacagcaaggaatgaaacaggcatatgaaagtttaactgacgggtttggaagaacttcctctgctatcattggcaatcctattaaagtttataaccgaggggctggtgtcggatcagttctggctactgcaatctgtggagcaccagctgctgcagtagctccaatctcagcatctgctcgtgctttacattatgcacttcttgggctaaggaacagccttgatcctgagcataagaaggaatccatgtacaaataccagggaccctcccaagcatagacgtcattggtggtcggttcattctttggcgagccttacaccatctccctgaaactggttttaggagctcctttgccagtctcgtccaatggtgaggtgtacagatcgtaagacagattatatttggcatcaaagccacacactaaattgacacataagggtttaattagcactcatattttgcaccacgaaggcacgtggaagttttgtaatccctcttcgttgcatgactgcccccgatgtacataatgtggttgctgtgtgggttgtgcggatgtaaattatcttcatgactgtccccaatgtacataatgtggctgctgcgtgagttgtgcggatgtaaatatctcttttgctttggttgcgtgtgcgcgcgcctctggtccgctgttcaagagtgtgttttgagctgctgctgctggtgtcatttgccgcagcccatgaacctgatcattctggctttctagtgttatcacgctaaaatatctgatatagaagttgtgc

SEQ ID NO: 58869 - DNA, 6355 bp, Zea Mays
agcaactatcgcttccgtcgccggcgagcctccttctccgcaaccaccgacgccgccgcgaaaggggaagcgatggggttcttggacggcttccgtcccgacacgctgctaaagcgcgtctgcaagtcgctgctcaagaagcggctgggggatctgatcctcggcgacctggacctcgatcagttcgacatccagcttggccacggcacgctgcagctcaacgacctcgctctcaacgctgagttcatcaaccgtaagttatcaggatcccctattacgctgaaagaaggatcaataaaatccttgctagtaagattcgctgctagctgcgagattgttgttgaagaattggagcttgtgctttctccatctgttgcaagtgaagttgatgatgtgcatactgaatgctctgtctctggtagtactagtgacacacacactttagtcaagatccaaagaaatgaatccgatagtaatcagtgttccacttctgtatctcgagatgtggatgatggtgtaaagagaattgccaatgccgtcaaacggtttctgacaagctttaatatcaagttaaagaatgcctatgtcatatttgatcctcaaaccagtttgagtagtagatttccagaaactagtcgatctctagttttccgaattaaagagttggaatttggaacccaacttggtctatttaaactggacaactttttaactttccgtgaggcagtcattgagtttttgaagatggatgatgtcgacacactgcttcaaaatgatctaaatagaggaacagctgacatttcagcacatcatagtactaccgcagtcttaaccggtcccattggtggattctcagggaaactcaatttaagcatcccatggaataagggttgcttgagctttgagaaaattgatgcagatgtatcagttgattcattagaattacgtttacaattcagcagcatccggtggatcatgaatgtatgggattctctccaaagaaagccagtagacgaacagagttgtgttcataatattgcagatatctctattagtgcttcgagctctgcctactgtccacctgcttcaagctctttgaagccatgttcagattctgtgatagccagtgactacatggcacagagcacattttctcaaaacaggcaggataaagttcaggattctttccttacaagcgcacacgtgataacagactggatggagcctgttgctcgtaaggatctgtgtgaccctgattcagattgtgatgaaagcattgatcagttctttgaatgttttgaggaattgaggaactcccagtcaagtttaggaaacagtggtatatgggactggacgtgttcagtattcaatgccataagttttgcatccactttagcttctggatctgatcaagttcctaaagaaccagttgtcgagaggaccttacgagcctccatcaccgagatatctgttcttcttttgttcagtgatgacacagatataaaaaattccagtgttcctatcagtgcattggatgatatgagacattctgaaatgttttcgagctgcctttcctctgagcattttgagaaatcaattatatctcctgctacagcttccagcttaaatatgcatcatctcaaagccaagtgtgagaacattcatcttgatctacagacttatccaaaaaatgtaaggctcaaggcatcaattgcccaaattaaacttgatgaatactaccacgccggaaacaatatttcagatgattcaaaccttggtaatcacttcttgaacaataacttgcggcaaggagttcaagcttccctccctcagtgcctgtttgctgttggagatcattcggtggaaacctatgaattttgtggcaatagttcaactgaattgactagagttgaattgctaaaaacttttggcgagtgcacattctgttatgatgtcagtaccaaagatcaagatggcaatttagtgagctcaacttccatgtcgatctatttggctcctttgcttttatgggtgcactttcatacaatatacatgctactgagttttgtaagtaatgttgagtctgatttgtcacatggagagcataaaattcaaaagcatggtgacgaaaagggaagcagattgactaccagcacaaccatgtcctcaagtggaagtctaaaagttcagatatccctagcacaggcaagaattgtcctgtgctttccatctgagttttcatgggatttgagccacccatctgtcctggataagttcctggtgatcgaccatacttcatgtctgaacatggtagaaactgcatcacaccctcaaaacgaaatgcaaaatgaggttcatcttagcaagtcgtgtacctcaatacatttggctgtaggggacatagatgtatatttggttaagccagtcaataatgtattggttggtagaatctgttcttcaagtaggcaaactttctctgcaatgaaaattctttctgttactggatccagttataatgactctggcatcacactgatcaggagaaagtatcctgtaactggccctgagattttgaacaatgcttggagtttgccaaagatgcatgatgaaaagatcactaaaaatcaaaacagcaaatgggctggcatttccccttcttcaaatgatcttttagagacaggatctagtatgcgccaggagctccttaagagcactgagctcttatttcatgttcaactttcttgtgtttcattacgacttagtaaaaaggattgtgagttactaaataagctgctagatcatgtcattaaggggatatcaaatgaacaaacaagcatttctggaaattccaaggaccaatctgttctgatcaatgataccttcattcaaacgtctgtcctttttgaatgcagtatattggaaatttgcactgaattgaatgaaacagtggaagttggtcctttattacaggcagaactaaaaggatcctggaactctgttaagttgaatgtttcaaaattttgtcttttctcctgttcaaatgttggaggcctcaacaatgccagttttctttgggtgaatcatggtgaaggtgagctttggggttctgttagtgctaagaatgataaaatccctggagaaagtaaagattttcttatagtggcttgcaaggactctgcctgcaggcggggtgatggtgaaggtactaatgtgctgtctattggtgctgctggctgttctgtgacccacatcaggaacccaaagctaaaagagaattacacttctgttgatgttcgttctggcacaattgtagcacctggtggccgtatggattggatcaatgcgatatgcctgctgttcagttcaggctcagatagaactgaaaagtcagatgatagtaacacaccaaatagctatcagtctggtgaaccttattcatcatctttatttatcgagttggctgatgttgctgttagctatgaacctcattttaaacattccactctcagtgctggagcagccgaccgcaagtttttctcatgccttttagctgcatcatcatttaaactccataataaatctgcatcagcctctgcagctactgattttgatatccaattacgtgatcttggagtcctcatttctcaatcatctggttcaacaaatggtacttgcagttatggtgtagattaccttcgtcaagcaggttatactaaggttgtccagaacacattcattgaagcttctctaagattagattcttccttttggaagcttgaaatatctgattcccaatttgacattggtacatgtcatgacacaacttatggtcttattggtttgggatctcaactccagcagctatatggtccagatatgcaggatgctttagatcatctgcagtctaggtggaatagtgttcagcaagcaaacaagcaaaatatggctgctgatgcatcagacaagtctgagagcagtttggagattttggtcgattctggggattaccagtcagatggacttcttgatgatattattgagaatgcttttaacacagaggattgcatggacaccaatttttgggagaacaattaccatcacttatttagtagcagtgagacggatgatggatttgagctgaatgcggccacttcacatgtatttcctatatctactccagaaggcaatgttactcaaatatcactagaacagaacgtctgtcctgatcaaatcattgattcatattgtgtgcctgaatttcatcaatcattatcaactctatgtgatgaagagcataaatgtacatctggtgacaattctcatagaaccctggaaagtgaagatgctggatggtataacaatgttcccttaacaatagttgagaatcatgttttgaaaaagaaaaacgagcaagtacttcaacacaaagtgtcttctgtttgcagtttgaatcctgatgaatattgtaatctgaaaggaaaggttcatattcatgatatagatgtaaagtggcggatgtatgctggagatgactggttattacctcagaaagatttgactagcttaacatgcacagatggaagaaataggagctcttcactggaatttactgtgagagggctcaatatccaagttgacatgtatccaaatggggatgtttctatatctaggctatctgtagctgctgaggacataactctttgtgatcaaagtatccatgctccatggaaactggttcttggatgttacaactcaaaggattacccaagagagtcatgctccagtgcattcaggttagaattggagtctgtgaggccggagccacaggctcctttggaagactacaggctccatcttgagattttgcctctacagttgcatcttgatcaagagcaacttaacttcctaataaatttcttcaagaatgattcatgtaacaatgatcctcatttgcattgcgaaaatgatactgttgatgtgaagagcacaagcaatggaagcaatatggttgtggatgaggcattacttcctttctttcagaaatttgacgtaaagccacttattctgcacattaattatataccccgtcagtttgacccgattgccctaagcaagggaaattacgcagaacttctcaacattcttccatggaagggaattgatttgaagcttaagcatgtttctgcaatgggcatttacggatggaacagcataggtgatacggtagcagcggaatggttggaagacatttctaaaaatcaggtgcacaaattgctaaaagggcttcctccaataagatcactagttgctgttggttcagggaccagaaagttggtctcgttgcccatcaaaagctacaagaaggatcggaaattgctcaagggaatgcaaagaggcgcagttgcttttattagaagtgttaccattgaggcagtagggcttggagtccatttggctgcaggagctcatgatatgcttgtgaagacagaatgcgcccttacaactgttccaccacctttagcctcatgtgaagtgaaacgaacaaagcacaacattagagctaaccaacctgaaagtgcacagcaaggaatgaaacaggcatatgaaagtttaactgacgggtttggaagaacttcctctgctatcattggcaatcctattaaagtttataaccgaggggctggtgtcggatcagttctggctactgcaatctgtggagcaccagctgctgcagtagctccaatctcagcatctgctcgtgctttacattatgcacttcttgggctaaggaacagccttgatcctgagcataagaaggaatccatgtacaaataccagggaccctcccaagcatagacgtcattggtggtcggttcattctttggcgagccttacaccatctccctgaaactggttttaggagctcctttgccagtctcgtccaatggtgtacagatcgtaagacagattatatttggcatcaaagccacacactaaattgacacataagggtttaattagcactcatattttgcaccacgaaggcacgtggaagttttgtaatccctcttcgttgcatgactgcccccgatgtacataatgtggttgctgtgtgggttgtgcggatgtaaattatcttcatgactgtccccaatgtacataatgtggctgctgcgtgagttgtgcggatgtaaatatctcttttgctttggttgcgtgtgcgcgcgcctctggtccgctgttcaagagtgtgttttgagctgctgctgctggtgtcatttgccgcagcccatgaacctgatcattctggctttctagtgttatcacgctaaaatatctgatatagaagttgtgc

SEQ ID NO: 58870 - DNA, 6157 bp, Zea Mays
gcgagcctccttctccgcaaccaccgacgccgccgcgaaaggggaagcgatggggttcttggacggcttccgtcccgacacgctgctaaagcgcgtctgcaagtcgctgctcaagaagcggctgggggatctgatcctcggcgacctggacctcgatcagttcgacatccagcttggccacggcacgctgcagctcaacgacctcgctctcaacgctgagttcatcaaccgtaagttatcaggatcccctattacgctgaaagaaggatcaataaaatccttgctagtaagattcgctgctagctgcgagattgttgttgaagaattggagcttgtgctttctccatctgttgcaagtgaagttgatgatgtgcatactgaatgctctgtctctggtagtactagtgacacacacactttagtcaagatccaaagaaatgaatccgatagtaatcagtgttccacttctgtatctcgagatgtggatgatggtgtaaagagaattgccaatgccgtcaaacggtttctgacaagctttaatatcaagttaaagaatgcctatgtcatatttgatcctcaaaccagtttgagtagtagatttccagaaactagtcgatctctagttttccgaattaaagagttggaatttggaacccaacttggtctatttaaactggacaactttttaactttccgtgaggcagtcattgagtttttgaagatggatgatgtcgacacactgcttcaaaatgatctaaatagaggaacagctgacatttcagcacatcatagtactaccgcagtcttaaccggtcccattggtggattctcagggaaactcaatttaagcatcccatggaataagggttgcttgagctttgagaaaattgatgcagatgtatcagttgattcattagaattacgtttacaattcagcagcatccggtggatcatgaatgtatgggattctctccaaagaaagccagtagacgaacagagttgtgttcataatattgcagatatctctattagtgcttcgagctctgcctactgtccacctgcttcaagctctttgaagccatgttcagattctgtgatagccagtgactacatggcacagagcacattttctcaaaacaggcaggataaagttcaggattctttccttacaagcgcacacgtgataacagactggatggagcctgttgctcgtaaggatctgtgtgaccctgattcagattgtgatgaaagcattgatcagttctttgaatgttttgaggaattgaggaactcccagtcaagtttaggaaacagtggtatatgggactggacgtgttcagtattcaatgccataagttttgcatccactttagcttctggatctgatcaagttcctaaagaaccagttgtcgagaggaccttacgagcctccatcaccgagatatctgttcttcttttgttcagtgatgacacagatataaaaaattccagtgttcctatcagtgcattggatgatatgagacattctgaaatgttttcgagctgcctttcctctgagcattttgagaaatcaattatatctcctgctacagcttccagcttaaatatgcatcatctcaaagccaagtgtgagaacattcatcttgatctacagacttatccaaaaaatgtaaggctcaaggcatcaattgcccaaattaaacttgatgaatactaccacgccggaaacaatatttcagatgattcaaaccttggtaatcacttcttgaacaataacttgcggcaaggagttcaagcttccctccctcagtgcctgtttgctgttggagatcattcggtggaaacctatgaattttgtggcaatagttcaactgaattgactagagttgaattgctaaaaacttttggcgagtgcacattctgttatgatgtcagtaccaaagatcaagatggcaatttagtgagctcaacttccatgtcgatctatttggctcctttgcttttatgggtgcactttcatacaatatacatgctactgagttttgtaagtaatgttgagtctgatttgtcacatggagagcataaaattcaaaagcatggtgacgaaaagggaagcagattgactaccagcacaaccatgtcctcaagtggaagtctaaaagttcagatatccctagcacaggcaagaattgtcctgtgctttccatctgagttttcatgggatttgagccacccatctgtcctggataagttcctggtgatcgaccatacttcatgtctgaacatggtagaaactgcatcacaccctcaaaacgaaatgcaaaatgaggttcatcttagcaagtcgtgtacctcaatacatttggctgtaggggacatagatgtatatttggttaagccagtcaataatgtattggttggtagaatctgttcttcaagtaggcaaactttctctgcaatgaaaattctttctgttactggatccagttataatgactctggcatcacactgatcaggagaaagtatcctgtaactggccctgagattttgaacaatgcttggagtttgccaaagatgcatgatgaaaagatcactaaaaatcaaaacagcaaatgggctggcatttccccttcttcaaatgatcttttagagacaggatctagtatgcgccaggagctccttaagagcactgagctcttatttcatgttcaactttcttgtgtttcattacgacttagtaaaaaggattgtgagttactaaataagctgctagatcatgtcattaaggggatatcaaatgaacaaacaagcatttctggaaattccaaggaccaatctgttctgatcaatgataccttcattcaaacgtctgtcctttttgaatgcagtatattggaaatttgcactgaattgaatgaaacagtggaagttggtcctttattacaggcagaactaaaaggatcctggaactctgttaagttgaatgtttcaaaattttgtcttttctcctgttcaaatgttggaggcctcaacaatgccagttttctttgggtgaatcatggtgaaggtgagctttggggttctgttagtgctaagaatgataaaatccctggagaaagtaaagattttcttatagtggcttgcaaggactctgcctgcaggcggggtgatggtgaaggtactaatgtgctgtctattggtgctgctggctgttctgtgacccacatcaggaacccaaagctaaaagagaattacacttctgttgatgttcgttctggcacaattgtagcacctggtggccgtatggattggatcaatgcgatatgcctgctgttcagttcaggctcagatagaactgaaaagtcagatgatagtaacacaccaaatagctatcagtctggtgaaccttattcatcatctttatttatcgagttggctgatgttgctgttagctatgaacctcattttaaacattccactctcagtgctggagcagccgaccgcaagtttttctcatgccttttagctgcatcatcatttaaactccataataaatctgcatcagcctctgcagctactgattttgatatccaattacgtgatcttggagtcctcatttctcaatcatctggttcaacaaatggtacttgcagttatggtgtagattaccttcgtcaagcaggttatactaaggttgtccagaacacattcattgaagcttctctaagattagattcttccttttggaagcttgaaatatctgattcccaatttgacattggtacatgtcatgacacaacttatggtcttattggtttgggatctcaactccagcagctatatggtccagatatgcaggatgctttagatcatctgcagtctaggtggaatagtgttcagcaagcaaacaagcaaaatatggctgctgatgcatcagacaagtctgagagcagtttggagattttggtcgattctggggattaccagtcagatggacttcttgatgatattattgagaatgcttttaacacagaggattgcatggacaccaatttttgggagaacaattaccatcacttatttagtagcagtgagacggatgatggatttgagctgaatgcggccacttcacatgtatttcctatatctactccagaaggcaatgttactcaaatatcactagaacagaacgtctgtcctgatcaaatcattgattcatattgtgtgcctgaatttcatcaatcattatcaactctatgtgatgaagagcataaatgtacatctggtgacaattctcatagaaccctggaaagtgaagatgctggatggtataacaatgttcccttaacaatagttgagaatcatgttttgaaaaagaaaaacgagcaagtacttcaacacaaagtgtcttctgtttgcagtttgaatcctgatgaatattgtaatctgaaaggaaaggttcatattcatgatatagatgtaaagtggcggatgtatgctggagatgactggttattacctcagaaagatttgactagcttaacatgcacagatggaagaaataggagctcttcactggaatttactgtgagagggctcaatatccaagttgacatgtatccaaatggggatgtttctatatctaggctatctgtagctgctgaggacataactctttgtgatcaaagtatccatgctccatggaaactggttcttggatgttacaactcaaaggattacccaagagagtcatgctccagtgcattcaggttagaattggagtctgtgaggccggagccacaggctcctttggaagactacaggctccatcttgagattttgcctctacagttgcatcttgatcaagagcaacttaacttcctaataaatttcttcaagaatgattcatgtaacaatgatcctcatttgcattgcgaaaatgatactgttgatgtgaagagcacaagcaatggaagcaatatggttgtggatgaggcattacttcctttctttcagaaatttgacgtaaagccacttattctgcacattaattatataccccgtcagtttgacccgattgccctaagcaagggaaattacgcagaacttctcaacattcttccatggaagggaattgatttgaagcttaagcatgtttctgcaatgggcatttacggatggaacagcataggtgatacggtagcagcggaatggttggaagacatttctaaaaatcaggtgcacaaattgctaaaagggcttcctccaataagatcactagttgctgttggttcagggaccagaaagttggtctcgttgcccatcaaaagctacaagaaggatcggaaattgctcaagggaatgcaaagaggcgcagttgcttttattagaagtgttaccattgaggcagtagggcttggagtccatttggctgcaggagctcatgatatgcttgtgaagacagaatgcgcccttacaactgttccaccacctttagcctcatgtgaagtgaaacgaacaaagcacaacattagagctaaccaacctgaaagtgcacagcaaggaatgaaacagccttgatcctgagcataagaaggaatccatgtacaaataccagggaccctcccaagcatagacgtcattggtggtcggttcattctttggcgagccttacaccatctccctgaaactggttttaggagctcctttgccagtctcgtccaatggtgaggtgcaaacttgtacagtgtgtacagatcgtaagacagattatatttggcatcaaagccacacactaaattgacacataagggtttaattagcactcatattttgcaccacgaaggcacgtggaagttttgtaatccctcttcgttgcatgactgcccccgatgtacataatgtggttgctgtgtgggttgtgcggatgtaaattatcttcatgactgtccccaatgtacataatgtggctgctgcgtgagttgtgcggatgtaaatatctcttttgctttggttgcgtgtgcgcgcgcctctggtccgctgttcaagagtgtgttttgagctgctgctgctggtgtcatttgccgcagcccatgaacctgatcattctggctttctagtgttatcacgctaaaatatctgatatagaagttgtgc

SEQ ID NO: 58871 - DNA, 6306 bp, Zea Mays
cctccttctccgcaaccaccgacgccgccgcgaaaggggaagcgatggggttcttggacggcttccgtcccgacacgctgctaaagcgcgtctgcaagtcgctgctcaagaagcggctgggggatctgatcctcggcgacctggacctcgatcagttcgacatccagcttggccacggcacgctgcagctcaacgacctcgctctcaacgctgagttcatcaaccgtaagttatcaggatcccctattacgctgaaagaaggatcaataaaatccttgctagtaagattcgctgctagctgcgagattgttgttgaagaattggagcttgtgctttctccatctgttgcaagtgaagttgatgatgtgcatactgaatgctctgtctctggtagtactagtgacacacacactttagtcaagatccaaagaaatgaatccgatagtaatcagtgttccacttctgtatctcgagatgtggatgatggtgtaaagagaattgccaatgccgtcaaacggtttctgacaagctttaatatcaagttaaagaatgcctatgtcatatttgatcctcaaaccagtttgagtagtagatttccagaaactagtcgatctctagttttccgaattaaagagttggaatttggaacccaacttggtctatttaaactggacaactttttaactttccgtgaggcagtcattgagtttttgaagatggatgatgtcgacacactgcttcaaaatgatctaaatagaggaacagctgacatttcagcacatcatagtactaccgcagtcttaaccggtcccattggtggattctcagggaaactcaatttaagcatcccatggaataagggttgcttgagctttgagaaaattgatgcagatgtatcagttgattcattagaattacgtttacaattcagcagcatccggtggatcatgaatgtatgggattctctccaaagaaagccagtagacgaacagagttgtgttcataatattgcagatatctctattagtgcttcgagctctgcctactgtccacctgcttcaagctctttgaagccatgttcagattctgtgatagccagtgactacatggcacagagcacattttctcaaaacaggcaggataaagttcaggattctttccttacaagcgcacacgtgataacagactggatggagcctgttgctcgtaaggatctgtgtgaccctgattcagattgtgatgaaagcattgatcagttctttgaatgttttgaggaattgaggaactcccagtcaagtttaggaaacagtggtatatgggactggacgtgttcagtattcaatgccataagttttgcatccactttagcttctggatctgatcaagttcctaaagaaccagttgtcgagaggaccttacgagcctccatcaccgagatatctgttcttcttttgttcagtgatgacacagatataaaaaattccagtgttcctatcagtgcattggatgatatgagacattctgaaatgttttcgagctgcctttcctctgagcattttgagaaatcaattatatctcctgctacagcttccagcttaaatatgcatcatctcaaagccaagtgtgagaacattcatcttgatctacagacttatccaaaaaatgtaaggctcaaggcatcaattgcccaaattaaacttgatgaatactaccacgccggaaacaatatttcagatgattcaaaccttggtaatcacttcttgaacaataacttgcggcaaggagttcaagcttccctccctcagtgcctgtttgctgttggagatcattcggtggaaacctatgaattttgtggcaatagttcaactgaattgactagagttgaattgctaaaaacttttggcgagtgcacattctgttatgatgtcagtaccaaagatcaagatggcaatttagtgagctcaacttccatgtcgatctatttggctcctttgcttttatgggtgcactttcatacaatatacatgctactgagttttgtaagtaatgttgagtctgatttgtcacatggagagcataaaattcaaaagcatggtgacgaaaagggaagcagattgactaccagcacaaccatgtcctcaagtggaagtctaaaagttcagatatccctagcacaggcaagaattgtcctgtgctttccatctgagttttcatgggatttgagccacccatctgtcctggataagttcctggtgatcgaccatacttcatgtctgaacatggtagaaactgcatcacaccctcaaaacgaaatgcaaaatgaggttcatcttagcaagtcgtgtacctcaatacatttggctgtaggggacatagatgtatatttggttaagccagtcaataatgtattggttggtagaatctgttcttcaagtaggcaaactttctctgcaatgaaaattctttctgttactggatccagttataatgactctggcatcacactgatcaggagaaagtatcctgtaactggccctgagattttgaacaatgcttggagtttgccaaagatgcatgatgaaaagatcactaaaaatcaaaacagcaaatgggctggcatttccccttcttcaaatgatcttttagagacaggatctagtatgcgccaggagctccttaagagcactgagctcttatttcatgttcaactttcttgtgtttcattacgacttagtaaaaaggattgtgagttactaaataagctgctagatcatgtcattaaggggatatcaaatgaacaaacaagcatttctggaaattccaaggaccaatctgttctgatcaatgataccttcattcaaacgtctgtcctttttgaatgcagtatattggaaatttgcactgaattgaatgaaacagtggaagttggtcctttattacaggcagaactaaaaggatcctggaactctgttaagttgaatgtttcaaaattttgtcttttctcctgttcaaatgttggaggcctcaacaatgccagttttctttgggtgaatcatggtgaaggtgagctttggggttctgttagtgctaagaatgataaaatccctggagaaagtaaagattttcttatagtggcttgcaaggactctgcctgcaggcggggtgatggtgaaggtactaatgtgctgtctattggtgctgctggctgttctgtgacccacatcaggaacccaaagctaaaagagaattacacttctgttgatgttcgttctggcacaattgtagcacctggtggccgtatggattggatcaatgcgatatgcctgctgttcagttcaggctcagatagaactgaaaagtcagatgatagtaacacaccaaatagctatcagtctggtgaaccttattcatcatctttatttatcgagttggctgatgttgctgttagctatgaacctcattttaaacattccactctcagtgctggagcagccgaccgcaagtttttctcatgccttttagctgcatcatcatttaaactccataataaatctgcatcagcctctgcagctactgattttgatatccaattacgtgatcttggagtcctcatttctcaatcatctggttcaacaaatggtacttgcagttatggtgtagattaccttcgtcaagcaggttatactaaggttgtccagaacacattcattgaagcttctctaagattagattcttccttttggaagcttgaaatatctgattcccaatttgacattggtacatgtcatgacacaacttatggtcttattggtttgggatctcaactccagcagctatatggtccagatatgcaggatgctttagatcatctgcagtctaggtggaatagtgttcagcaagcaaacaagcaaaatatggctgctgatgcatcagacaagtctgagagcagtttggagattttggtcgattctggggattaccagtcagatggacttcttgatgatattattgagaatgcttttaacacagaggattgcatggacaccaatttttgggagaacaattaccatcacttatttagtagcagtgagacggatgatggatttgagctgaatgcggccacttcacatgtatttcctatatctactccagaaggcaatgttactcaaatatcactagaacagaacgtctgtcctgatcaaatcattgattcatattgtgtgcctgaatttcatcaatcattatcaactctatgtgatgaagagcataaatgtacatctggtgacaattctcatagaaccctggaaagtgaagatgctggatggtataacaatgttcccttaacaatagttgagaatcatgttttgaaaaagaaaaacgagcaagtacttcaacacaaagtgtcttctgtttgcagtttgaatcctgatgaatattgtaatctgaaaggaaaggttcatattcatgatatagatgtaaagtggcggatgtatgctggagatgactggttattacctcagaaagatttgactagcttaacatgcacagatggaagaaataggagctcttcactggaatttactgtgagagggctcaatatccaagttgacatgtatccaaatggggatgtttctatatctaggctatctgtagctgctgaggacataactctttgtgatcaaagtatccatgctccatggaaactggttcttggatgttacaactcaaaggattacccaagagagtcatgctccagtgcattcaggttagaattggagtctgtgaggccggagccacaggctcctttggaagactacaggctccatcttgagattttgcctctacagttgcatcttgatcaagagcaacttaacttcctaataaatttcttcaagaatgattcatgtaacaatgatcctcatttgcattgcgaaaatgatactgttgatgtgaagagcacaagcaatggaagcaatatggttgtggatgaggcattacttcctttctttcagaaatttgacgtaaagccacttattctgcacattaattatataccccgtcagtttgacccgattgccctaagcaagggaaattacgcagaacttctcaacattcttccatggaagggaattgatttgaagcttaagcatgtttctgcaatgggcatttacggatggaacagcataggtgatacggtagcagcggaatggttggaagacatttctaaaaatcaggtgcacaaattgctaaaagggcttcctccaataagatcactagttgctgttggttcagggaccagaaagttggtctcgttgcccatcaaaagctacaagaaggatcggaaattgctcaagggaatgcaaagaggcgcagttgcttttattagaagtgttaccattgaggcagtagggcttggagtccatttggctgcaggagctcatgatatgcttgtgaagacagaatgcgcccttacaactgttccaccacctttagcctcatgtgaagtgaaacgaacaaagcacaacattagagctaaccaacctgaaagtgcacagcaaggaatgaaacaggcatatgaaagtttaactgacgggtttggaagaacttcctctgctatcattggcaatcctattaaagtttataaccgaggggctggtgtcggatcagttctggctactgcaatctgtggagcaccagctgctgcagtagctccaatctcagcatctgctcgtgctttacattatgcacttcttgggctaaggaacagggaccctcccaagcatagacgtcattggtggtcggttcattctttggcgagccttacaccatctccctgaaactggttttaggagctcctttgccagtctcgtccaatggtgaggtgcaaacttgtacagtgtgtacagatcgtaagacagattatatttggcatcaaagccacacactaaattgacacataagggtttaattagcactcatattttgcaccacgaaggcacgtggaagttttgtaatccctcttcgttgcatgactgcccccgatgtacataatgtggttgctgtgtgggttgtgcggatgtaaattatcttcatgactgtccccaatgtacataatgtggctgctgcgtgagttgtgcggatgtaaatatctcttttgctttggttgcgtgtgcgcgcgcctctggtccgctgttcaagagtgtgttttgagctgctgctgctggtgtcatttgccgcagcccatgaacctgatcattctggctttctagtgttatcacgctaaaatatctgatatagaagttgtgc

SEQ ID NO: 58872 - DNA, 6126 bp, Zea Mays
cttctccgcaaccaccgacgccgccgcgaaaggggaagcgatggggttcttggacggcttccgtcccgacacgctgctaaagcgcgtctgcaagtcgctgctcaagaagcggctgggggatctgatcctcggcgacctggacctcgatcagttcgacatccagcttggccacggcacgctgcagctcaacgacctcgctctcaacgctgagttcatcaaccgtaagttatcaggatcccctattacgctgaaagaaggatcaataaaatccttgctagtaagattcgctgctagctgcgagattgttgttgaagaattggagcttgtgctttctccatctgttgcaagtgaagttgatgatgtgcatactgaatgctctgtctctggtagtactagtgacacacacactttagtcaagatccaaagaaatgaatccgatagtaatcagtgttccacttctgtatctcgagatgtggatgatggtgtaaagagaattgccaatgccgtcaaacggtttctgacaagctttaatatcaagttaaagaatgcctatgtcatatttgatcctcaaaccagtttgagtagtagatttccagaaactagtcgatctctagttttccgaattaaagagttggaatttggaacccaacttggtctatttaaactggacaactttttaactttccgtgaggcagtcattgagtttttgaagatggatgatgtcgacacactgcttcaaaatgatctaaatagaggaacagctgacatttcagcacatcatagtactaccgcagtcttaaccggtcccattggtggattctcagggaaactcaatttaagcatcccatggaataagggttgcttgagctttgagaaaattgatgcagatgtatcagttgattcattagaattacgtttacaattcagcagcatccggtggatcatgaatgtatgggattctctccaaagaaagccagtagacgaacagagttgtgttcataatattgcagatatctctattagtgcttcgagctctgcctactgtccacctgcttcaagctctttgaagccatgttcagattctgtgatagccagtgactacatggcacagagcacattttctcaaaacaggcaggataaagttcaggattctttccttacaagcgcacacgtgataacagactggatggagcctgttgctcgtaaggatctgtgtgaccctgattcagattgtgatgaaagcattgatcagttctttgaatgttttgaggaattgaggaactcccagtcaagtttaggaaacagtggtatatgggactggacgtgttcagtattcaatgccataagttttgcatccactttagcttctggatctgatcaagttcctaaagaaccagttgtcgagaggaccttacgagcctccatcaccgagatatctgttcttcttttgttcagtgatgacacagatataaaaaattccagtgttcctatcagtgcattggatgatatgagacattctgaaatgttttcgagctgcctttcctctgagcattttgagaaatcaattatatctcctgctacagcttccagcttaaatatgcatcatctcaaagccaagtgtgagaacattcatcttgatctacagacttatccaaaaaatgtaaggctcaaggcatcaattgcccaaattaaacttgatgaatactaccacgccggaaacaatatttcagatgattcaaaccttggtaatcacttcttgaacaataacttgcggcaaggagttcaagcttccctccctcagtgcctgtttgctgttggagatcattcggtggaaacctatgaattttgtggcaatagttcaactgaattgactagagttgaattgctaaaaacttttggcgagtgcacattctgttatgatgtcagtaccaaagatcaagatggcaatttagtgagctcaacttccatgtcgatctatttggctcctttgcttttatgggtgcactttcatacaatatacatgctactgagttttgtaagtaatgttgagtctgatttgtcacatggagagcataaaattcaaaagcatggtgacgaaaagggaagcagattgactaccagcacaaccatgtcctcaagtggaagtctaaaagttcagatatccctagcacaggcaagaattgtcctgtgctttccatctgagttttcatgggatttgagccacccatctgtcctggataagttcctggtgatcgaccatacttcatgtctgaacatggtagaaactgcatcacaccctcaaaacgaaatgcaaaatgaggttcatcttagcaagtcgtgtacctcaatacatttggctgtaggggacatagatgtatatttggttaagccagtcaataatgtattggttggtagaatctgttcttcaagtaggcaaactttctctgcaatgaaaattctttctgttactggatccagttataatgactctggcatcacactgatcaggagaaagtatcctgtaactggccctgagattttgaacaatgcttggagtttgccaaagatgcatgatgaaaagatcactaaaaatcaaaacagcaaatgggctggcatttccccttcttcaaatgatcttttagagacaggatctagtatgcgccaggagctccttaagagcactgagctcttatttcatgttcaactttcttgtgtttcattacgacttagtaaaaaggattgtgagttactaaataagctgctagatcatgtcattaaggggatatcaaatgaacaaacaagcatttctggaaattccaaggaccaatctgttctgatcaatgataccttcattcaaacgtctgtcctttttgaatgcagtatattggaaatttgcactgaattgaatgaaacagtggaagttggtcctttattacaggcagaactaaaaggatcctggaactctgttaagttgaatgtttcaaaattttgtcttttctcctgttcaaatgttggaggcctcaacaatgccagttttctttgggtgaatcatggtgaaggtgagctttggggttctgttagtgctaagaatgataaaatccctggagaaagtaaagattttcttatagtggcttgcaaggactctgcctgcaggcggggtgatggtgaaggtactaatgtgctgtctattggtgctgctggctgttctgtgacccacatcaggaacccaaagctaaaagagaattacacttctgttgatgttcgttctggcacaattgtagcacctggtggccgtatggattggatcaatgcgatatgcctgctgttcagttcaggctcagatagaactgaaaagtcagatgatagtaacacaccaaatagctatcagtctggtgaaccttattcatcatctttatttatcgagttggctgatgttgctgttagctatgaacctcattttaaacattccactctcagtgctggagcagccgaccgcaagtttttctcatgccttttagctgcatcatcatttaaactccataataaatctgcatcagcctctgcagctactgattttgatatccaattacgtgatcttggagtcctcatttctcaatcatctggttcaacaaatggtacttgcagttatggtgtagattaccttcgtcaagcaggttatactaaggttgtccagaacacattcattgaagcttctctaagattagattcttccttttggaagcttgaaatatctgattcccaatttgacattggtacatgtcatgacacaacttatggtcttattggtttgggatctcaactccagcagctatatggtccagatatgcaggatgctttagatcatctgcagtctaggtggaatagtgttcagcaagcaaacaagcaaaatatggctgctgatgcatcagacaagtctgagagcagtttggagattttggtcgattctggggattaccagtcagatggacttcttgatgatattattgagaatgcttttaacacagaggattgcatggacaccaatttttgggagaacaattaccatcacttatttagtagcagtgagacggatgatggatttgagctgaatgcggccacttcacatgtatttcctatatctactccagaaggcaatgttactcaaatatcactagaacagaacgtctgtcctgatcaaatcattgattcatattgtgtgcctgaatttcatcaatcattatcaactctatgtgatgaagagcataaatgtacatctggtgacaattctcatagaaccctggaaagtgaagatgctggatggtataacaatgttcccttaacaatagttgagaatcatgttttgaaaaagaaaaacgagcaagtacttcaacacaaagtgtcttctgtttgcagtttgaatcctgatgaatattgtaatctgaaaggaaaggttcatattcatgatatagatgtaaagtggcggatgtatgctggagatgactggttattacctcagaaagatttgactagcttaacatgcacagatggaagaaataggagctcttcactggaatttactgtgagagggctcaatatccaagttgacatgtatccaaatggggatgtttctatatctaggctatctgtagctgctgaggacataactctttgtgatcaaagtatccatgctccatggaaactggttcttggatgttacaactcaaaggattacccaagagagtcatgctccagtgcattcaggttagaattggagtctgtgaggccggagccacaggctcctttggaagactacaggctccatcttgagattttgcctctacagttgcatcttgatcaagagcaacttaacttcctaataaatttcttcaagaatgattcatgtaacaatgatcctcatttgcattgcgaaaatgatactgttgatgtgaagagcacaagcaatggaagcaatatggttgtggatgaggcattacttcctttctttcagaaatttgacgtaaagccacttattctgcacattaattatataccccgtcagtttgacccgattgccctaagcaagggaaattacgcagaacttctcaacattcttccatggaagggaattgatttgaagcttaagcatgtttctgcaatgggcatttacggatggaacagcataggtgatacggtagcagcggaatggttggaagacatttctaaaaatcaggtgcacaaattgctaaaagggcttcctccaataagatcactagttgctgttggttcagggaccagaaagttggtctcgttgcccatcaaaagctacaagaaggatcggaaattgctcaagggaatgcaaagaggcgcagttgcttttattagaagtgttaccattgaggcagtagggcttggagtccatttggctgcaggagctcatgatatgcttgtgaagacagaatgcgcccttacaactgttccaccacctttagcctcatgtgaagtgaaacgaacaaagcacaacattagagctaaccaacctgaaagtgcacagcaaggaatgaaacagccttgatcctgagcataagaaggaatccatgtacaaataccagggaccctcccaagcatagacgtcattggtggtcggttcattctttggcgagccttacaccatctccctgaaactggttttaggagctcctttgccagtctcgtccaatggtgtacagatcgtaagacagattatatttggcatcaaagccacacactaaattgacacataagggtttaattagcactcatattttgcaccacgaaggcacgtggaagttttgtaatccctcttcgttgcatgactgcccccgatgtacataatgtggttgctgtgtgggttgtgcggatgtaaattatcttcatgactgtccccaatgtacataatgtggctgctgcgtgagttgtgcggatgtaaatatctcttttgctttggttgcgtgtgcgcgcgcctctggtccgctgttcaagagtgtgttttgagctgctgctgctggtgtcatttgccgcagcccatgaacctgatcattctggctttctagtgttatcacgctaaaatatctgatatagaagttgtgc

SEQ ID NO: 58873 - DNA, 6091 bp, Zea Mays
atggggttcttggacggcttccgtcccgacacgctgctaaagcgcgtctgcaagtcgctgctcaagaagcggctgggggatctgatcctcggcgacctggacctcgatcagttcgacatccagcttggccacggcacgctgcagctcaacgacctcgctctcaacgctgagttcatcaaccgtaagttatcaggatcccctattacgctgaaagaaggatcaataaaatccttgctagtaagattcgctgctagctgcgagattgttgttgaagaattggagcttgtgctttctccatctgttgcaagtgaagttgatgatgtgcatactgaatgctctgtctctggtagtactagtgacacacacactttagtcaagatccaaagaaatgaatccgatagtaatcagtgttccacttctgtatctcgagatgtggatgatggtgtaaagagaattgccaatgccgtcaaacggtttctgacaagctttaatatcaagttaaagaatgcctatgtcatatttgatcctcaaaccagtttgagtagtagatttccagaaactagtcgatctctagttttccgaattaaagagttggaatttggaacccaacttggtctatttaaactggacaactttttaactttccgtgaggcagtcattgagtttttgaagatggatgatgtcgacacactgcttcaaaatgatctaaatagaggaacagctgacatttcagcacatcatagtactaccgcagtcttaaccggtcccattggtggattctcagggaaactcaatttaagcatcccatggaataagggttgcttgagctttgagaaaattgatgcagatgtatcagttgattcattagaattacgtttacaattcagcagcatccggtggatcatgaatgtatgggattctctccaaagaaagccagtagacgaacagagttgtgttcataatattgcagatatctctattagtgcttcgagctctgcctactgtccacctgcttcaagctctttgaagccatgttcagattctgtgatagccagtgactacatggcacagagcacattttctcaaaacaggcaggataaagttcaggattctttccttacaagcgcacacgtgataacagactggatggagcctgttgctcgtaaggatctgtgtgaccctgattcagattgtgatgaaagcattgatcagttctttgaatgttttgaggaattgaggaactcccagtcaagtttaggaaacagtggtatatgggactggacgtgttcagtattcaatgccataagttttgcatccactttagcttctggatctgatcaagttcctaaagcttccagcttaaatatgcatcatctcaaagccaagtgtgagaacattcatcttgatctacagacttatccaaaaaatgtaaggctcaaggcatcaattgcccaaattaaacttgatgaatactaccacgccggaaacaatatttcagatgattcaaaccttggtaatcacttcttgaacaataacttgcggcaaggagttcaagcttccctccctcagtgcctgtttgctgttggagatcattcggtggaaacctatgaattttgtggcaatagttcaactgaattgactagagttgaattgctaaaaacttttggcgagtgcacattctgttatgatgtcagtaccaaagatcaagatggcaatttagtgagctcaacttccatgtcgatctatttggctcctttgcttttatgggtgcactttcatacaatatacatgctactgagttttgtaagtaatgttgagtctgatttgtcacatggagagcataaaattcaaaagcatggtgacgaaaagggaagcagattgactaccagcacaaccatgtcctcaagtggaagtctaaaagttcagatatccctagcacaggcaagaattgtcctgtgctttccatctgagttttcatgggatttgagccacccatctgtcctggataagttcctggtgatcgaccatacttcatgtctgaacatggtagaaactgcatcacaccctcaaaacgaaatgcaaaatgaggttcatcttagcaagtcgtgtacctcaatacatttggctgtaggggacatagatgtatatttggttaagccagtcaataatgtattggttggtagaatctgttcttcaagtaggcaaactttctctgcaatgaaaattctttctgttactggatccagttataatgactctggcatcacactgatcaggagaaagtatcctgtaactggccctgagattttgaacaatgcttggagtttgccaaagatgcatgatgaaaagatcactaaaaatcaaaacagcaaatgggctggcatttccccttcttcaaatgatcttttagagacaggatctagtatgcgccaggagctccttaagagcactgagctcttatttcatgttcaactttcttgtgtttcattacgacttagtaaaaaggattgtgagttactaaataagctgctagatcatgtcattaaggggatatcaaatgaacaaacaagcatttctggaaattccaaggaccaatctgttctgatcaatgataccttcattcaaacgtctgtcctttttgaatgcagtatattggaaatttgcactgaattgaatgaaacagtggaagttggtcctttattacaggcagaactaaaaggatcctggaactctgttaagttgaatgtttcaaaattttgtcttttctcctgttcaaatgttggaggcctcaacaatgccagttttctttgggtgaatcatggtgaaggtgagctttggggttctgttagtgctaagaatgataaaatccctggagaaagtaaagattttcttatagtggcttgcaaggactctgcctgcaggcggggtgatggtgaaggtactaatgtgctgtctattggtgctgctggctgttctgtgacccacatcaggaacccaaagctaaaagagaattacacttctgttgatgttcgttctggcacaattgtagcacctggtggccgtatggattggatcaatgcgatatgcctgctgttcagttcaggctcagatagaactgaaaagtcagatgatagtaacacaccaaatagctatcagtctggtgaaccttattcatcatctttatttatcgagttggctgatgttgctgttagctatgaacctcattttaaacattccactctcagtgctggagcagccgaccgcaagtttttctcatgccttttagctgcatcatcatttaaactccataataaatctgcatcagcctctgcagctactgattttgatatccaattacgtgatcttggagtcctcatttctcaatcatctggttcaacaaatggtacttgcagttatggtgtagattaccttcgtcaagcaggttatactaaggttgtccagaacacattcattgaagcttctctaagattagattcttccttttggaagcttgaaatatctgattcccaatttgacattggtacatgtcatgacacaacttatggtcttattggtttgggatctcaactccagcagctatatggtccagatatgcaggatgctttagatcatctgcagtctaggtggaatagtgttcagcaagcaaacaagcaaaatatggctgctgatgcatcagacaagtctgagagcagtttggagattttggtcgattctggggattaccagtcagatggacttcttgatgatattattgagaatgcttttaacacagaggattgcatggacaccaatttttgggagaacaattaccatcacttatttagtagcagtgagacggatgatggatttgagctgaatgcggccacttcacatgtatttcctatatctactccagaaggcaatgttactcaaatatcactagaacagaacgtctgtcctgatcaaatcattgattcatattgtgtgcctgaatttcatcaatcattatcaactctatgtgatgaagagcataaatgtacatctggtgacaattctcatagaaccctggaaagtgaagatgctggatggtataacaatgttcccttaacaatagttgagaatcatgttttgaaaaagaaaaacgagcaagtacttcaacacaaagtgtcttctgtttgcagtttgaatcctgatgaatattgtaatctgaaaggaaaggttcatattcatgatatagatgtaaagtggcggatgtatgctggagatgactggttattacctcagaaagatttgactagcttaacatgcacagatggaagaaataggagctcttcactggaatttactgtgagagggctcaatatccaagttgacatgtatccaaatggggatgtttctatatctaggctatctgtagctgctgaggacataactctttgtgatcaaagtatccatgctccatggaaactggttcttggatgttacaactcaaaggattacccaagagagtcatgctccagtgcattcaggttagaattggagtctgtgaggccggagccacaggctcctttggaagactacaggctccatcttgagattttgcctctacagttgcatcttgatcaagagcaacttaacttcctaataaatttcttcaagaatgattcatgtaacaatgatcctcatttgcattgcgaaaatgatactgttgatgtgaagagcacaagcaatggaagcaatatggttgtggatgaggcattacttcctttctttcagaaatttgacgtaaagccacttattctgcacattaattatataccccgtcagtttgacccgattgccctaagcaagggaaattacgcagaacttctcaacattcttccatggaagggaattgatttgaagcttaagcatgtttctgcaatgggcatttacggatggaacagcataggtgatacggtagcagcggaatggttggaagacatttctaaaaatcaggtgcacaaattgctaaaagggcttcctccaataagatcactagttgctgttggttcagggaccagaaagttggtctcgttgcccatcaaaagctacaagaaggatcggaaattgctcaagggaatgcaaagaggcgcagttgcttttattagaagtgttaccattgaggcagtagggcttggagtccatttggctgcaggagctcatgatatgcttgtgaagacagaatgcgcccttacaactgttccaccacctttagcctcatgtgaagtgaaacgaacaaagcacaacattagagctaaccaacctgaaagtgcacagcaaggaatgaaacaggcatatgaaagtttaactgacgggtttggaagaacttcctctgctatcattggcaatcctattaaagtttataaccgaggggctggtgtcggatcagttctggctactgcaatctgtggagcaccagctgctgcagtagctccaatctcagcatctgctcgtgctttacattatgcacttcttgggctaaggaacagccttgatcctgagcataagaaggaatccatgtacaaataccagggaccctcccaagcatagacgtcattggtggtcggttcattctttggcgagccttacaccatctccctgaaactggttttaggagctcctttgccagtctcgtccaatggtgtacagatcgtaagacagattatatttggcatcaaagccacacactaaattgacacataagggtttaattagcactcatattttgcaccacgaaggcacgtggaagttttgtaatccctcttcgttgcatgactgcccccgatgtacataatgtggttgctgtgtgggttgtgcggatgtaaattatcttcatgactgtccccaatgtacataatgtggctgctgcgtgagttgtgcggatgtaaatatctcttttgctttggttgcgtgtgcgcgcgcctctggtccgctgttcaagagtgtgttttgagctgctgctgctggtgtcatttgccgcagcccatgaacctgatcattctggctttctagtgttatcacgctaaaatatctgatatagaagttgtgc

SEQ ID NO: 58874 - DNA, 5111 bp, Zea Mays
gttatttctgacagcattgatcagttctttgaatgttttgaggaattgaggaactcccagtcaagtttaggaaacagtggtatatgggactggacgtgttcagtattcaatgccataagttttgcatccactttagcttctggatctgatcaagttcctaaagaaccagttgtcgagaggaccttacgagcctccatcaccgagatatctgttcttcttttgttcagtgatgacacagatataaaaaattccagtgttcctatcagtgcattggatgatatgagacattctgaaatgttttcgagctgcctttcctctgagcattttgagaaatcaattatatctcctgctacagcttccagcttaaatatgcatcatctcaaagccaagtgtgagaacattcatcttgatctacagacttatccaaaaaatgtaaggctcaaggcatcaattgcccaaattaaacttgatgaatactaccacgccggaaacaatatttcagatgattcaaaccttggtaatcacttcttgaacaataacttgcggcaaggagttcaagcttccctccctcagtgcctgtttgctgttggagatcattcggtggaaacctatgaattttgtggcaatagttcaactgaattgactagagttgaattgctaaaaacttttggcgagtgcacattctgttatgatgtcagtaccaaagatcaagatggcaatttagtgagctcaacttccatgtcgatctatttggctcctttgcttttatgggtgcactttcatacaatatacatgctactgagttttgtaagtaatgttgagtctgatttgtcacatggagagcataaaattcaaaagcatggtgacgaaaagggaagcagattgactaccagcacaaccatgtcctcaagtggaagtctaaaagttcagatatccctagcacaggcaagaattgtcctgtgctttccatctgagttttcatgggatttgagccacccatctgtcctggataagttcctggtgatcgaccatacttcatgtctgaacatggtagaaactgcatcacaccctcaaaacgaaatgcaaaatgaggttcatcttagcaagtcgtgtacctcaatacatttggctgtaggggacatagatgtatatttggttaagccagtcaataatgtattggttggtagaatctgttcttcaagtaggcaaactttctctgcaatgaaaattctttctgttactggatccagttataatgactctggcatcacactgatcaggagaaagtatcctgtaactggccctgagattttgaacaatgcttggagtttgccaaagatgcatgatgaaaagatcactaaaaatcaaaacagcaaatgggctggcatttccccttcttcaaatgatcttttagagacaggatctagtatgcgccaggagctccttaagagcactgagctcttatttcatgttcaactttcttgtgtttcattacgacttagtaaaaaggattgtgagttactaaataagctgctagatcatgtcattaaggggatatcaaatgaacaaacaagcatttctggaaattccaaggaccaatctgttctgatcaatgataccttcattcaaacgtctgtcctttttgaatgcagtatattggaaatttgcactgaattgaatgaaacagtggaagttggtcctttattacaggcagaactaaaaggatcctggaactctgttaagttgaatgtttcaaaattttgtcttttctcctgttcaaatgttggaggcctcaacaatgccagttttctttgggtgaatcatggtgaaggtgagctttggggttctgttagtgctaagaatgataaaatccctggagaaagtaaagattttcttatagtggcttgcaaggactctgcctgcaggcggggtgatggtgaaggtactaatgtgctgtctattggtgctgctggctgttctgtgacccacatcaggaacccaaagctaaaagagaattacacttctgttgatgttcgttctggcacaattgtagcacctggtggccgtatggattggatcaatgcgatatgcctgctgttcagttcaggctcagatagaactgaaaagtcagatgatagtaacacaccaaatagctatcagtctggtgaaccttattcatcatctttatttatcgagttggctgatgttgctgttagctatgaacctcattttaaacattccactctcagtgctggagcagccgaccgcaagtttttctcatgccttttagctgcatcatcatttaaactccataataaatctgcatcagcctctgcagctactgattttgatatccaattacgtgatcttggagtcctcatttctcaatcatctggttcaacaaatggtacttgcagttatggtgtagattaccttcgtcaagcaggttatactaaggttgtccagaacacattcattgaagcttctctaagattagattcttccttttggaagcttgaaatatctgattcccaatttgacattggtacatgtcatgacacaacttatggtcttattggtttgggatctcaactccagcagctatatggtccagatatgcaggatgctttagatcatctgcagtctaggtggaatagtgttcagcaagcaaacaagcaaaatatggctgctgatgcatcagacaagtctgagagcagtttggagattttggtcgattctggggattaccagtcagatggacttcttgatgatattattgagaatgcttttaacacagaggattgcatggacaccaatttttgggagaacaattaccatcacttatttagtagcagtgagacggatgatggatttgagctgaatgcggccacttcacatgtatttcctatatctactccagaaggcaatgttactcaaatatcactagaacagaacgtctgtcctgatcaaatcattgattcatattgtgtgcctgaatttcatcaatcattatcaactctatgtgatgaagagcataaatgtacatctggtgacaattctcatagaaccctggaaagtgaagatgctggatggtataacaatgttcccttaacaatagttgagaatcatgttttgaaaaagaaaaacgagcaagtacttcaacacaaagtgtcttctgtttgcagtttgaatcctgatgaatattgtaatctgaaaggaaaggttcatattcatgatatagatgtaaagtggcggatgtatgctggagatgactggttattacctcagaaagatttgactagcttaacatgcacagatggaagaaataggagctcttcactggaatttactgtgagagggctcaatatccaagttgacatgtatccaaatggggatgtttctatatctaggctatctgtagctgctgaggacataactctttgtgatcaaagtatccatgctccatggaaactggttcttggatgttacaactcaaaggattacccaagagagtcatgctccagtgcattcaggttagaattggagtctgtgaggccggagccacaggctcctttggaagactacaggctccatcttgagattttgcctctacagttgcatcttgatcaagagcaacttaacttcctaataaatttcttcaagaatgattcatgtaacaatgatcctcatttgcattgcgaaaatgatactgttgatgtgaagagcacaagcaatggaagcaatatggttgtggatgaggcattacttcctttctttcagaaatttgacgtaaagccacttattctgcacattaattatataccccgtcagtttgacccgattgccctaagcaagggaaattacgcagaacttctcaacattcttccatggaagggaattgatttgaagcttaagcatgtttctgcaatgggcatttacggatggaacagcataggtgatacggtagcagcggaatggttggaagacatttctaaaaatcaggtgcacaaattgctaaaagggcttcctccaataagatcactagttgctgttggttcagggaccagaaagttggtctcgttgcccatcaaaagctacaagaaggatcggaaattgctcaagggaatgcaaagagttgcttttattagaagtgttaccattgaggcagtagggcttggagtccatttggctgcaggagctcatgatatgcttgtgaagacagaatgcgcccttacaactgttccaccacctttagcctcatgtgaagtgaaacgaacaaagcacaacattagagctaaccaacctgaaagtgcacagcaaggaatgaaacaggcatatgaaagtttaactgacgggtttggaagaacttcctctgctatcattggcaatcctattaaagtttataaccgaggggctggtgtcggatcagttctggctactgcaatctgtggagcaccagctgctgcagtagctccaatctcagcatctgctcgtgctttacattatgcacttcttgggctaaggaacagccttgatcctgagcataagaaggaatccatgtacaaataccagggaccctcccaagcatagacgtcattggtggtcggttcattctttggcgagccttacaccatctccctgaaactggttttaggagctcctttgccagtctcgtccaatggtgaggtgcaaacttgtacagtgtgtacagatcgtaagacagattatatttggcatcaaagccacacactaaattgacacataagggtttaattagcactcatattttgcaccacgaaggcacgtggaagttttgtaatccctcttcgttgcatgactgcccccgatgtacataatgtggttgctgtgtgggttgtgcggatgtaaattatcttcatgactgtccccaatgtacataatgtggctgctgcgtgagttgtgcggatgtaaatatctcttttgctttggttgcgtgtgcgcgcgcctctggtccgctgttcaagagtgtgttttgagctgctgctgctggtgtcatttgccgcagcccatgaacctgatcattctggctttctagtgttatcacgctaaaatatctgatatagaagttgtgc

SEQ ID NO: 58875 - DNA, 4914 bp, Zea Mays
gttatttctgacagcattgatcagttctttgaatgttttgaggaattgaggaactcccagtcaagtttaggaaacagtggtatatgggactggacgtgttcagtattcaatgccataagttttgcatccactttagcttctggatctgatcaagttcctaaagttgtcgagaggaccttacgagcctccatcaccgagatatctgttcttcttttgttcagtgatgacacagatataaaaaattccagtgttcctatcagtgcattggatgatatgagacattctgaaatgttttcgagctgcctttcctctgagcattttgagaaatcaattatatctcctgctacagcttccagcttaaatatgcatcatctcaaagccaagtgtgagaacattcatcttgatctacagacttatccaaaaaatgtaaggctcaaggcatcaattgcccaaattaaacttgatgaatactaccacgccggaaacaatatttcagatgattcaaaccttggtaatcacttcttgaacaataacttgcggcaaggagttcaagcttccctccctcagtgcctgtttgctgttggagatcattcggtggaaacctatgaattttgtggcaatagttcaactgaattgactagagttgaattgctaaaaacttttggcgagtgcacattctgttatgatgtcagtaccaaagatcaagatggcaatttagtgagctcaacttccatgtcgatctatttggctcctttgcttttatgggtgcactttcatacaatatacatgctactgagttttgtaagtaatgttgagtctgatttgtcacatggagagcataaaattcaaaagcatggtgacgaaaagggaagcagattgactaccagcacaaccatgtcctcaagtggaagtctaaaagttcagatatccctagcacaggcaagaattgtcctgtgctttccatctgagttttcatgggatttgagccacccatctgtcctggataagttcctggtgatcgaccatacttcatgtctgaacatggtagaaactgcatcacaccctcaaaacgaaatgcaaaatgaggttcatcttagcaagtcgtgtacctcaatacatttggctgtaggggacatagatgtatatttggttaagccagtcaataatgtattggttggtagaatctgttcttcaagtaggcaaactttctctgcaatgaaaattctttctgttactggatccagttataatgactctggcatcacactgatcaggagaaagtatcctgtaactggccctgagattttgaacaatgcttggagtttgccaaagatgcatgatgaaaagatcactaaaaatcaaaacagcaaatgggctggcatttccccttcttcaaatgatcttttagagacaggatctagtatgcgccaggagctccttaagagcactgagctcttatttcatgttcaactttcttgtgtttcattacgacttagtaaaaaggattgtgagttactaaataagctgctagatcatgtcattaaggggatatcaaatgaacaaacaagcatttctggaaattccaaggaccaatctgttctgatcaatgataccttcattcaaacgtctgtcctttttgaatgcagtatattggaaatttgcactgaattgaatgaaacagtggaagttggtcctttattacaggcagaactaaaaggatcctggaactctgttaagttgaatgtttcaaaattttgtcttttctcctgttcaaatgttggaggcctcaacaatgccagttttctttgggtgaatcatggtgaaggtgagctttggggttctgttagtgctaagaatgataaaatccctggagaaagtaaagattttcttatagtggcttgcaaggactctgcctgcaggcggggtgatggtgaaggtactaatgtgctgtctattggtgctgctggctgttctgtgacccacatcaggaacccaaagctaaaagagaattacacttctgttgatgttcgttctggcacaattgtagcacctggtggccgtatggattggatcaatgcgatatgcctgctgttcagttcaggctcagatagaactgaaaagtcagatgatagtaacacaccaaatagctatcagtctggtgaaccttattcatcatctttatttatcgagttggctgatgttgctgttagctatgaacctcattttaaacattccactctcagtgctggagcagccgaccgcaagtttttctcatgccttttagctgcatcatcatttaaactccataataaatctgcatcagcctctgcagctactgattttgatatccaattacgtgatcttggagtcctcatttctcaatcatctggttcaacaaatggtacttgcagttatggtgtagattaccttcgtcaagcaggttatactaaggttgtccagaacacattcattgaagcttctctaagattagattcttccttttggaagcttgaaatatctgattcccaatttgacattggtacatgtcatgacacaacttatggtcttattggtttgggatctcaactccagcagctatatggtccagatatgcaggatgctttagatcatctgcagtctaggtggaatagtgttcagcaagcaaacaagcaaaatatggctgctgatgcatcagacaagtctgagagcagtttggagattttggtcgattctggggattaccagtcagatggacttcttgatgatattattgagaatgcttttaacacagaggattgcatggacaccaatttttgggagaacaattaccatcacttatttagtagcagtgagacggatgatggatttgagctgaatgcggccacttcacatgtatttcctatatctactccagaaggcaatgttactcaaatatcactagaacagaacgtctgtcctgatcaaatcattgattcatattgtgtgcctgaatttcatcaatcattatcaactctatgtgatgaagagcataaatgtacatctggtgacaattctcatagaaccctggaaagtgaagatgctggatggtataacaatgttcccttaacaatagttgagaatcatgttttgaaaaagaaaaacgagcaagtacttcaacacaaagtgtcttctgtttgcagtttgaatcctgatgaatattgtaatctgaaaggaaaggttcatattcatgatatagatgtaaagtggcggatgtatgctggagatgactggttattacctcagaaagatttgactagcttaacatgcacagatggaagaaataggagctcttcactggaatttactgtgagagggctcaatatccaagttgacatgtatccaaatggggatgtttctatatctaggctatctgtagctgctgaggacataactctttgtgatcaaagtatccatgctccatggaaactggttcttggatgttacaactcaaaggattacccaagagagtcatgctccagtgcattcaggttagaattggagtctgtgaggccggagccacaggctcctttggaagactacaggctccatcttgagattttgcctctacagttgcatcttgatcaagagcaacttaacttcctaataaatttcttcaagaatgattcatgtaacaatgatcctcatttgcattgcgaaaatgatactgttgatgtgaagagcacaagcaatggaagcaatatggttgtggatgaggcattacttcctttctttcagaaatttgacgtaaagccacttattctgcacattaattatataccccgtcagtttgacccgattgccctaagcaagggaaattacgcagaacttctcaacattcttccatggaagggaattgatttgaagcttaagcatgtttctgcaatgggcatttacggatggaacagcataggtgatacggtagcagcggaatggttggaagacatttctaaaaatcaggtgcacaaattgctaaaagggcttcctccaataagatcactagttgctgttggttcagggaccagaaagttggtctcgttgcccatcaaaagctacaagaaggatcggaaattgctcaagggaatgcaaagaggcgcagttgcttttattagaagtgttaccattgaggcagtagggcttggagtccatttggctgcaggagctcatgatatgcttgtgaagacagaatgcgcccttacaactgttccaccacctttagcctcatgtgaagtgaaacgaacaaagcacaacattagagctaaccaacctgaaagtgcacagcaaggaatgaaacagccttgatcctgagcataagaaggaatccatgtacaaataccagggaccctcccaagcatagacgtcattggtggtcggttcattctttggcgagccttacaccatctccctgaaactggttttaggagctcctttgccagtctcgtccaatggtgaggtgcaaacttgtacagtgtgtacagatcgtaagacagattatatttggcatcaaagccacacactaaattgacacataagggtttaattagcactcatattttgcaccacgaaggcacgtggaagttttgtaatccctcttcgttgcatgactgcccccgatgtacataatgtggttgctgtgtgggttgtgcggatgtaaattatcttcatgactgtccccaatgtacataatgtggctgctgcgtgagttgtgcggatgtaaatatctcttttgctttggttgcgtgtgcgcgcgcctctggtccgctgttcaagagtgtgttttgagctgctgctgctggtgtcatttgccgcagcccatgaacctgatcattctggctttctagtgttatcacgctaaaatatctgatatagaagttgtgc

SEQ ID NO: 58876 - DNA, 2066 bp, Zea Mays
gcacacatttttcttctaaaatctacagtacactacatacaaactctagactgtacgtcggcacatgtgaatacattgagcgtacaagcggccatcactgagtagcaagatcgttgcacaccgctcggaagagaaatgattgccacgacccgcggcagctcggcgaaggcggcggcggcggtgggcggcaaggcggcgcgcgcctgtgacgggtgcctgcggcggcgggcgaggtggtactgcgcggcggacgacgcgttcctgtgccaagggtgcgacacgtcggtgcactcggcgaacccgctcgcgcggcggcacgagcggctgcgcctgtgcccggcgtctccgctgcagacgccgccagatcgctcggcggcggcggcagcgacggcgactaataagcgcgagcgtcacgacgaggtggcggtgcccgcgtggttcgggcgcaaggcgcgaaccccgcgcggcgggcacgccaaaagcgtcggccaggtggcgttgtcgcggcgcctcgtcgtaccgcatgcggctggcggggactcagactcacccgatgagcgaaacggcggcgaggaggagcagctgctctaccgcgtgcccatccttgaccccgccctagccgagttctgctcgcccccgcctctcgaggacgcggccggtctcgctctcgacgcgtcggtgtgcaacgaagacggcgccatcgaggaccccgcgaagccggatcctgcggcgccgctggcccagttctgccccgtcagcggccatttcaacttcggcccgaccgacgccgagctcagggagttcgccgcggacatggaagccctcctcgggcacggcctggacgacggaaacgaggaggactcgtcgttttacatggagacgctgggcctcctcgacccaatggaagtgggcgacgatgccacgcaagtcaaggtggagaccgacggcagcagtgcgtgctgcgaagccagtggcacgctggcctgtggcctggagctggacttagaggcatctgacgagatgctggacatcgacttcgactacgcatcgcctcaggacacggcgacggacgagagagccgccagcagcgacacgggagccgacgcccagttcttgcagacgagcctctcgctcaccctcaactacgaggccatcatccagagctgggggagctcgccgtggaccggtggcggtgagcgaccacacgtcaagctcgacaccagaacatgtgggttgtgggaggagtggtcggccacggcggcgaggacctgccgggcacgcctaggctggggatggacggcggccgggaggcccgggtgtcgcggtaccgggagaagcggaggacgcggctcttctccaagaagatacggtacgaggtgcgcaagctcaacgccgagaagcggccacggatgaagggccgattcgtcaagcgtgctaccgccggtggcagcctcgccatcgctggcctcgcttaatgccgccggcttgctgcatgtttggttgttgagcctgcgtgtctgcatatctcgtcacgtcgtcatgaaatcatgacaagaatgaacaaacaattcgtcgaagctgccttttagttaattcaacttaaaataaaaaaaacatgtttttttcaccgatcaatttgccaatttaattattttataagcgggtgacttcgagtggcacttgcctccttatggcgataatcgagtaataatactagtgcaatattgctagctaaagagttgtttggtttaaataatcacttcatctaaaataagatggtgtatcataagtccattactcaaatttggtgggatgactacattactcgtattagtattaactaactaattataaggaatgaagtggtgatagatcaactcattttattttataaaccaaaaaaaattagtgaaaagatatactagctcattactcgaaccaaacgccctataaatacttgctcaacagttaggatgtagtatttttttgcccctgtttcagagcgtctgtcatctggtcgcctttttacacatgaagaatattggctcttgttgttttacttttac

SEQ ID NO: 58877 - DNA, 1971 bp, Zea Mays
gacctccgtggcccaccaacatgcgtcgataattccctcgctgatcccaccggctttaaaatcctaccctcccgctcccaagatcactctcactctcacgcacacactccacagtgccactcgtctcgctcgcgcagcagacagcatgggttcgtcggcggcgcttcagccgaagcagctgtaccagctcgtggtgaacaacttcgtcgccgtgctcgctgcgccgctggccgtggcggccgtcgtcaatgcggcgcgcgtcgggccggacgagctgctcggcaggctgcaggcgctccgggcggtgcacgtatttctcgccgtgtttgtcgcggccgccacggcgatactgtacgtcctgctgcggccccgggccgtgtacctggtggactacgcctgcttccgcacgcggcccaactgccgcgtccccttcgccaccttcctggagcacgcgaagctggtgacgttcgtggagggggcctccatcgacgagcgcagcgtccggttcatgacgcggctgctggagcggtccggcctcggcgaggagacctgcctgcccccggcccaccactacatcccgccgtaccggaacatggaggcctcgcgcgcggaggtggagctcgtcatcttctcggccatcgacgacctgctcgcgaagacgggcatcagccccagcgccatcgacatcctggtggtgaactgcagcctcttcgcgcccgtcccgtccttcacggacatggtgatcaacaggtggcgggccggggcgcgcacgcgctggtggtgtcgacggagaccatcaccccaaactactacgtgggcaaggagcgcgccatgctcctgcccaactgcctcttccgcatcggcggcgccgccgtgctgctgtccacgtcccggtccagggcccggttccgcctggcccgcgtggtgcgcacgctgacgggcgcccaggacagcgcgtaccggtgcgtgttccaggaggaggacggcgagggccaccgcgggatcaacctgtccaaggacctgatgaccatcgcgggcgacgcgctcaaggccaacatcaccgccatcgggccgctggtgctgccggcctcggagcagctcctgttcgcgctgtccttcatcgcgcggcgcgtgctgaaccggcgcgtgaagccgtacctcccggacttccgcacggcgttcgagcacttctgcatccacgcggggggccgcgcggtgatcgacgagctgcagcgcagcctgggcctgtcggacgaggacgtggaggcgtcgcgcatggcgctgcaccggttcggcaacacgtcgagcagctcggtgtggtacgagctggcgtacatcgaggccaagggccggatgcgccgcggcgaccgcgtgtggatgatcggattcggctccgggttcaagtgcaacagcgcggcctgggagtgcatcgcgccggcgcgcaccgccgaggggccctgggcggagagcgtcagccgctaccccgtggacatccccgaggtgctcaagcactagccgctatcccgtggacatcaggccgggcatgcatgtgagtatgtgaccgacgacgtgacagcgtgttttggacttgcttgtggtgctggccgggccggacgcgttgaatgccgagcctgacgcgtccatgtgtgcggtgcgctccagcccggacaggtggttgcgagagggtacaccgtgttaaatccgggccatttacacacgtatagtactcgtgctcctctagatcgtgtaccccttccttctcttcttgttcttcttctttttaccttccttttcaacatttgttttcccactaataatttacttgtgtccattttaaaaacaagccaaaatgtaccgcgagttggatcgattacattacatatgttactatagcaagcattattgtactctacctgaataatttatgaagtgaagttactacagccacaggcagagatggatggatgggca

SEQ ID NO: 58878 - DNA, 560 bp, Zea Mays
ctgcggtgacgaagcaaaatacagttgcttgtcgctctctcgtactcgaaagcgaacgcggttcgtggcgctgccagatgagataatcgcgtgacctttttctctcttcctctgccgccggagatgaaaggacgacagggcggccgcgcgcggttgctcgaaacatgtcagagagccagaaggtgtagactggtccgcagggtcccgtggtcggtcggtcgttttcctcggctgcgggctgggggaaagaccacctgctgccggtcgccggtggcggaagctgcagcttccttcctgtcctgtcctgtcttggtcttgcctccggcgacggggactggagcttcgtctaattgctttttttcttcttctgttggtgtgcggtccgctccgtctgtaaggctctcccttgcttgctcgtcgtgcgcctctactctctagatgtacgtaggtagctgaagaagctttagagtataaatagttcttacatgcatgcaaatggacgtactttgtgtaaatattcagtcaaagaggaataagggggttgcatgttttggtggtgc

SEQ ID NO: 58879 - DNA, 5214 bp, Zea Mays
tccgcagcacccacctaacattttttttcccttctacccgctcaccttttcccctactctataactacctccattcccgcactagcacaagcttcctccttcccacatgggcaccgtctcctccttccccaattgcaagctccattcgcgctcctcgtcctccgctgcctccagcctagtcccatctctgctcgattggagaggtttgggccatgcttcctcctcgcgcgccacgttctcgacggaatttctcgtctacacaggagccaaggaacgctagaattagacgcttcccggggtcccttttagttcccctctaacgaatcataggtttgcagtttggtgtggacgtatcctgtgatttgtggatggttttggtgtagagtttagagagatcaagaacttccaacttggggtttcctgtagccttttttagctgttctggggcttttatgggagtgcccgtcgcgcagaagtccgattcttgggtgactgtgcttgcgatgacggacagcggcggcctcggcgttcggcctattaacggaggccgagggagtgccgtggagcagcgtgggctcggactcggagacaacgggcctccagtgtccccaccagagcgtgtttctacgccgcctgcgccgagactagctgcttggtggcgcatgtcgtcgcctggtcctctccggtgctcaaccccgaggagcgttggatgtgaagatggtgatgattcggataggtacttttccccacagagtgagttttctcaagacacttctgatacagattcgatgagcacaagtattagtaggatgtataccttcaggttagggacttcgagcccattagatagtcctatcaaacaattgggagtaggagacacaagtcctccctcaaggaagggttgccattctcctagatatccttggaattcttgccggggatcagatgatgttgattctagctttatgagttcacctcggcatgatgatgaagagaggaaatatgatgtgcaaccaattgattttgagagtagacacatctggtatcctccaccacctcaggatgaaaatggtacttttcaatatgatgaggatgatgacaatgatgtttgtgatgggaaggtctttggacatattaaccatgattattgtgacggcgaagatgatgatgatgtgttagggatcaaaggaaaacatagtatatctcacaaagagttcttgaggagtgctttacatgggcatttcagggctctcgtctcacaattgctcgaaggacatggcattgatcctgtggatggctggccagacatagtatcctcattagcttggcaagcagctacctttgtcaggccagacacgagcaaaggtggtagcatggatcccacagactatgtcaaagtcaaatgcgtagcatcaggaaatccaaatgatagtgctttcattaaaggtgttgtttgttctaagaatgtaaaacacaaacgcatggtgtcaaaacatgagaaccctaggctgcttcttttgggaggagcactagaataccagaaagtcacgaacaaactagcttcaataaacagcattcttgaacaggaaaaggagtatcttaagaatgctgttgcaaagatagaggctcaacgcccacaagtcttgctagttgagaaaagtgtgccattgcatgcacaacagcttcttgcaaaagatatctctttagtattgaacgtcaagagatcacttctggaaagaatttctcgctgcacaggtgctcaaattgcatcttctgttgaaaatatcacttctacaggagttggacaatgccaaacattctggattgagagagttacagaatgttcatcaccgaaggtctcaaacaaaaacacagtcaagacactgatgttttttgatggttgtccaagacgcttggggtgcacggttcttctaagaggaaaatcatatgaagagttaaagaaagtcaaacttgctgtacagtatgctttatttgcagcataccacctgtcacttgaaacctcatatcttgctgacgagggtgcaacacttccaaaagtcccttcagaccttcaacttgagaagccgaattcttcctcaagatactatcagcagaatttgattgaatttcaaaccattgaaggggaaacttatggagctggatgcatcacaccttgccttaatggctctgcaaatcaatctcattcaagagatgacataattcatgaggaacatgcacactgtcattcaagatctgacttaagttgggaagaatatactggtggaaccattgatgtatacccttattccacagaagcttcaatgtatagtagctgtatgccacctgtatgcatgactgttcagacacctaaaagttcacttgccagtgcgagaaaaagtacaccaggaaatttgtttttttccaataatgttcacatagatgaagcaggtggtggaatgtcaaaggttgataatgacgtccttgacttggataatggttggaatcatatctcagatgaagattctgtagcaatacatgatcacaacggtaatcacaatgaatattttccaacatctgacagtccacagagcattttggtttccttgtcaattgcatgccctctgagaggaattgtatgtaagcagtctcagctatttcgtataaagttctatggtacttttgataagccgcttggaacgtattttcgtgaagatttatttgttcagacatcatgctgtgaatcctgcaaggagcctgcagaatctcatgtgcgatgttacactcatcaacaaggcagtctcacaatcagtgtcaaaactcttccatctgtgaagctacccggggagcttgatgggaaggtatggatgtggcacaggtgtctcaggtgcaaaccaaaagatggaattcctccagccacacaaaggatagtcatgtcagatgcagcacgtggattatcttttgggaagtttctggaacttagtttttcaaatcacacaacagccaatcgaattgcctgctgtggacactccctccaaagggactgccttcgtttctatgggcttgggagcatggttgctgtcttccgttattcaccagtagacattctttctgtcaacttgccatcctcagtactggactttgcttgtccaaaagctcaagattggatcatcaaagaagctgttgatgtatgcgctaggaaggaacatctgtatagggaaatcgttgctaaacttgactgcatcgaaaagatagttaaagaccagaacattggtatgaagtcaggcttgcataaacatgttgctgatcttaaggagttggttaaagttgagtggaagaagtatgacgttgtatcagcgttttctatcgtagataacttgcagacatttgaaccgtatatagatgttctagagctcaatctcctgaggagagagcttgtacatgatattcacgtatgggatcgcagactgtacatgatgcactccctcacgaaagagaactgtcgtactatgccaaatgacgcacaattttctgagaagtttactgaaagctcattagaacaatcaaaggatgtgacatctggtaaacatttgaatgctgagagttctctagaacagaatcaaccaagtacgttggaagtggctgcagtttcagtgaaatcatcccctatgacggaacaaaccaacactagcatttcacatttggcattggaaaccaccattatgggtgatgcatccatgcattctgtctcaactgttatcagctttgccccaggctcgtatgaaatgcagagtgaaggagtgctggctgaactagaagctggaaagactttgcagaaatcacaatcttctgcctccaatctttctgatagaattgacttagcatggactggttctggtcagcttgttaacgattcatcaagtagcatggaggcagtttcattcatacctgctagtctgaaggataatcctgcataccagaaggttatagcacccattagaatcaaatcgtttgattctgctataagttccagaaatgttgatgattcaaatgctagtataagaagatcttattctcaaaggcccccaaaggctattgagagaactgtttgatgcaatcaggagaaagtgctgtccagatgaactagactatatccgctccttaagtcgctgcaagcgatggagtgctcaaggtggcaagagtaatgtctactttgccaaaacactagatgacagatttgtgataaagcaagtgacccggacagaattagattcatttgaggattatgctgctgattatttcaaatatttgatagactctgtatcatctggaagcccaacttgcctcactaaagtccttggtctttatcagatcattgccaagaatttgagagatgggaaagagctgaagatggatgtaatggtcatggaaaacctatttttcaagagaaaggtatcaagaatatatgacctaaagggttctttgcgttcccgctacaaccctgatacttcagggaacaacaaggttctcttggatcttaatctgttagagacacttcacacaaagcccatttttcttggaagcaaagcaaaaagaaggctagaacgagctgtctggaatgatacttcttttctggcatcggtggatgtgatggactactctctcctagtcggcattgatgaagaaaggaaagagcttgtgatggggattatcgactatcttcggcaatacacttgggacaaacaactagagacttgggtgaaggcgacaggatttcttggtggctccaaggatgttctgccgaccattatatctcctgaccagtacaagaagaggttcaggaaggccatgtccaagtacttcttggctcttcctgaccaatggtcaccgtaacgccaacaatgcatccaggccattccaagcgcggcgacagggaagaccactccggttttctttttctttttctctcccttctgtttcttttaggacgatctatccatctgtgcctattgtatgctgtttttgttcacaacaggcaggatgaactctgtggaagattgtggcgattgttgtccagccaagcagaggttaggcgtcaatacgtgtacataccctacactgtaacatgaaattgcaaaggaaatgaaaatacgcgaactcgcgagttccttaccagtgatatgatttgagaagcttgcccattgttgctttgtgagg

SEQ ID NO: 58880 - DNA, 5393 bp, Zea Mays
cctaacattttttttcccttctacccgctcaccttttcccctactctataactacctccattcccgcactagcacaagcttcctccttcccacatgggcaccgtctcctccttccccaattgcaagctccattcgcgctcctcgtcctccgctgcctccagcctagtcccatctctgctcgattggagaggtttgggccatgcttcctcctcgcgcgccacgttctcgacggaatttctcgtctacacaggagccaaggaacgctagaattagacgcttcccggggtcccttttagttcccctctaacgaatcataggtttgcagtttggtgtggacgtatcctgtgatttgtggatggttttggtgtagagtttagagagatcaagaacttccaacttggggtttcctgtagccttttttagctgttctggggcttttatgggagtgcccgtcgcgcagaagtccgattcttgggtgactgtgcttgcgatgacggacagcggcggcctcggcgttcggcctattaacggaggccgagggagtgccgtggagcagcgtgggctcggactcggagacaacgggcctccagtgtccccaccagagcgtgtttctacgccgcctgcgccgagactagctgcttggtggcgcatgtcgtcgcctggtcctctccggtgctcaaccccgaggagcgttggatgtgaagatggtgatgattcggataggtacttttccccacagagtgagttttctcaagacacttctgatacagattcgatgagcacaagtattagtaggatgtataccttcaggttagggacttcgagcccattagatagtcctatcaaacaattgggagtaggagacacaagtcctccctcaaggaagggttgccattctcctagatatccttggaattcttgccggggatcagatgatgttgattctagctttatgagttcacctcggcatgatgatgaagagaggaaatatgatgtgcaaccaattgattttgagagtagacacatctggtatcctccaccacctcaggatgaaaatggtacttttcaatatgatgaggatgatgacaatgatgtttgtgatgggaaggtctttggacatattaaccatgattattgtgacggcgaagatgatgatgatgtgttagggatcaaaggaaaacatagtatatctcacaaagagttcttgaggagtgctttacatgggcatttcagggctctcgtctcacaattgctcgaaggacatggcattgatcctgtggatggctggccagacatagtatcctcattagcttggcaagcagctacctttgtcaggccagacacgagcaaaggtggtagcatggatcccacagactatgtcaaagtcaaatgcgtagcatcaggaaatccaaatgataggaaaaggagtatcttaagaatgctgttgcaaagatagaggctcaacgcccacaagtcttgctagttgagaaaagtgtgccattgcatgcacaacagcttcttgcaaaagatatctctttagtattgaacgtcaagagatcacttctggaaagaatttctcgctgcacaggtgctcaaattgcatcttctgttgaaaatatcacttctacaggagttggacaatgccaaacattctggattgagagagttacagaatgttcatcaccgaaggtctcaaacaaaaacacagtcaagacactgatgttttttgatggttgtccaagacgcttggggtgcacggttcttctaagaggaaaatcatatgaagagttaaagaaagtcaaacttgctgtacagtatgctttatttgcagcataccacctgtcacttgaaacctcatatcttgctgacgagggtgcaacacttccaaaagtcccttcagaccttcaacttgagaagccgaattcttcctcaagatactatcagcagaatttgattgaatttcaaaccattgaaggggaaacttatggagctggatgcatcacaccttgccttaatggctctgcaaatcaatctcattcaagagatgacataattcatgaggaacatgcacactgtcattcaagatctgacttaagttgggaagaatatactggtggaaccattgatgtatacccttattccacagaagcttcaatgtatagtagctgtatgccacctgtatgcatgactgttcagacacctaaaagttcacttgccagtgcgagaaaaagtacaccaggaaatttgtttttttccaataatgttcacatagatgaagcaggtggtggaatgtcaaaggttgataatgacgtccttgacttggataatggttggaatcatatctcagatgaagattctgtagcaatacatgatcacaacggtaatcacaatgaatattttccaacatctgacagtccacagagcattttggtttccttgtcaattgcatgccctctgagaggaattgtatgtaagcagtctcagctatttcgtataaagttctatggtacttttgataagccgcttggaacgtattttcgtgaagatttatttgttcagacatcatgctgtgaatcctgcaaggagcctgcagaatctcatgtgcgatgttacactcatcaacaaggcagtctcacaatcagtgtcaaaactcttccatctgtgaagctacccggggagcttgatgggaaggtatggatgtggcacaggtgtctcaggtgcaaaccaaaagatggaattcctccagccacacaaaggatagtcatgtcagatgcagcacgtggattatcttttgggaagtttctggaacttagtttttcaaatcacacaacagccaatcgaattgcctgctgtggacactccctccaaagggactgccttcgtttctatgggcttgggagcatggttgctgtcttccgttattcaccagtagacattctttctgtcaacttgccatcctcagtactggactttgcttgtccaaaagctcaagattggatcatcaaagaagctgttgatgtatgcgctaggaaggaacatctgtatagggaaatcgttgctaaacttgactgcatcgaaaagatagttaaagaccagaacattggtatgaagtcaggcttgcataaacatgttgctgatcttaaggagttggttaaagttgagtggaagaagttgtatcagcgttttctatcgtagataacttgcagacatttgaaccgtatatagatgttctagagctcaatctcctgaggagagagcttgtacatgatattcacgtatgggatcgcagactgtacatgatgcactccctcacgaaagagaactgtcgtactatgccaaatgacgcacaattttctgagaagtttactgaaagctcattagaacaatcaaaggatgtgacatctggtaaacatttgaatgctgagagttctctagaacagaatcaaccaagtacgttggaagtggctgcagtttcagtgaaatcatcccctatgacggaacaaaccaacactagcatttcacatttggcattggaaaccaccattatgggtgatgcatccatgcattctgtctcaactgttatcagctttgccccaggctcgtatgaaatgcagagtgaaggagtgctggctgaactagaagctggaaagactttgcagaaatcacaatcttctgcctccaatctttctgatagaattgacttagcatggactggttctggtcagcttgttaacgattcatcaagtagcatggaggcagtttcattcatacctgctagtctgaaggataatcctgcataccagaaggttatagcacccattagaatcaaatcgtttgattctgctataagttccagaaatgttgatgattcaaatgctagtataagaagatcttattctcaaaggcccccaaaggctattgagagaactggtaagggtctgtcaccaacattcttgaacaagctctcacttcctggtatgattcatggcgagagtcggttgctgctgtcacaaaatgattcaggtgttattgttccaatttatgatgatgaaccatctagcatgatagcccatgccatgactgttccagaatatcacagcttcttgttgccacttctgtatcagaataatgaatctaatttattgaattatggttctgatcagcctcaacctataactagaaatgattctaagtataaccatttcactatttcttttgaggatgaagactcaaattccgttgataaagcaaaattttctgtgacatgttattttgcaaagcagtttgatgcaatcaggagaaagtgctgtccagatgaactagactatatccgctccttaagtcgctgcaagcgatggagtgctcaaggtggcaagagtaatgtctactttgccaaaacactagatgacagatttgtgataaagcaagtgacccggacagaattagattcatttgaggattatgctgctgattatttcaaatatttgatagactctgtatcatctggaagcccaacttgcctcactaaagtccttggtctttatcagatcattgccaagaatttgagagatgggaaagagctgaagatggatgtaatggtcatggaaaacctatttttcaagagaaaggtatcaagaatatatgacctaaagggttctttgcgttcccgctacaaccctgatacttcagggaacaacaaggttctcttggatcttaatctgttagagacacttcacacaaagcccatttttcttggaagcaaagcaaaaagaaggctagaacgagctgtctggaatgatacttcttttctggcatcggtggatgtgatggactactctctcctagtcggcattgatgaagaaaggaaagagcttgtgatggggattatcgactatcttcggcaatacacttgggacaaacaactagagacttgggtgaaggcgacaggatttcttggtggctccaaggatgttctgccgaccattatatctcctgaccagtacaagaagaggttcaggaaggccatgtccaagtacttcttggctcttcctgaccaatggtcaccgtaacgccaacaatgcatccaggccattccaagcgcggcgacagggaagaccactccggttttctttttctttttctctcccttctgtttcttttaggacgatctatccatctgtgcctattgtatgctgtttttgttcacaacaggcaggatgaactctgtggaagattgtggcgattgttgtccagccaagcagaggttaggcgtcaatacgtgtacataccctacactgtaacatgaaattgcaaaggaaatgaaaatacgcgaactcgcgagttccttaccagtgatatgatttgagaagcttgcccattgttgctttgtgagg

SEQ ID NO: 58881 - DNA, 5031 bp, Zea Mays
ccttctacccgctcaccttttcccctactctataactacctccattcccgcactagcacaagcttcctccttcccacatgggcaccgtctcctccttccccaattgcaagctccattcgcgctcctcgtcctccgctgcctccagcctagtcccatctctgctcgattggagaggtttgggccatgcttcctcctcgcgcgccacgttctcgacggaatttctcgtctacacaggagccaaggaacgctagaattagacgcttcccggggtcccttttagttcccctctaacgaatcataggtttgcagtttggtgtggacgtatcctgtgatttgtggatggttttggtgtagagtttagagagatcaagaacttccaacttggggtttcctgtagccttttttagctgttctggggcttttatgggagtgcccgtcgcgcagaagtccgattcttgggtgactgtgcttgcgatgacggacagcggcggcctcggcgttcggcctattaacggaggccgagggagtgccgtggagcagcgtgggctcggactcggagacaacgggcctccagtgtccccaccagagcgtgtttctacgccgcctgcgccgagactagctgcttggtggcgcatgtcgtcgcctggtcctctccggtgctcaaccccgaggagcgttggatgtgaagatggtgatgattcggataggtacttttccccacagagtgagttttctcaagacacttctgatacagattcgatgagcacaagtattagtaggatgtataccttcaggttagggacttcgagcccattagatagtcctatcaaacaattgggagtaggagacacaagtcctccctcaaggaagggttgccattctcctagatatccttggaattcttgccggggatcagatgatgttgattctagctttatgagttcacctcggcatgatgatgaagagaggaaatatgatgtgcaaccaattgattttgagagtagacacatctggtatcctccaccacctcaggatgaaaatggtacttttcaatatgatgaggatgatgacaatgatgtttgtgatgggaaggtctttggacatattaaccatgattattgtgacggcgaagatgatgatgatgtgttagggatcaaaggaaaacatagtatatctcacaaagagttcttgaggagtgctttacatgggcatttcagggctctcgtctcacaattgctcgaaggacatggcattgatcctgtggatggctggccagacatagtatcctcattagcttggcaagcagctacctttgtcaggccagacacgagcaaaggtggtagcatggatcccacagactatgtcaaagtcaaatgcgtagcatcaggaaatccaaatgataggaaaaggagtatcttaagaatgctgttgcaaagatagaggctcaacgcccacaagtcttgctagttgagaaaagtgtgccattgcatgcacaacagcttcttgcaaaagatatctctttagtattgaacgtcaagagatcacttctggaaagaatttctcgctgcacaggtgctcaaattgcatcttctgttgaaaatatcacttctacaggagttggacaatgccaaacattctggattgagagagttacagaatgttcatcaccgaaggtctcaaacaaaaacacagtcaagacactgatgttttttgatggttgtccaagacgcttggggtgcacggttcttctaagaggaaaatcatatgaagagttaaagaaagtcaaacttgctgtacagtatgctttatttgcagcataccacctgtcacttgaaacctcatatcttgctgacgagggtgcaacacttccaaaagtcccttcagaccttcaacttgagaagccgaattcttcctcaagatactatcagcagaatttgattgaatttcaaaccattgaaggggaaacttatggagctggatgcatcacaccttgccttaatggctctgcaaatcaatctcattcaagagatgacataattcatgaggaacatgcacactgtcattcaagatctgacttaagttgggaagaatatactggtggaaccattgatgtatacccttattccacagaagcttcaatgtatagtagctgtatgccacctgtatgcatgactgttcagacacctaaaagttcacttgccagtgcgagaaaaagtacaccaggaaatttgtttttttccaataatgttcacatagatgaagcaggtggtggaatgtcaaaggttgataatgacgtccttgacttggataatggttggaatcatatctcagatgaagattctgtagcaatacatgatcacaacggtaatcacaatgaatattttccaacatctgacagtccacagagcattttggtttccttgtcaattgcatgccctctgagaggaattgtatgtaagcagtctcagctatttcgtataaagttctatggtacttttgataagccgcttggaacgtattttcgtgaagatttatttgttcagacatcatgctgtgaatcctgcaaggagcctgcagaatctcatgtgcgatgttacactcatcaacaaggcagtctcacaatcagtgtcaaaactcttccatctgtgaagctacccggggagcttgatgggaaggtatggatgtggcacaggtgtctcaggtgcaaaccaaaagatggaattcctccagccacacaaaggatagtcatgtcagatgcagcacgtggattatcttttgggaagtttctggaacttagtttttcaaatcacacaacagccaatcgaattgcctgctgtggacactccctccaaagggactgccttcgtttctatgggcttgggagcatggttgctgtcttccgttattcaccagtagacattctttctgtcaacttgccatcctcagtactggactttgcttgtccaaaagctcaagattggatcatcaaagaagctgttgatgtatgcgctaggaaggaacatctgtatagggaaatcgttgctaaacttgactgcatcgaaaagatagttaaagaccagaacattggtatgaagtcaggcttgcataaacatgttgctgatcttaaggagttggttaaagttgagtggaagaagtatgacgttgtatcagcgttttctatcgtagataacttgcagacatttgaaccgtatatagatgttctagagctcaatctcctgaggagagagcttgtacatgatattcacgtatgggatcgcagactgtacatgatgcactccctcacgaaagagaactgtcgtactatgccaaatgacgcacaattttctgagaagtttactgaaagctcattagaacaatcaaaggatgtgacatctggtaaacatttgaatgctgagagttctctagaacagaatcaaccaagtacgttggaagtggctgcagtttcagtgaaatcatcccctatgacggaacaaaccaacactagcatttcacatttggcattggaaaccaccattatgggtgatgcatccatgcattctgtctcaactgttatcagctttgccccaggctcgtatgaaatgcagagtgaaggagtgctggctgaactagaagctggaaagactttgcagaaatcacaatcttctgcctccaatctttctgatagaattgacttagcatggactggttctggtcagcttgttaacgattcatcaagtagcatggaggcagtttcattcatacctgctagtctgaaggataatcctgcataccagaaggttatagcacccattagaatcaaatcgtttgattctgctataagttccagaaatgttgatgattcaaatgctagtataagaagatcttattctcaaaggcccccaaaggctattgagagaactgtttgatgcaatcaggagaaagtgctgtccagatgaactagactatatccgctccttaagtcgctgcaagcgatggagtgctcaaggtggcaagagtaatgtctactttgccaaaacactagatgacagatttgtgataaagcaagtgacccggacagaattagattcatttgaggattatgctgctgattatttcaaatatttgatagactctgtatcatctggaagcccaacttgcctcactaaagtccttggtctttatcagatcattgccaagaatttgagagatgggaaagagctgaagatggatgtaatggtcatggaaaacctatttttcaagagaaaggtatcaagaatatatgacctaaagggttctttgcgttcccgctacaaccctgatacttcagggaacaacaaggttctcttggatcttaatctgttagagacacttcacacaaagcccatttttcttggaagcaaagcaaaaagaaggctagaacgagctgtctggaatgatacttcttttctggcatcggtggatgtgatggactactctctcctagtcggcattgatgaagaaaggaaagagcttgtgatggggattatcgactatcttcggcaatacacttgggacaaacaactagagacttgggtgaaggcgacaggatttcttggtggctccaaggatgttctgccgaccattatatctcctgaccagtacaagaagaggttcaggaaggccatgtccaagtacttcttggctcttcctgaccaatggtcaccgtaacgccaacaatgcatccaggccattccaagcgcggcgacagggaagaccactccggttttctttttctttttctctcccttctgtttcttttaggacgatctatccatctgtgcctattgtatgctgtttttgttcacaacaggcaggatgaactctgtggaagattgtggcgattgttgtccagccaagcagaggttaggcgtcaatacgtgtacataccctacactgtaacatgaaattgcaaaggaaatgaaaatacgcgaactcgcgagttccttaccagtgatatgatttgagaagcttgcccattgttgctttgtgagg

SEQ ID NO: 58882 - DNA, 2262 bp, Zea Mays
gattgcttttccctttcacttgtatctttgtttcaatctgccggtccttggtgatcttactcgttcgactagaaatccaagtcacaacgatataaggttcccaacctagaagtgagcggtaagttgctatatctattctgtctttttgcctatacttgaaaccctaactctgcttttgctgcaacccctgcctcaaaaattcacttgtcaatcgtgactttgcgctcgactccgcacttgtgaggatatggcacccaggaaaaaaagcagggggggctcggtagctgccattcttccccttgaccttaacaactagcttctgtttctacgatccttctctcctcctctcgtccttcgtcgtcgtcgtcgtcgtcgcgtgatctcggcctcctgcgacctccatggctggcaaagctgctgcagacactgggagcaacgaccgagtcgttgaggttgaggggtcctcctcctcctccatggcggacgtgtacaaaggcgagctcacgccgctgcagaggcacgtctccttcttcgaccgcaacaaggacggcgtcatctacccctccgagacataccaagggttccgagctatcgggtgtggcgtcgccctgtctgctgctgctgccgtcttcgtcaacggtggacttggacccaagaccgtactggtaccagagcttgagtcactttgatttctgcattgaaaaaaaaaaatctgaatcatccttagagcatgcctgcctgcctgcttggttcggtttggtttggtttcgccggccagcgtctgcagtagacggaagacgtaaccgtattctcaaaacctcagaagatcgaatgaagtgatattaacagcatcatctagaattctagagtcgtaaacaatataatggcaccctgatcagataaccaacccataacacaccttgaaagttgaaagagagatgccactacaccacctttgtcttcggaaaagaaaaaaaaggcaggcgtaaaagctacctgccgtgtcgtatggcgtatagcagtatagctacgtgcattcatccacgcgagattctttttttttggtggggcatcttttcaataattaatgtcacatttgatatttctctatcgtctccccctgatggagctgactctggctcgttcgtgtccgtgcatgccttctctggcgtcgcgcgctgaaggagaacgagaagcctgcgcctttcaagttccccatctacgtgaagaacatccacaggggcaagcacggcagcgattcgggcgtctacgattccaacggaagatttgtacctgaaaagtttgaggagattttcaagaagtatgcccacacgaggcctgatgcccttacaggcaaagagctacaggagatgatgaaagcaaacagagaacccaaggacttgaaaggatggctgggtggcttcacagagtggaaggtgctgtactccctgtgcaaagacaaggacgggtttctccacaaagacactgtcagggcggtctacgatggcagcctgtttgaaaggttggagcaagagaggaactcaaagaaagagtcgagtaagaagaaatgatgagaaatccagacgctcttatgtggacgagtttgcaagtcacgctgtgcgtgtggttgggtactatcataatttgatttattctatatgtttgtcgattcatataacgatattgcaagtatttgtcgaacgtgtttgaattagcaagacatatagctgtgagctttgatagcctcccatatttttttcagttcatattttacattaacgtttttgtgcggtgcttgaaaatatttcgagcgtgttgttgttttttttcagttgtcttagtcatggactcatggtagattgctaccgcttttaaggctattgtttgtctagtttaagcctctttcatctatataatcagatgctcttgctcggttggttaatggaacaccccaaattccaatttgtgagttcaataatttttttattttttatttgagttaattaccccttttacataaatttagaattgaaataaataaatggtgattgaaaatattttgtatggtatgctggatttttaattgttgtatttcaagtgcaaacttgaaatatacattcttatttgaatttgaatttaaaacttgaactagaaaagaaaactataaaaaggaatgatcaaattagggtatttttgtgcatttaatataattttctaaaatgaataatgagacaaaaataaaataaataaatataaatataa

SEQ ID NO: 58883 - DNA, 2163 bp, Zea Mays
gattgcttttccctttcacttgtatctttgtttcaatctgccggtccttggtgatcttactcgttcgactagaaatccaagtcacaacgatataaggttcccaacctagaagtgagcggtaagttgctatatctattctgtctttttgcctatacttgaaaccctaactctgcttttgctgcaacccctgcctcaaaaattcacttgtcaatcgtgactttgcgctcgactccgcacttgtgaggatatggcacccaggaaaaaaagcagggggggctcggtagctgccattcttccccttgaccttaacaactagcttctgtttctacgggagcaacgaccgagtcgttgaggttgaggggtcctcctcctcctccatggcggacgtgtacaaaggcgagctcacgccgctgcagaggcacgtctccttcttcgaccgcaacaaggacggcgtcatctacccctccgagacataccaagggttccgagctatcgggtgtggcgtcgccctgtctgctgctgctgccgtcttcgtcaacggtggacttggacccaagaccgtactggtaccagagcttgagtcactttgatttctgcattgaaaaaaaaaaatctgaatcatccttagagcatgcctgcctgcctgcttggttcggtttggtttggtttcgccggccagcgtctgcagtagacggaagacgtaaccgtattctcaaaacctcagaagatcgaatgaagtgatattaacagcatcatctagaattctagagtcgtaaacaatataatggcaccctgatcagataaccaacccataacacaccttgaaagttgaaagagagatgccactacaccacctttgtcttcggaaaagaaaaaaaaggcaggcgtaaaagctacctgccgtgtcgtatggcgtatagcagtatagctacgtgcattcatccacgcgagattctttttttttggtggggcatcttttcaataattaatgtcacatttgatatttctctatcgtctccccctgatggagctgactctggctcgttcgtgtccgtgcatgccttctctggcgtcgcgcgctgaaggagaacgagaagcctgcgcctttcaagttccccatctacgtgaagaacatccacaggggcaagcacggcagcgattcgggcgtctacgattccaacggaagatttgtacctgaaaagtttgaggagattttcaagaagtatgcccacacgaggcctgatgcccttacaggcaaagagctacaggagatgatgaaagcaaacagagaacccaaggacttgaaaggatggctgggtggcttcacagagtggaaggtgctgtactccctgtgcaaagacaaggacgggtttctccacaaagacactgtcagggcggtctacgatggcagcctgtttgaaaggttggagcaagagaggaactcaaagaaagagtcgagtaagaagaaatgatgagaaatccagacgctcttatgtggacgagtttgcaagtcacgctgtgcgtgtggttgggtactatcataatttgatttattctatatgtttgtcgattcatataacgatattgcaagtatttgtcgaacgtgtttgaattagcaagacatatagctgtgagctttgatagcctcccatatttttttcagttcatattttacattaacgtttttgtgcggtgcttgaaaatatttcgagcgtgttgttgttttttttcagttgtcttagtcatggactcatggtagattgctaccgcttttaaggctattgtttgtctagtttaagcctctttcatctatataatcagatgctcttgctcggttggttaatggaacaccccaaattccaatttgtgagttcaataatttttttattttttatttgagttaattaccccttttacataaatttagaattgaaataaataaatggtgattgaaaatattttgtatggtatgctggatttttaattgttgtatttcaagtgcaaacttgaaatatacattcttatttgaatttgaatttaaaacttgaactagaaaagaaaactataaaaaggaatgatcaaattagggtatttttgtgcatttaatataattttctaaaatgaataatgagacaaaaataaaataaataaatataaatataa

SEQ ID NO: 58884 - DNA, 1644 bp, Zea Mays
gattgcttttccctttcacttgtatctttgtttcaatctgccggtccttggtgatcttactcgttcgactagaaatccaagtcacaacgatataaggttcccaacctagaagtgagcggtaagttgctatatctattctgtctttttgcctatacttgaaaccctaactctgcttttgctgcaacccctgcctcaaaaattcacttgtcaatcgtgactttgcgctcgactccgcacttgtgaggatatggcacccaggaaaaaaagcagggggggctcggtagctgccattcttccccttgaccttaacaactagcttctgtttctacgggagcaacgaccgagtcgttgaggttgaggggtcctcctcctcctccatggcggacgtgtacaaaggcgagctcacgccgctgcagaggcacgtctccttcttcgaccgcaacaaggacggcgtcatctacccctccgagacataccaagggttccgagctatcgggtgtggcgtcgccctgtctgctgctgctgccgtcttcgtcaacggtggacttggacccaagaccgtactggagaacgagaagcctgcgcctttcaagttccccatctacgtgaagaacatccacaggggcaagcacggcagcgattcgggcgtctacgattccaacggaagatttgtacctgaaaagtttgaggagattttcaagaagtatgcccacacgaggcctgatgcccttacaggcaaagagctacaggagatgatgaaagcaaacagagaacccaaggacttgaaaggatggctgggtggcttcacagagtggaaggtgctgtactccctgtgcaaagacaaggacgggtttctccacaaagacactgtcagggcggtctacgatggcagcctgtttgaaaggttggagcaagagaggaactcaaagaaagagtcgagtaagaagaaatgatgagaaatccagacgctcttatgtggacgagtttgcaagtcacgctgtgcgtgtggttgggtactatcataatttgatttattctatatgtttgtcgattcatataacgatattgcaagtatttgtcgaacgtgtttgaattagcaagacatatagctgtgagctttgatagcctcccatatttttttcagttcatattttacattaacgtttttgtgcggtgcttgaaaatatttcgagcgtgttgttgttttttttcagttgtcttagtcatggactcatggtagattgctaccgcttttaaggctattgtttgtctagtttaagcctctttcatctatataatcagatgctcttgctcggttggttaatggaacaccccaaattccaatttgtgagttcaataatttttttattttttatttgagttaattaccccttttacataaatttagaattgaaataaataaatggtgattgaaaatattttgtatggtatgctggatttttaattgttgtatttcaagtgcaaacttgaaatatacattcttatttgaatttgaatttaaaacttgaactagaaaagaaaactataaaaaggaatgatcaaattagggtatttttgtgcatttaatataattttctaaaatgaataatgagacaaaaataaaataaataaatataaatataa

SEQ ID NO: 58885 - DNA, 2047 bp, Zea Mays
gattgcttttccctttcacttgtatctttgtttcaatctgccggtccttggtgatcttactcgttcgactagaaatccaagtcacaacgatataaggttcccaacctagaagtgagcggtaagttgctatatctattctgtctttttgcctatacttgaaaccctaactctgcttttgctgcaacccctgcctcaaaaattcacttgtcaatcgtgactttgcgctcgactccgcacttgtgaggatatggcacccaggaaaaaaagcagggggggctcggtagctgccattcttccccttgaccttaacaactagcttctgtttctacggcagaggcagggcagtgcaagcgcaacgcaacacggctggagcggcggcattcatgcagataactcccacctcctcacgccacgccacgccaccaacgcatccgcagacagcgtcagtttccaccgatcgaaatcgaaactgccctcgattcctttccaccccgtcctctctgtcgcccgctacgtcgctgacacaccacaccgctttgaggggggcttgcagctggagcatctctgttccgagttccttcctctttcctccaaggcaaggctcctccaacttgcgctccctgtttctctacagatccttctctcctcctctcgtccttcgtcgtcgtcgtcgtcgtcgcgtgatctcggcctcctgcgacctccatggctggcaaagctgctgcagacactgggagcaacgaccgagtcgttgaggttgaggggtcctcctcctcctccatggcggacgtgtacaaaggcgagctcacgccgctgcagaggcacgtctccttcttcgaccgcaacaaggacggcgtcatctacccctccgagacataccaagggttccgagctatcgggtgtggcgtcgccctgtctgctgctgctgccgtcttcgtcaacggtggacttggacccaagaccgtactggagaacgagaagcctgcgcctttcaagttccccatctacgtgaagaacatccacaggggcaagcacggcagcgattcgggcgtctacgattccaacggaagatttgtacctgaaaagtttgaggagattttcaagaagtatgcccacacgaggcctgatgcccttacaggcaaagagctacaggagatgatgaaagcaaacagagaacccaaggacttgaaaggatggctgggtggcttcacagagtggaaggtgctgtactccctgtgcaaagacaaggacgggtttctccacaaagacactgtcagggcggtctacgatggcagcctgtttgaaaggttggagcaagagaggaactcaaagaaagagtcgagtaagaagaaatgatgagaaatccagacgctcttatgtggacgagtttgcaagtcacgctgtgcgtgtggttgggtactatcataatttgatttattctatatgtttgtcgattcatataacgatattgcaagtatttgtcgaacgtgtttgaattagcaagacatatagctgtgagctttgatagcctcccatatttttttcagttcatattttacattaacgtttttgtgcggtgcttgaaaatatttcgagcgtgttgttgttttttttcagttgtcttagtcatggactcatggtagattgctaccgcttttaaggctattgtttgtctagtttaagcctctttcatctatataatcagatgctcttgctcggttggttaatggaacaccccaaattccaatttgtgagttcaataatttttttattttttatttgagttaattaccccttttacataaatttagaattgaaataaataaatggtgattgaaaatattttgtatggtatgctggatttttaattgttgtatttcaagtgcaaacttgaaatatacattcttatttgaatttgaatttaaaacttgaactagaaaagaaaactataaaaaggaatgatcaaattagggtatttttgtgcatttaatataattttctaaaatgaataatgagacaaaaataaaataaataaatataaatataa

SEQ ID NO: 58886 - DNA, 1421 bp, Zea Mays
tactgtacacaattatttattatataaaaacccttaagcccatccttccactgtcacacaggcacacacacttggctcttcgcagcctcttgttggtctcctcagccaccttggaaagccatacgtgcaggaattagcaagaaggaaggaagcatgtggaagcttgttgcagcagcagtagcgctaatcgtgctgtgcgcgtgcacgacgccagcgcgcggcggcgacgactacacggcgttcgtgtacgccgggtgctcgcaggggcggtacgaccccgggtcgcagtacgccgcggacgtggacaccgcgctgtcgtccctcgtgaacagcgcaggcttcgtggcctacgcaaactacacctcgccggggcagctggtgggcgtgtaccagtgccggtccgacctccccgcggcggtgtgcggcggctgcgtgaggtcggccgtctccaagctgtcctcgctgtgcaacgcggcggcgggcgccgcggtgcagctgcgcgcctgcttcgtgcggtacgggaacgactcgttcctggggaggcaggacacgacggtgctgttcaagaagtgcggcggcggcgagagcgcggggggcgacacgggcgtggtggccatgcgcgacgcggcgctcggcgcgctcgtggccgccgcggcacccggcgccggcgagggctcgtaccgcgccggcgcggcggggtacgtgcaggccatgtcgcagtgcgtcggggacctcggcgccaaggcctgcaccgactgcgtctccgccgcggcctcgcagctcaaggccggctgcggctacgcctccgcgggggaggtgtacctcggcaagtgctacgcgcgcttctggtccaatgccgcccccggcggcggcggtggcgaaggcaccggcactggcggtggattaccggtggtcggaggtggcggcggcaatgtcatcggcggcggcggcgtgggaggagcaggcaacggatacggatacggcggattcgtgccaaacacgtacgggcagcacgatgaatctgggaaaacccttgccatcatcatcggcctggtggcagcggccgccattgtcatcgtcttcctctccttcctccgtaggtccagggctgccggaggcaaaagctaagagcttgcaggatggtcaccacttggctcggattggatcaatcgggatgtctgaaaggcgttccctgtgcagacatgtgcaaagtaaagattccatccggtaccagctactcgtaaagccacgatgcgcaatgcaagatatattttcacaaaaaaaaagatatatgtggtttctgcccatcatatatatacttatatacaatgtacttattatggagcatgattcagcattgtgcaagtttatgtgtccaattggtgtcacctcttacaattgttgtcgttgtcgtcgtctcc

SEQ ID NO: 58887 - DNA, 530 bp, Zea Mays
ggatggaaggatcgagaccacgctggcagatgaatctgggaaaacccttgccatcatcatcggcctggtggcagcggccgccattgtcatcgtcttcctctccttcctccgtaggtccagggctgccggaggcaaaagctaagagcttgcaggatggtcaccacttggctcggattggatcaatcggtcggtggcttttgcttgaaaaccgcttatcccatctacctcccttttatcttttaggggtctcttttctcatgtctgcatctctccaaacaaagggatgtctgaaaggcgttccctgtgcagacatgtgcaaagtaaagattccatccggtaccagctactcgtaaagccacgatgcgcaatgcaagatatattttcacaaaaaaaaagatatatgtggtttctgcccatcatatatatacttatatacaatgtacttattatggagcatgattcagcattgtgcaagtttatgtgtccaattggtgtcacctcttacaattgttgtcgttgtcgtcgtctcc

SEQ ID NO: 58888 - DNA, 12382 bp, Zea Mays
gttttaagcccatacacaagccgaataccacacggaaccgggagagagtgcatcagcactgcaggggtctactgaggcactccaagtggggaaatggcggaggcgacgaattcgagcttgggcacgtaggcgtcgctcctgccatcgccgcagcggtcactggactctcacgccgccgccgccgccgccggagaccattagttctcctgcgcggcggctccgcggctcccgccctctcccttaccttcttcccgctagggttttctccgatccccaatcactgctggttcacaaatggcttcatctcagcatgttgagatggaggctgcgaaacttctacataaacttatccaggagtcgaaggatgagcctgctaaactagcaacaaaactttacgtgatatgtcagcatatgaaactaagtggaaaggagcaatcactgccatatcaagtcatatcaagggctatggagacagttgtgaaccaacatggaattgatatggatgcattgcgatcatcacgaattccatttgctggtggtcctcaggcaggggattctagtggtgtcatgtcaaaggacaaggaggtcattggtaaccagtctcccatggtcggaagtgatgcttcccaaagtagtggacaagctggattatggcagcttccatcaggttcaaccgatatgataagacatggggcatctatttcaggtagggtacccacagggccaaataggggagatttctcagcagctgatattcatcaaggctccatgtcacaaaaaagcggtagatcctctggcattgaaagccctgcaagtctgcagatggaggacaccagatctatgaattcacatgattctttgaaatccgatgagaaaacaagtaagaaaacctcttccaagagaaaaaggatggattcaaaaggagctggtgatttgcgttcagaagacaactcaaagtcagatgttatctccactggacagaataccaggaaggggaaacaggttggtaaggctggtagacaaggtcagccttccatgggaattgagcatgagcagcaacctcataaactgcaaggtggtactggtcaggtaccacctatacatggtggtgcaccttttctcaggactcgctcagaaggtccttctgggaggacaatggacaagactaaaccatcaaatccattctcaatgggtcaaattccaaattttcctgaagggctggcttctactggtgctccaatcgagttgcagaaaagtatacagggtggagcaagtttatttaatcctggttttggctggaaccaaaatccacaagttcaaaccttgaagaattctcaaggttctattcataatttagtgaggtctggagttactgttgaagggaaagttaatgtaggggcacaaggagcttttaactctgcctctgcaccacagatggaatttcccacagttcctccatacaacccctcttccttcggagctagctcacagtttctggacaaaggcaaggagttggtttccagcattataagcactgaacctcattcatctaaagttgcatctcagcctgggatttctcatggaagtcccatgcaagaaaggcaaggtatgatcagggtgccacagagaggcgaggcatcatttcaggaacgcaggccatcttcacttccgagtagaagtactgggccaagtccaatgtctcacatttcttccaacacaccatttaaagaacagcagctgaagcagctcagagcacagtgcttagtatttcttgcatttaggaataatttgcagcccaggaaggtacatcttgaaattgctttgggcagagggcctcctgcagaaagtgacagtgcaggtcaaaggggcagcgagggcagagtgtctgatgctctgggaaaggaaaatggtagcagtcgggagaactctggtgtcttttgtaggcaaactgatatctctagacttccagccacatctgcaggaagtattgcagaggatgattccttatcgaaggatccagaaaatgctacaaaaaaaatcaagttagctgaacaggagaagtcattgatggaagtagaaaatgtccagcaagcttctgttatgcaaggaactagttctgaaatgcgttcccaagaaactgcatctcaaaatccatatcgaccacaacagtcatattatcaaggagatacaagaagaatcgcctcggatatccataggactgatgctgaaattttgaaccagaatttaagttggggaggccagggatctactgctttgggtggtactagacagcttctgaatcaggaaactaaagaatcacttgcaccttcaaagtcacaccatatgcctgttgatggttacaactccaatatacaaggaatagatcggactccagagatagctggagctggtaatgatgttgaaaattgtagccacgtagcagatattgtgcctgagcaggctgctgatgaaggagatgaggacctctcagagcatgaggatttattgtcatctccaaagcacacaatgacggaaaaatggatcttagattaccagaagagaatttacaatgagaaacaaaagagaacattggagcagcataaggtacacagcagaatgtcagcaacatatgaggagctaaaggagagcgttaattcatccgaagatctttctgcaaagaccaagagcgtcattgaattgaaaaagcttcagcttctgccacttcaacgtcgtgtacgcagtgaatttttgctggattttttcaagcctaatacatccgacttagagcgcataaaatcactgaagaaacataggcatgggcggcgggtgaaacagcttgaaaaaattgaacagaaaatgaaggaagaaaggcaaaagagaattcgtgagagacagaaggaattctttgctgatattgaagcttacagagagaaactcgaggataacttcaaggttaagagagagcgcttgaaggggttcaatcgatacataaaagaatttcacaaaaggaaagaaagaattcatcgggagaaactggataggatccaacgcgagaaaatcaacctgcttaagaacaatgatgttgaaggttatcttagaatggtcaaggatgcaaaatctgatcgtgtcaagcaactattgcgtgaaactgagaaatatcttcagaaacttgggaacaaattacagagtgcaaagtccacagatggccgctcatcttttgttactgataagagtgacactgcaaacgacattgaagatgagagctaccagccacagcattatctggaaagtaatgaaaagtactatcaactggcacacagtgtaaaggaaactgtaaatgatcagccatcttatcttcagggcggcaaattgcgagagtaccaaatgaatggcttgcgttggctggtttcattgtacaataataatttgaatggtattttagcagatgagatgggccttggtaaaacagtacaagtaatctctttgatatgctaccttatggaaacaaaaaatgaccgtgggccttttctcgtggttgtaccatcatctgttcttcctggatgggaatctgaactcagcttctgggcacctagtataaataaaattgcttatgctggtcctcctgaagaaaggcgcaggatgttcaaagagatgattgttcatcagaagttcaatgttcttctgacaacatatgagtacttgatgaacaagcatgataggccaaaactaagcaaaatacaatggcactatataataatcgatgaagggcatcgtattaaaaatgcttcttgtaaacttaatgctgatttgaagctttatcggagctctcatcggatattattgacaggaacacctcttcagaataatctcgaggagctgtgggcacttctaaattttttgttgcccaatatttttaattcgtcagaggacttctctcagtggtttaacaaaccatttgaaagtaatggtgataattcacctgatgaggccttactttcagaggaggagaacttgttgatcataaatcgtcttcaccaggttcttcggccctttgtactcagaagacttaagcataaggtcgaaaatgagcttcctgaaaaaattgaaagacttgtaagatgtgaggcatctgcttatcagaaacttctcatgacaagggtggaagaaaatcttggtggaattggagccgttaaggttcgctccgttcacaactctgtcatggaattgaggaacatatgcaaccatccatacttgagccagcttcatgttgaagagattgagggctacctacctaaacattacctaccatctattttgaggctctgcggaaaacttgagatgttggacagattgctgcctaaactcaaagctacgggccatagggttctacttttttctacaatgacaagattgcttgatgtaatggaggattacttggtttggaaaaagtataaatatcttcgattggatgggcacacttctggccatgaaagaggagctcttatcgataaatttaacgatcctaattctcaagcattcatttttcttcttagtatacgagctggaggtgttggggtcaatctccaagctgccgatacagttatcatatttgatactgattggaatcctcaggttgatctgcaagcacaggctagggcccacaggattggtcaaaagaaggaggttcttgttttacgtttagaaacggtccgaactgttgaagagcaagtcagggcttcagcagaacacaaattaggtgttgctaatcagagtataactgctggtttttttgacaataacacaagtgctgaagatcgaagagagtatcttgaatcactcctacgtgagtctaaaaaggaagaagcagctccagtgttagatgatgatgctctgaatgacattctagctcggagcgaagctgagattgacatattcgaatctattgacaagcaaaggagagaagaagaaatggcagcttggcaaaaggtggttcaggatggttcaactagtgggctagaccctggagtattgccttctcgtcttgtaactgatgatgatctgaagcccttctgccatgctatgaaactttatgagccatcaaatgtgaaaacagtaaatgtgaatgtgaggaagaagggtgaacttgggggccttgatacacagcactatggaaggggtaaacgagcccgtgaggttcgctcttatgaagaccaatggactgaagaagaatttgaaaaactttgtcaagctgattctcctgaatcatcccaacctggtggcatgtcgaaggatttggatattcttaataaaggcattaagactgaaattcttgtggagagttcaaaagaaccagaacaaacgaagatggaggcatccccaactgtcggtgactctccaccagccaaacggcggagaggtagacctaaaaggtcagatgtttttgtatctcctactgctggtctgactgatgctgtcaaacaagacacaggaaccacacaggacggtagttctgctacaccagcaagtaccatccactctgatgcaccagctactgcaatcaattcagctgtttcagatgttaatatacattctattccaccagctgataccaagaaacaagagttcagtactgataccaaggtttccagttctgtttctgttttggaaggatctgtgccgaatgaaattggtacaccattacagagtgttcataatgtagcagtttctgcaccaccgcatcaatcagctaggggcaggaaatgccaagcaggagaaacacctcgtaggcgaggccgaaaaccaaaatctctatcttcatctggtgtagatgatgttagtcttaacccaaccttttcaactgttagtggtgtagcagacactagttatgttccttcatattctcaggtctcatcacaaggcactgctgtggcactggcaggaatccagaaggattttgtgacagttaagttggatacattgttaccagatagtggtaagggtgctcctcctgttaatgagggagataaaggtgctactgttacaacacctgtggcaaaagatatatgtgctgggactgtgacaacatcagacaacactgtcaccctgacaccaaatactcttaaggaaaacattggattagttcaagtggcatctgcaccttctatgctcgtggcttctgaagaactaatgaaaatagcacatgttgcggtggccgataagcctgttgagaagcaaactgcttcacgtcgccgcagaaagaaaacatctagtagcgaggatactggagtcagcactagacaaagatcagctatgaaaagatcttactacaacacctctgttgccgttgatgatattggttctgctgtgatcccaaatgaaaaatcaggaataacgaaggaaagagatgtcagttcaattcaaagtacatccaatgaactaccaaatattaactcaccattgtatgagaagtctggatatgattctcaaccaagcacacctatagctgtccccatcaatgaagacactcttcctagtggttttgacacctgtactaattctatgataactcttgccacatctgccaactctgctgaagatgataaaccagttgatttgcaccttaatgcacctgtttctgttgattcccaaaaccaagaacaacacatgacagggaaggaccatttggcagtgtgttctagaatctttgctactcagttacagacggacactgcaaatcctgctattgatcataaaccaggaactgcccagtttgaaccatctgcttccttgccccagaattcaggcaaggatgctactgcactaccttctgaggttgacagtgctgctccaaatagggcatcaagcaggaggaggaaagggtcaactcgagaaccacgcaccagaagtaattctgcatcagctgcaagtgaacgtcgtgcccgacttactggattgaagcaggcagaggacataaagaagttagagatgtcagcaacgccgaccacaacagtgtgtatttcatcggtagagcaacagggagctgcttctttaagtgcgaagattaccaatgcttctgtttctgaaggacagaagaatcctggaaattatatgccttctgccatttcaattcccgtggggagccatgttctgggcctgggcgcaacaagtattgaagaaacaactgccactatgataactcaggctcctgcagtttcaaaatcagaacgaagaaaacttccaggaggcagtcaacaaggtattcagtttgagagttcagcatcaaaaacaaagatggtatcagctgtggaaccagcacctgcaaatgttgaatgcatgcaaggtactgaagttaatagttcagaacagacaatagtttctgctactgaaccagcacctgcaaatgatgaacacatgcaagagcaaccaacaaatatcgtttcatctgtggaatcagaaccttcaaatgatgaagagcacacaaagcatgaagtgtttcttgcgactactggtgataatatgcttgcttctagtgcaggaactgaaatattgcgggatacagttgagcatgctgcttgccagccagaagcagtatgcacagatggaactgcaaggcagtctgaattgtcgcaacttgatagaaaagcctttcatgatgcctcatataaatacactcatgggtccactaaagatgatggtatcttgcccagtgaagtcattttccagttattttacaatcaactgagtcagatcggcctccaggtcaagtgaagaatttggagagtaggatggagcaggtgaaaacagaagaagctttggttaacagttctggtggcaatcaaactcacagtctgggcgatgaaccttctcataatacatcattagcaagaaattctccctcagaacactcgaatgagcgttgctctgatcaagtaattggtgaaaatttcaaaagtaaagaaaatattgttgaagtccattctggcattaatactgatggccccgatgaagctctgaatgcattgcacacccaatctaaggaggccagcatgacagatattggtgtacctactgatggtgatagatgtgaaggtaaagggactagtgtcgaggtctgtgctgacatgaatactgatgggcctgtggctacccaggatgcttcgtccacgaaatctgataaagagtcctgcatgatggaatgtggtgtgtctaccgatggctgtcccacagtttgcaaaacacacaatgatctccagggtcatgtatcttgtgaagaaacctttgttaggactggtggtgatgacacaacccatatcaccaatgcaaattatggttctaataatgaaagtgaggccaccattgctagtcctgttgaaaccacacaaaaactgatggaagggagcactgttattgtgtcggagaattctgatttaaataagcaatgccacacattgcatactagaaatgatcctcctgcaaataccctgttgatagttgagtctaacaaagttacttgtgatgctgaaattgtttgtgctagcaggttagaatcttctggcattgaggctgaaacagtgggtatccaagagtcagctcttactgattttgagggaacaaaaggaactggggatttgggtgacagaactaacagtcaactgcatgatgatgttcatgggacatcatgttccacgatagctcttgtatctgagaaagaaccttccgaagatcttaccaccggtagccattcagaagcatctaatttacttgctgctgtagaacaaactcaagaaactactgttgagaaccaagagatcatagatgcagtagtgtttatggatgcctgcaaggcagaacctgttggtgattttactattgctaaaggagctgaacagactgtagaaatggttcattatgttgataagcaatctgctgtattagactatgttgagacacagacaaaacgaacttcggtttgtggttctacgctaaatgaatcccctcaggctgcagggttggaagaagactgctctgtactgaagcatggtgatcctacttcatctgagcttcttactgtagcacctaatccaatcggtgaaacttctgttattcaagtggaaccagaggcaagaaactcagatggatactgcacaacagaggctggcagtgctttatctgaaactgtcatgggattggagccaaataaagaaactgcggttccaatgcaagagaatattggagaagctaatgataattttaataattgcgaagcacacaataattcggagattcatgcatttgaagtgtcgatggaaacgcagtcatcagaagtcaaggaagtatcttctattcagtctggtgcagcaaatttgagcacacagacaactgcactgcctgatgtaacaggacaaaccagtatggcatcgactggagaactagtatctacaaatgaacacatacacatgcaaggcactgaaatcaattcagagcaacaaacaaagatggtttcacctgctgaatcagcacctgctaatgatgaacacgtgcaagacattgtgattcttagttcagaacagcaaacaaagatggttttagctgcagagattgacgcattatgcgtccaggagactgcaattattgatcttgggggagcaagaggaacagttgacctgaatgacataagaacacaggttcctgcattacctggaagggatgtgctagatgtggaggcacatattttggagcaaaaaaaaacatcttcaccaggtgatgaaattaagggttcagaacaagcaaaaatcgaatcgattgcagagatcgaaacagtgggcgtcaaggagaatgtcattgctgatcataaggaaacaggtaacaacagtggcgtaagtatacatgcgcctctattagttgaatctggacaaaaggcatcacctggagttgaattgcgtggtattgaggttgatgctcatgttttggaacaagcaaagatggtttcagctctagaaccagactctactccagaagtttgtgctgacaagttagaaccttctggtgctgatgatgttggaatgattgttgtccaggaggctgcttctgttgatgatcacaatagagcacaaggtggtgaggctcattgttcagaacaaataaagatggcttcaattgcacaagcggtgtctagcatggctttagtaggatattcttcttcagaagactcaatggtggatgctgctgcccgagtaactgatgctgattttgtggatagtaaagcagctggtgtttatcgccaagaaactatgcctactcaaaccacctctaccctcccagagaacatggattctcctgcaactgctgctaccatggttgaatcgaagtttgctgcctcgtctgagcacgttgcaggacccgagccaattgatgaaacttctgttatgcaagtggaactggcaacaagcacaggggatggatgtgcagcagatggtcacaatcttgtttcatctgaaactgttgttgaagtgaagcttgctcaagaaattgttgttcctagtccaggtggtagcatagaagctaataatacttctaccatcagcgaagtatacaaagatacccagtctcgtgcatctggtgaagcatgcaatgatggtcagtctcatggtgatgaaaatatgaaacttggtgaagcttacactgaactgcagctggcaccttcctctggtgaggaggccatgacatgtatgtgtagtgagctgcccagccaggaggtggaggctccaagcagtgaccctttggagaataatgaagaaacgaaaaatgaagctgctgctcaaggatcagtaaatgaggattctgctcctcgtgctgaaaatgcaaagattgatgaagctgacacagaacaggaactgcttccatctggtgaggccacggtagacgaatccagcgagctactcagccaagacgaaaaggtggctcgtaaagatgcaaagatggaagagtctgctgctgctgctgctgcacagagacagctaactactgaagttgctcatgcaagtgaaaacgcgaaacttggtgaagatggcacggagctgcaactgccaccaccttcaatggtagacatatctagggagcaactcagccaggaagtggaggttgcaagctctgggccttcaggaactgatgaaactgctgagatgaaacggctaaacactgaacattcacctggtgatgaaacttcaaaacttgttggaactgatctaggactgcaattgtcaccttctggtgatgccatggtagatatatctaataagccacccagctgccaagacgtaaaggaggccccgagcagtgacattttgggaaatgatgaaaattcagacaccgagaagactcctgctgccttgcatggacggctgaacaccgaacttgctcctagtggcagaaatacagaatttagtgaagctgacactggaaaacaagagacacccgtgtctgctgaggctatggtagaatcatcgagcgagcctcgcagccatgaggcaaaggaagctccaacccctgacctgtctggggatgatgaaaaagcgaagtcagcaagggctgctgttgttgcggaactttttggagatgcaacagaaggtggttcggatcagccattgccgtctcctagagaacaaggcaaggaagcagaggccgatggaggcttttagagtaaagttgcaaatattgtatcaagagatactagaatccgtgtaagtaagaactgctaatagtgcttttagttgtaactggtgtaagcttctactcagaatcaaaagcgacgtgctgagattacagcaacagtggcctacggcagtttactactgttttgtgcaatattgctgctgagttttgttgagacaggcaattgatctgtcatctgtctcgtcttgcatcgaagttggcagcaccatggtgaggtgctcccgccttaacctggaagcgctgacagagggaagaacaatactctctggtttcctaatgttttcctgttcactgttttgatttgatgctgcattgcagtagtgtgacttagtaacataatggtgcgtttggatagacggacataccgatccagaatcatctgaacctaaatattgagtacaagcttagattatctgtttggtctgctttatgtctgggtgcaatgctctctgatttctggacggagtggtaccgcaatccaaacagactttaatgtttgggtgcttcaggtcataatcaaccatctaatttactttgcaaatgaatgtttcaaactggactgctcaagcctaccaagtttaatggtccttcctagtattgaatccttttgagtctagcccgtttcctcatttgaattttcactgttagtgtg

SEQ ID NO: 58889 - DNA, 12238 bp, Zea Mays
ggagagagtgcatcagcactgcaggggtctactgaggcactccaagtggggaaatggcggaggcgacgaattcgagcttgggcacgtaggcgtcgctcctgccatcgccgcagcggtcactggactctcacgccgccgccgccgccgccggagaccattagttctcctgcgcggcggctccgcggctcccgccctctcccttaccttcttcccgctagggttttctccgatccccaatcactgctggttcacaaatggcttcatctcagcatgttgagatggaggctgcgaaacttctacataaacttatccaggagtcgaaggatgagcctgctaaactagcaacaaaactttacgtgatatgtcagcatatgaaactaagtggaaaggagcaatcactgccatatcaagtcatatcaagggctatggagacagttgtgaaccaacatggaattgatatggatgcattgcgatcatcacgaattccatttgctggtggtcctcaggcaggggattctagtggtgtcatgtcaaaggacaaggaggtcattggtaaccagtctcccatggtcggaagtgatgcttcccaaagtagtggacaagctggattatggcagcttccatcaggtagggtacccacagggccaaataggggagatttctcagcagctgatattcatcaaggctccatgtcacaaaaaagcggtagatcctctggcattgaaagccctgcaagtctgcagatggaggacaccagatctatgaattcacatgattctttgaaatccgatgagaaaacaagtaagaaaacctcttccaagagaaaaaggatggattcaaaaggagctggtgatttgcgttcagaagacaactcaaagtcagatgttatctccactggacagaataccaggaaggggaaacaggttggtaaggctggtagacaaggtcagccttccatgggaattgagcatgagcagcaacctcataaactgcaaggtggtactggtcaggtaccacctatacatggtggtgcaccttttctcaggactcgctcagaaggtccttctgggaggacaatggacaagactaaaccatcaaatccattctcaatgggtcaaattccaaattttcctgaagggctggcttctactggtgctccaatcgagttgcagaaaagtatacagggtggagcaagtttatttaatcctggttttggctggaaccaaaatccacaagttcaaaccttgaagaattctcaaggttctattcataatttagtgaggtctggagttactgttgaagggaaagttaatgtaggggcacaaggagcttttaactctgcctctgcaccacagatggaatttcccacagttcctccatacaacccctcttccttcggagctagctcacagtttctggacaaaggcaaggagttggtttccagcattataagcactgaacctcattcatctaaagttgcatctcagcctgggatttctcatggaagtcccatgcaagaaaggcaaggtatgatcagggtgccacagagaggcgaggcatcatttcaggaacgcaggccatcttcacttccgagtagaagtactgggccaagtccaatgtctcacatttcttccaacacaccatttaaagaacagcagctgaagcagctcagagcacagtgcttagtatttcttgcatttaggaataatttgcagcccaggaaggtacatcttgaaattgctttgggcagagggcctcctgcagaaagtgacagtgcaggtcaaaggggcagcgagggcagagtgtctgatgctctgggaaaggaaaatggtagcagtcgggagaactctggtgtcttttgtaggcaaactgatatctctagacttccagccacatctgcaggaagtattgcagaggatgattccttatcgaaggatccagaaaatgctacaaaaaaaatcaagttagctgaacaggagaagtcattgatggaagtagaaaatgtccagcaagcttctgttatgcaaggaactagttctgaaatgcgttcccaagaaactgcatctcaaaatccatatcgaccacaacagtcatattatcaaggagatacaagaagaatcgcctcggatatccataggactgatgctgaaattttgaaccagaatttaagttggggaggccagggatctactgctttgggtggtactagacagcttctgaatcaggaaactaaagaatcacttgcaccttcaaagtcacaccatatgcctgttgatggttacaactccaatatacaaggaatagatcggactccagagatagctggagctggtaatgatgttgaaaattgtagccacgtagcagatattgtgcctgagcaggctgctgatgaaggagatgaggacctctcagagcatgaggatttattgtcatctccaaagcacacaatgacggaaaaatggatcttagattaccagaagagaatttacaatgagaaacaaaagagaacattggagcagcataaggtacacagcagaatgtcagcaacatatgaggagctaaaggagagcgttaattcatccgaagatctttctgcaaagaccaagagcgtcattgaattgaaaaagcttcagcttctgccacttcaacgtcgtgtacgcagtgaatttttgctggattttttcaagcctaatacatccgacttagagcgcataaaatcactgaagaaacataggcatgggcggcgggtgaaacagcttgaaaaaattgaacagaaaatgaaggaagaaaggcaaaagagaattcgtgagagacagaaggaattctttgctgatattgaagcttacagagagaaactcgaggataacttcaaggttaagagagagcgcttgaaggggttcaatcgatacataaaagaatttcacaaaaggaaagaaagaattcatcgggagaaactggataggatccaacgcgagaaaatcaacctgcttaagaacaatgatgttgaaggttatcttagaatggtcaaggatgcaaaatctgatcgtgtcaagcaactattgcgtgaaactgagaaatatcttcagaaacttgggaacaaattacagagtgcaaagtccacagatggccgctcatcttttgttactgataagagtgacactgcaaacgacattgaagatgagagctaccagccacagcattatctggaaagtaatgaaaagtactatcaactggcacacagtgtaaaggaaactgtaaatgatcagccatcttatcttcagggcggcaaattgcgagagtaccaaatgaatggcttgcgttggctggtttcattgtacaataataatttgaatggtattttagcagatgagatgggccttggtaaaacagtacaagtaatctctttgatatgctaccttatggaaacaaaaaatgaccgtgggccttttctcgtggttgtaccatcatctgttcttcctggatgggaatctgaactcagcttctgggcacctagtataaataaaattgcttatgctggtcctcctgaagaaaggcgcaggatgttcaaagagatgattgttcatcagaagttcaatgttcttctgacaacatatgagtacttgatgaacaagcatgataggccaaaactaagcaaaatacaatggcactatataataatcgatgaagggcatcgtattaaaaatgcttcttgtaaacttaatgctgatttgaagctttatcggagctctcatcggatattattgacaggaacacctcttcagaataatctcgaggagctgtgggcacttctaaattttttgttgcccaatatttttaattcgtcagaggacttctctcagtggtttaacaaaccatttgaaagtaatggtgataattcacctgatgaggccttactttcagaggaggagaacttgttgatcataaatcgtcttcaccaggttcttcggccctttgtactcagaagacttaagcataaggtcgaaaatgagcttcctgaaaaaattgaaagacttgtaagatgtgaggcatctgcttatcagaaacttctcatgacaagggtggaagaaaatcttggtggaattggagccgttaaggttcgctccgttcacaactctgtcatggaattgaggaacatatgcaaccatccatacttgagccagcttcatgttgaagagattgagggctacctacctaaacattacctaccatctattttgaggctctgcggaaaacttgagatgttggacagattgctgcctaaactcaaagctacgggccatagggttctacttttttctacaatgacaagattgcttgatgtaatggaggattacttggtttggaaaaagtataaatatcttcgattggatgggcacacttctggccatgaaagaggagctcttatcgataaatttaacgatcctaattctcaagcattcatttttcttcttagtatacgagctggaggtgttggggtcaatctccaagctgccgatacagttatcatatttgatactgattggaatcctcaggttgatctgcaagcacaggctagggcccacaggattggtcaaaagaaggaggttcttgttttacgtttagaaacggtccgaactgttgaagagcaagtcagggcttcagcagaacacaaattaggtgttgctaatcagagtataactgctggtttttttgacaataacacaagtgctgaagatcgaagagagtatcttgaatcactcctacgtgagtctaaaaaggaagaagcagctccagtgttagatgatgatgctctgaatgacattctagctcggagcgaagctgagattgacatattcgaatctattgacaagcaaaggagagaagaagaaatggcagcttggcaaaaggtggttcaggatggttcaactagtgggctagaccctggagtattgccttctcgtcttgtaactgatgatgatctgaagcccttctgccatgctatgaaactttatgagccatcaaatgtgaaaacagtaaatgtgaatgtgaggaagaagggtgaacttgggggccttgatacacagcactatggaaggggtaaacgagcccgtgaggttcgctcttatgaagaccaatggactgaagaagaatttgaaaaactttgtcaagctgattctcctgaatcatcccaacctggtggcatgtcgaaggatttggatattcttaataaaggcattaagactgaaattcttgtggagagttcaaaagaaccagaacaaacgaagatggaggcatccccaactgtcggtgactctccaccagccaaacggcggagaggtagacctaaaaggtcagatgtttttgtatctcctactgctggtctgactgatgctgtcaaacaagacacaggaaccacacaggacggtagttctgctacaccagcaagtaccatccactctgatgcaccagctactgcaatcaattcagctgtttcagatgttaatatacattctattccaccagctgataccaagaaacaagagttcagtactgataccaaggtttccagttctgtttctgttttggaaggatctgtgccgaatgaaattggtacaccattacagagtgttcataatgtagcagtttctgcaccaccgcatcaatcagctaggggcaggaaatgccaagcaggagaaacacctcgtaggcgaggccgaaaaccaaaatctctatcttcatctggtgtagatgatgttagtcttaacccaaccttttcaactgttagtggtgtagcagacactagttatgttccttcatattctcaggtctcatcacaaggcactgctgtggcactggcaggaatccagaaggattttgtgacagttaagttggatacattgttaccagatagtggtaagggtgctcctcctgttaatgagggagataaaggtgctactgttacaacacctgtggcaaaagatatatgtgctgggactgtgacaacatcagacaacactgtcaccctgacaccaaatactcttaaggaaaacattggattagttcaagtggcatctgcaccttctatgctcgtggcttctgaagaactaatgaaaatagcacatgttgcggtggccgataagcctgttgagaagcaaactgcttcacgtcgccgcagaaagaaaacatctagtagcgaggatactggagtcagcactagacaaagatcagctatgaaaagatcttactacaacacctctgttgccgttgatgatattggttctgctgtgatcccaaatgaaaaatcaggaataacgaaggaaagagatgtcagttcaattcaaagtacatccaatgaactaccaaatattaactcaccattgtatgagaagtctggatatgattctcaaccaagcacacctatagctgtccccatcaatgaagacactcttcctagtggttttgacacctgtactaattctatgataactcttgccacatctgccaactctgctgaagatgataaaccagttgatttgcaccttaatgcacctgtttctgttgattcccaaaaccaagaacaacacatgacagggaaggaccatttggcagtgtgttctagaatctttgctactcagttacagacggacactgcaaatcctgctattgatcataaaccaggaactgcccagtttgaaccatctgcttccttgccccagaattcaggcaaggatgctactgcactaccttctgaggttgacagtgctgctccaaatagggcatcaagcaggaggaggaaagggtcaactcgagaaccacgcaccagaagtaattctgcatcagctgcaagtgaacgtcgtgcccgacttactggattgaagcaggcagaggacataaagaagttagagatgtcagcaacgccgaccacaacagtgtgtatttcatcggtagagcaacagggagctgcttctttaagtgcgaagattaccaatgcttctgtttctgaaggacagaagaatcctggaaattatatgccttctgccatttcaattcccgtggggagccatgttctgggcctgggcgcaacaagtattgaagaaacaactgccactatgataactcaggctcctgcagtttcaaaatcagaacgaagaaaacttccaggaggcagtcaacaaggtattcagtttgagagttcagcatcaaaaacaaagatggtatcagctgtggaaccagcacctgcaaatgttgaatgcatgcaaggtactgaagttaatagttcagaacagacaatagtttctgctactgaaccagcacctgcaaatgatgaacacatgcaagagcaaccaacaaatatcgtttcatctgtggaatcagaaccttcaaatgatgaagagcacacaaagcatgaagtgtttcttgcgactactggtgataatatgcttgcttctagtgcaggaactgaaatattgcgggatacagttgagcatgctgcttgccagccagaagcagtatgcacagatggaactgcaaggcagtctgaattgtcgcaacttgatagaaaagcctttcatgatgcctcatataaatacactcatgggtccactaaagatgatggtatcttgcccagtgaaggtacttctgttgatgttactggttctaagcaggatgatgtgaacattgttggcacacaaactgatgatgtttctcggggttctagtcattttccagttattttacaatcaactgagtcagatcggcctccaggtcaagtgaagaatttggagagtaggatggagcaggtgaaaacagaagaagctttggttaacagttctggtggcaatcaaactcacagtctgggcgatgaaccttctcataatacatcattagcaagaaattctccctcagaacactcgaatgagcgttgctctgatcaagtaattggtgaaaatttcaaaagtaaagaaaatattgttgaagtccattctggcattaatactgatggccccgatgaagctctgaatgcattgcacacccaatctaaggaggccagcatgacagatattggtgtacctactgatggtgatagatgtgaaggtaaagggactagtgtcgaggtctgtgctgacatgaatactgatgggcctgtggctacccaggatgcttcgtccacgaaatctgataaagagtcctgcatgatggaatgtggtgtgtctaccgatggctgtcccacagtttgcaaaacacacaatgatctccagggtcatgtatcttgtgaagaaacctttgttaggactggtggtgatgacacaacccatatcaccaatgcaaattatggttctaataatgaaagtgaggccaccattgctagtcctgttgaaaccacacaaaaactgatggaagggagcactgttattgtgtcggagaattctgatttaaataagcaatgccacacattgcatactagaaatgatcctcctgcaaataccctgttgatagttgagtctaacaaagttacttgtgatgctgaaattgtttgtgctagcaggttagaatcttctggcattgaggctgaaacagtgggtatccaagagtcagctcttactgattttgagggaacaaaaggaactggggatttgggtgacagaactaacagtcaactgcatgatgatgttcatgggacatcatgttccacgatagctcttgtatctgagaaagaaccttccgaagatcttaccaccggtagccattcagaagcatctaatttacttgctgctgtagaacaaactcaagaaactactgttgagaaccaagagatcatagatgcagtagtgtttatggatgcctgcaaggcagaacctgttggtgattttactattgctaaaggagctgaacagactgtagaaatggttcattatgttgataagcaatctgctgtattagactatgttgagacacagacaaaacgaacttcggtttgtggttctacgctaaatgaatcccctcaggctgcagggttggaagaagactgctctgtactgaagcatggtgatcctacttcatctgagcttcttactgtagcacctaatccaatcggtgaaacttctgttattcaagtggaaccagaggcaagaaactcagatggatactgcacaacagaggctggcagtgctttatctgaaactgtcatgggattggagccaaataaagaaactgcggttccaatgcaagagaatattggagaagctaatgataattttaataattgcgaagcacacaataattcggagattcatgcatttgaagtgtcgatggaaacgcagtcatcagaagtcaaggaagtatcttctattcagtctggtgcagcaaatttgagcacacagacaactgcactgcctgatgtaacaggacaaaccagtatggcatcgactggagaactagtatctacaaatgaacacatacacatgcaaggcactgaaatcaattcagagcaacaaacaaagatggtttcacctgctgaatcagcacctgctaatgatgaacacgtgcaagacattgtgattcttagttcagaacagcaaacaaagatggttttagctgcagagattgacgcattatgcgtccaggagactgcaattattgatcttgggggagcaagaggaacagttgacctgaatgacataagaacacaggttcctgcattacctggaagggatgtgctagatgtggaggcacatattttggagcaaaaaaaaacatcttcaccaggtgatgaaattaagggttcagaacaagcaaaaatcgaatcgattgcagagatcgaaacagtgggcgtcaaggagaatgtcattgctgatcataaggaaacaggtattgaggttgatgctcatgttttggaacaagcaaagatggtttcagctctagaaccagactctactccagaagtttgtgctgacaagttagaaccttctggtggtgaggctcattgttcagaacaaataaagatggcttcaattgcacaagcggtgtctagcatggctttagtaggatattcttcttcagaagactcaatggtggatgctgctgcccgagtaactgatgctgattttgtggatagtaaagcagctggtgtttatcgccaagaaactatgcctactcaaaccacctctaccctcccagagaacatggattctcctgcaactgctgctaccatggttgaatcgaagtttgctgcctcgtctgagcacgttgcaggacccgagccaattgatgaaacttctgttatgcaagtggaactggcaacaagcacaggggatggatgtgcagcagatggtcacaatcttgtttcatctgaaactgttgttgaagtgaagcttgctcaagaaattgttgttcctagtccaggtggtagcatagaagctaataatacttctaccatcagcgaagtatacaaagatacccagtctcgtgcatctggtgaagcatgcaatgatggtcagtctcatggtgatgaaaatatgaaacttggtgaagcttacactgaactgcagctggcaccttcctctggtgaggaggccatgacatgtatgtgtagtgagctgcccagccaggaggtggaggctccaagcagtgaccctttggagaataatgaagaaacgaaaaatgaagctgctgctcaaggatcagtaaatgaggattctgctcctcgtgctgaaaatgcaaagattgatgaagctgacacagaacaggaactgcttccatctggtgaggccacggtagacgaatccagcgagctactcagccaagacgaaaaggtggctcgtaaagatgcaaagatggaagagtctgctgctgctgctgctgcacagagacagctaactactgaagttgctcatgcaagtgaaaacgcgaaacttggtgaagatggcacggagctgcaactgccaccaccttcaatggtagacatatctagggagcaactcagccaggaagtggaggttgcaagctctgggccttcaggaactgatgaaactgctgagatgaaacggctaaacactgaacattcacctggtgatgaaacttcaaaacttgttggaactgatctaggactgcaattgtcaccttctggtgatgccatggtagatatatctaataagccacccagctgccaagacgtaaaggaggccccgagcagtgacattttgggaaatgatgaaaattcagacaccgagaagactcctgctgccttgcatggacggctgaacaccgaacttgctcctagtggcagaaatacagaatttagtgaagctgacactggaaaacaagagacacccgtgtctgctgaggctatggtagaatcatcgagcgagcctcgcagccatgaggcaaaggaagctccaacccctgacctgtctggggatgatgaaaaagcgaagtcagcaagggctgctgttgttgcggaactttttggagatgcaacagaaggtggttcggatcagccattgccgtctcctagagaacaaggcaaggaagcagaggccgatggaggcttttagagtaaagttgcaaatattgtatcaagagatactagaatccgtgtaagtaagaactgctaatagtgcttttagttgtaactggtgtaagcttctactcagaatcaaaagcgacgtgctgagattacagcaacagtggcctacggcagtttactactgttttgtgcaatattgctgctgagttttgttgagacaggcaattgatctgtcatctgtctcgtcttgcatcgaagttggcagcaccatggtgaggtgctcccgccttaacctggaagcgctgacagagggaagaacaatactctctggtttcctaatgttttcctgttcactgttttgatttgatgctgcattgcagtagtgtgacttagtaacataatggtgcgtttggatagacggacataccgatccagaatcatctgaacctaaatattgagtacaagcttagattatctgtttggtctgctttatgtctgggtgcaatgctctctgatttctggacggagtggtaccgcaatccaaacagactttaatgtttgggtgcttcaggtcataatcaaccatctaatttactttgcaaatgaatgtttcaaactggactgctcaagcctaccaagtttaatggtccttcctagtattgaatccttttgagtctagcccgtttcctcatttgaattttcactgttagtgtg

SEQ ID NO: 58890 - DNA, 12388 bp, Zea Mays
ggagagagtgcatcagcactgcaggggtctactgaggcactccaagtggggaaatggcggaggcgacgaattcgagcttgggcacgtaggcgtcgctcctgccatcgccgcagcggtcactggactctcacgccgccgccgccgccgccggagaccattagttctcctgcgcggcggctccgcggctcccgccctctcccttaccttcttcccgctagggttttctccgatccccaatcactgctggttcacaaatggcttcatctcagcatgttgagatggaggctgcgaaacttctacataaacttatccaggagtcgaaggatgagcctgctaaactagcaacaaaactttacgtgatatgtcagcatatgaaactaagtggaaaggagcaatcactgccatatcaagtcatatcaagggctatggagacagttgtgaaccaacatggaattgatatggatgcattgcgatcatcacgaattccatttgctggtggtcctcaggcaggggattctagtggtgtcatgtcaaaggacaaggaggtcattggtaaccagtctcccatggtcggaagtgatgcttcccaaagtagtggacaagctggattatggcagcttccatcaggtagggtacccacagggccaaataggggagatttctcagcagctgatattcatcaaggctccatgtcacaaaaaagcggtagatcctctggcattgaaagccctgcaagtctgcagatggaggacaccagatctatgaattcacatgattctttgaaatccgatgagaaaacaagtaagaaaacctcttccaagagaaaaaggatggattcaaaaggagctggtgatttgcgttcagaagacaactcaaagtcagatgttatctccactggacagaataccaggaaggggaaacaggttggtaaggctggtagacaaggtcagccttccatgggaattgagcatgagcagcaacctcataaactgcaaggtggtactggtcaggtaccacctatacatggtggtgcaccttttctcaggactcgctcagaaggtccttctgggaggacaatggacaagactaaaccatcaaatccattctcaatgggtcaaattccaaattttcctgaagggctggcttctactggtgctccaatcgagttgcagaaaagtatacagggtggagcaagtttatttaatcctggttttggctggaaccaaaatccacaagttcaaaccttgaagaattctcaaggttctattcataatttagtgaggtctggagttactgttgaagggaaagttaatgtaggggcacaaggagcttttaactctgcctctgcaccacagatggaatttcccacagttcctccatacaacccctcttccttcggagctagctcacagtttctggacaaaggcaaggagttggtttccagcattataagcactgaacctcattcatctaaagttgcatctcagcctgggatttctcatggaagtcccatgcaagaaaggcaaggtatgatcagggtgccacagagaggcgaggcatcatttcaggaacgcaggccatcttcacttccgagtagaagtactgggccaagtccaatgtctcacatttcttccaacacaccatttaaagaacagcagctgaagcagctcagagcacagtgcttagtatttcttgcatttaggaataatttgcagcccaggaaggtacatcttgaaattgctttgggcagagggcctcctgcagaaagtgacagtgcaggtcaaaggggcagcgagggcagagtgtctgatgctctgggaaaggaaaatggtagcagtcgggagaactctggtgtcttttgtaggcaaactgatatctctagacttccagccacatctgcaggaagtattgcagaggatgattccttatcgaaggatccagaaaatgctacaaaaaaaatcaagttagctgaacaggagaagtcattgatggaagtagaaaatgtccagcaagcttctgttatgcaaggaactagttctgaaatgcgttcccaagaaactgcatctcaaaatccatatcgaccacaacagtcatattatcaaggagatacaagaagaatcgcctcggatatccataggactgatgctgaaattttgaaccagaatttaagttggggaggccagggatctactgctttgggtggtactagacagcttctgaatcaggaaactaaagaatcacttgcaccttcaaagtcacaccatatgcctgttgatggttacaactccaatatacaaggaatagatcggactccagagatagctggagctggtaatgatgttgaaaattgtagccacgtagcagatattgtgcctgagcaggctgctgatgaaggagatgaggacctctcagagcatgaggatttattgtcatctccaaagcacacaatgacggaaaaatggatcttagattaccagaagagaatttacaatgagaaacaaaagagaacattggagcagcataaggtacacagcagaatgtcagcaacatatgaggagctaaaggagagcgttaattcatccgaagatctttctgcaaagaccaagagcgtcattgaattgaaaaagcttcagcttctgccacttcaacgtcgtgtacgcagtgaatttttgctggattttttcaagcctaatacatccgacttagagcgcataaaatcactgaagaaacataggcatgggcggcgggtgaaacagcttgaaaaaattgaacagaaaatgaaggaagaaaggcaaaagagaattcgtgagagacagaaggaattctttgctgatattgaagcttacagagagaaactcgaggataacttcaaggttaagagagagcgcttgaaggggttcaatcgatacataaaagaatttcacaaaaggaaagaaagaattcatcgggagaaactggataggatccaacgcgagaaaatcaacctgcttaagaacaatgatgttgaaggttatcttagaatggtcaaggatgcaaaatctgatcgtgtcaagcaactattgcgtgaaactgagaaatatcttcagaaacttgggaacaaattacagagtgcaaagtccacagatggccgctcatcttttgttactgataagagtgacactgcaaacgacattgaagatgagagctaccagccacagcattatctggaaagtaatgaaaagtactatcaactggcacacagtgtaaaggaaactgtaaatgatcagccatcttatcttcagggcggcaaattgcgagagtaccaaatgaatggcttgcgttggctggtttcattgtacaataataatttgaatggtattttagcagatgagatgggccttggtaaaacagtacaagtaatctctttgatatgctaccttatggaaacaaaaaatgaccgtgggccttttctcgtggttgtaccatcatctgttcttcctggatgggaatctgaactcagcttctgggcacctagtataaataaaattgcttatgctggtcctcctgaagaaaggcgcaggatgttcaaagagatgattgttcatcagaagttcaatgttcttctgacaacatatgagtacttgatgaacaagcatgataggccaaaactaagcaaaatacaatggcactatataataatcgatgaagggcatcgtattaaaaatgcttcttgtaaacttaatgctgatttgaagctttatcggagctctcatcggatattattgacaggaacacctcttcagaataatctcgaggagctgtgggcacttctaaattttttgttgcccaatatttttaattcgtcagaggacttctctcagtggtttaacaaaccatttgaaagtaatggtgataattcacctgatgaggccttactttcagaggaggagaacttgttgatcataaatcgtcttcaccaggttcttcggccctttgtactcagaagacttaagcataaggtcgaaaatgagcttcctgaaaaaattgaaagacttgtaagatgtgaggcatctgcttatcagaaacttctcatgacaagggtggaagaaaatcttggtggaattggagccgttaaggttcgctccgttcacaactctgtcatggaattgaggaacatatgcaaccatccatacttgagccagcttcatgttgaagagattgagggctacctacctaaacattacctaccatctattttgaggctctgcggaaaacttgagatgttggacagattgctgcctaaactcaaagctacgggccatagggttctacttttttctacaatgacaagattgcttgatgtaatggaggattacttggtttggaaaaagtataaatatcttcgattggatgggcacacttctggccatgaaagaggagctcttatcgataaatttaacgatcctaattctcaagcattcatttttcttcttagtatacgagctggaggtgttggggtcaatctccaagctgccgatacagttatcatatttgatactgattggaatcctcaggttgatctgcaagcacaggctagggcccacaggattggtcaaaagaaggaggttcttgttttacgtttagaaacggtccgaactgttgaagagcaagtcagggcttcagcagaacacaaattaggtgttgctaatcagagtataactgctggtttttttgacaataacacaagtgctgaagatcgaagagagtatcttgaatcactcctacgtgagtctaaaaaggaagaagcagctccagtgttagatgatgatgctctgaatgacattctagctcggagcgaagctgagattgacatattcgaatctattgacaagcaaaggagagaagaagaaatggcagcttggcaaaaggtggttcaggatggttcaactagtgggctagaccctggagtattgccttctcgtcttgtaactgatgatgatctgaagcccttctgccatgctatgaaactttatgagccatcaaatgtgaaaacagtaaatgtgaatgtgaggaagaagggtgaacttgggggccttgatacacagcactatggaaggggtaaacgagcccgtgaggttcgctcttatgaagaccaatggactgaagaagaatttgaaaaactttgtcaagctgattctcctgaatcatcccaacctggtggcatgtcgaaggatttggatattcttaataaaggcattaagactgaaattcttgtggagagttcaaaagaaccagaacaaacgaagatggaggcatccccaactgtcggtgactctccaccagccaaacggcggagaggtagacctaaaaggtcagatgtttttgtatctcctactgctggtctgactgatgctgtcaaacaagacacaggaaccacacaggacggtagttctgctacaccagcaagtaccatccactctgatgcaccagctactgcaatcaattcagctgtttcagatgttaatatacattctattccaccagctgataccaagaaacaagagttcagtactgataccaaggtttccagttctgtttctgttttggaaggatctgtgccgaatgaaattggtacaccattacagagtgttcataatgtagcagtttctgcaccaccgcatcaatcagctaggggcaggaaatgccaagcaggagaaacacctcgtaggcgaggccgaaaaccaaaatctctatcttcatctggtgtagatgatgttagtcttaacccaaccttttcaactgttagtggtgtagcagacactagttatgttccttcatattctcaggtctcatcacaaggcactgctgtggcactggcaggaatccagaaggattttgtgacagttaagttggatacattgttaccagatagtggtaagggtgctcctcctgttaatgagggagataaaggtgctactgttacaacacctgtggcaaaagatatatgtgctgggactgtgacaacatcagacaacactgtcaccctgacaccaaatactcttaaggaaaacattggattagttcaagtggcatctgcaccttctatgctcgtggcttctgaagaactaatgaaaatagcacatgttgcggtggccgataagcctgttgagaagcaaactgcttcacgtcgccgcagaaagaaaacatctagtagcgaggatactggagtcagcactagacaaagatcagctatgaaaagatcttactacaacacctctgttgccgttgatgatattggttctgctgtgatcccaaatgaaaaatcaggaataacgaaggaaagagatgtcagttcaattcaaagtacatccaatgaactaccaaatattaactcaccattgtatgagaagtctggatatgattctcaaccaagcacacctatagctgtccccatcaatgaagacactcttcctagtggttttgacacctgtactaattctatgataactcttgccacatctgccaactctgctgaagatgataaaccagttgatttgcaccttaatgcacctgtttctgttgattcccaaaaccaagaacaacacatgacagggaaggaccatttggcagtgtgttctagaatctttgctactcagttacagacggacactgcaaatcctgctattgatcataaaccaggaactgcccagtttgaaccatctgcttccttgccccagaattcaggcaaggatgctactgcactaccttctgaggttgacagtgctgctccaaatagggcatcaagcaggaggaggaaagggtcaactcgagaaccacgcaccagaagtaattctgcatcagctgcaagtgaacgtcgtgcccgacttactggattgaagcaggcagaggacataaagaagttagagatgtcagcaacgccgaccacaacagtgtgtatttcatcggtagagcaacagggagctgcttctttaagtgcgaagattaccaatgcttctgtttctgaaggacagaagaatcctggaaattatatgccttctgccatttcaattcccgtggggagccatgttctgggcctgggcgcaacaagtattgaagaaacaactgccactatgataactcaggctcctgcagtttcaaaatcagaacgaagaaaacttccaggaggcagtcaacaaggtattcagtttgagagttcagcatcaaaaacaaagatggtatcagctgtggaaccagcacctgcaaatgttgaatgcatgcaaggtactgaagttaatagttcagaacagacaatagtttctgctactgaaccagcacctgcaaatgatgaacacatgcaagagcaaccaacaaatatcgtttcatctgtggaatcagaaccttcaaatgatgaagagcacacaaagcatgaagtgtttcttgcgactactggtgataatatgcttgcttctagtgcaggaactgaaatattgcgggatacagttgagcatgctgcttgccagccagaagcagtatgcacagatggaactgcaaggcagtctgaattgtcgcaacttgatagaaaagcctttcatgatgcctcatataaatacactcatgggtccactaaagatgatggtatcttgcccagtgaaggtacttctgttgatgttactggttctaagcaggatgatgtgaacattgttggcacacaaactgatgatgtttctcggggttctagtcattttccagttattttacaatcaactgagtcagatcggcctccaggtcaagtgaagaatttggagagtaggatggagcaggtgaaaacagaagaagctttggttaacagttctggtggcaatcaaactcacagtctgggcgatgaaccttctcataatacatcattagcaagaaattctccctcagaacactcgaatgagcgttgctctgatcaagtaattggtgaaaatttcaaaagtaaagaaaatattgttgaagtccattctggcattaatactgatggccccgatgaagctctgaatgcattgcacacccaatctaaggaggccagcatgacagatattggtgtacctactgatggtgatagatgtgaaggtaaagggactagtgtcgaggtctgtgctgacatgaatactgatgggcctgtggctacccaggatgcttcgtccacgaaatctgataaagagtcctgcatgatggaatgtggtgtgtctaccgatggctgtcccacagtttgcaaaacacacaatgatctccagggtcatgtatcttgtgaagaaacctttgttaggactggtggtgatgacacaacccatatcaccaatgcaaattatggttctaataatgaaagtgaggccaccattgctagtcctgttgaaaccacacaaaaactgatggaagggagcactgttattgtgtcggagaattctgatttaaataagcaatgccacacattgcatactagaaatgatcctcctgcaaataccctgttgatagttgagtctaacaaagttacttgtgatgctgaaattgtttgtgctagcaggttagaatcttctggcattgaggctgaaacagtgggtatccaagagtcagctcttactgattttgagggaacaaaaggaactggggatttgggtgacagaactaacagtcaactgcatgatgatgttcatgggacatcatgttccacgatagctcttgtatctgagaaagaaccttccgaagatcttaccaccggtagccattcagaagcatctaatttacttgctgctgtagaacaaactcaagaaactactgttgagaaccaagagatcatagatgcagtagtgtttatggatgcctgcaaggcagaacctgttggtgattttactattgctaaaggagctgaacagactgtagaaatggttcattatgttgataagcaatctgctgtattagactatgttgagacacagacaaaacgaacttcggtttgtggttctacgctaaatgaatcccctcaggctgcagggttggaagaagactgctctgtactgaagcatggtgatcctacttcatctgagcttcttactgtagcacctaatccaatcggtgaaacttctgttattcaagtggaaccagaggcaagaaactcagatggatactgcacaacagaggctggcagtgctttatctgaaactgtcatgggattggagccaaataaagaaactgcggttccaatgcaagagaatattggagaagctaatgataattttaataattgcgaagcacacaataattcggagattcatgcatttgaagtgtcgatggaaacgcagtcatcagaagtcaaggaagtatcttctattcagtctggtgcagcaaatttgagcacacagacaactgcactgcctgatgtaacaggacaaaccagtatggcatcgactggagaactagtatctacaaatgaacacatacacatgcaaggcactgaaatcaattcagagcaacaaacaaagatggtttcacctgctgaatcagcacctgctaatgatgaacacgtgcaagacattgtgattcttagttcagaacagcaaacaaagatggttttagctgcagagattgacgcattatgcgtccaggagactgcaattattgatcttgggggagcaagaggaacagttgacctgaatgacataagaacacaggttcctgcattacctggaagggatgtgctagatgtggaggcacatattttggagcaaaaaaaaacatcttcaccaggtgatgaaattaagggttcagaacaagcaaaaatcgaatcgattgcagagatcgaaacagtgggcgtcaaggagaatgtcattgctgatcataaggaaacaggtaacaacagtggcgtaagtatacatgcgcctctattagttgaatctggacaaaaggcatcacctggagttgaattgcgtggtattgaggttgatgctcatgttttggaacaagcaaagatggtttcagctctagaaccagactctactccagaagtttgtgctgacaagttagaaccttctggtgctgatgatgttggaatgattgttgtccaggaggctgcttctgttgatgatcacaatagagcacaaggtggtgaggctcattgttcagaacaaataaagatggcttcaattgcacaagcggtgtctagcatggctttagtaggatattcttcttcagaagactcaatggtggatgctgctgcccgagtaactgatgctgattttgtggatagtaaagcagctggtgtttatcgccaagaaactatgcctactcaaaccacctctaccctcccagagaacatggattctcctgcaactgctgctaccatggttgaatcgaagtttgctgcctcgtctgagcacgttgcaggacccgagccaattgatgaaacttctgttatgcaagtggaactggcaacaagcacaggggatggatgtgcagcagatggtcacaatcttgtttcatctgaaactgttgttgaagtgaagcttgctcaagaaattgttgttcctagtccaggtggtagcatagaagctaataatacttctaccatcagcgaagtatacaaagatacccagtctcgtgcatctggtgaagcatgcaatgatggtcagtctcatggtgatgaaaatatgaaacttggtgaagcttacactgaactgcagctggcaccttcctctggtgaggaggccatgacatgtatgtgtagtgagctgcccagccaggaggtggaggctccaagcagtgaccctttggagaataatgaagaaacgaaaaatgaagctgctgctcaaggatcagtaaatgaggattctgctcctcgtgctgaaaatgcaaagattgatgaagctgacacagaacaggaactgcttccatctggtgaggccacggtagacgaatccagcgagctactcagccaagacgaaaaggtggctcgtaaagatgcaaagatggaagagtctgctgctgctgctgctgcacagagacagctaactactgaagttgctcatgcaagtgaaaacgcgaaacttggtgaagatggcacggagctgcaactgccaccaccttcaatggtagacatatctagggagcaactcagccaggaagtggaggttgcaagctctgggccttcaggaactgatgaaactgctgagatgaaacggctaaacactgaacattcacctggtgatgaaacttcaaaacttgttggaactgatctaggactgcaattgtcaccttctggtgatgccatggtagatatatctaataagccacccagctgccaagacgtaaaggaggccccgagcagtgacattttgggaaatgatgaaaattcagacaccgagaagactcctgctgccttgcatggacggctgaacaccgaacttgctcctagtggcagaaatacagaatttagtgaagctgacactggaaaacaagagacacccgtgtctgctgaggctatggtagaatcatcgagcgagcctcgcagccatgaggcaaaggaagctccaacccctgacctgtctggggatgatgaaaaagcgaagtcagcaagggctgctgttgttgcggaactttttggagatgcaacagaaggtggttcggatcagccattgccgtctcctagagaacaaggcaaggaagcagaggccgatggaggcttttagagtaaagttgcaaatattgtatcaagagatactagaatccgtgtaagtaagaactgctaatagtgcttttagttgtaactggtgtaagcttctactcagaatcaaaagcgacgtgctgagattacagcaacagtggcctacggcagtttactactgttttgtgcaatattgctgctgagttttgttgagacaggcaattgatctgtcatctgtctcgtcttgcatcgaagttggcagcaccatggtgaggtgctcccgccttaacctggaagcgctgacagagggaagaacaatactctctggtttcctaatgttttcctgttcactgttttgatttgatgctgcattgcagtagtgtgacttagtaacataatggtgcgtttggatagacggacataccgatccagaatcatctgaacctaaatattgagtacaagcttagattatctgtttggtctgctttatgtctgggtgcaatgctctctgatttctggacggagtggtaccgcaatccaaacagactttaatgtttgggtgcttcaggtcataatcaaccatctaatttactttgcaaatgaatgtttcaaactggactgctcaagcctaccaagtttaatggtccttcctagtattgaatccttttgagtctagcccgtttcctcatttgaattttcactgttagtgtg

SEQ ID NO: 58891 - DNA, 12381 bp, Zea Mays
gagagagtgcatcagcactgcaggggtctactgaggcactccaagtggggaaatggcggaggcgacgaattcgagcttgggcacgtaggcgtcgctcctgccatcgccgcagcggtcactggactctcacgccgccgccgccgccgccggagaccattagttctcctgcgcggcggctccgcggctcccgccctctcccttaccttcttcccgctagggttttctccgatccccaatcactgctggttcacaaatggcttcatctcagcatgttgagatggaggctgcgaaacttctacataaacttatccaggagtcgaaggatgagcctgctaaactagcaacaaaactttacgtgatatgtcagcatatgaaactaagtggaaaggagcaatcactgccatatcaagtcatatcaagggctatggagacagttgtgaaccaacatggaattgatatggatgcattgcgatcatcacgaattccatttgctggtggtcctcaggcaggggattctagtggtgtcatgtcaaaggacaaggaggtcattggtaaccagtctcccatggtcggaagtgatgcttcccaaagtagtggacaagctggattatggcagcttccatcaggttcaaccgatatgataagacatggggcatctatttcaggtagggtacccacagggccaaataggggagatttctcagcagctgatattcatcaaggctccatgtcacaaaaaagcggtagatcctctggcattgaaagccctgcaagtctgcagatggaggacaccagatctatgaattcacatgattctttgaaatccgatgagaaaacaagtaagaaaacctcttccaagagaaaaaggatggattcaaaaggagctggtgatttgcgttcagaagacaactcaaagtcagatgttatctccactggacagaataccaggaaggggaaacaggttggtaaggctggtagacaaggtcagccttccatgggaattgagcatgagcagcaacctcataaactgcaaggtggtactggtcaggtaccacctatacatggtggtgcaccttttctcaggactcgctcagaaggtccttctgggaggacaatggacaagactaaaccatcaaatccattctcaatgggtcaaattccaaattttcctgaagggctggcttctactggtgctccaatcgagttgcagaaaagtatacagggtggagcaagtttatttaatcctggttttggctggaaccaaaatccacaagttcaaaccttgaagaattctcaaggttctattcataatttagtgaggtctggagttactgttgaagggaaagttaatgtaggggcacaaggagcttttaactctgcctctgcaccacagatggaatttcccacagttcctccatacaacccctcttccttcggagctagctcacagtttctggacaaaggcaaggagttggtttccagcattataagcactgaacctcattcatctaaagttgcatctcagcctgggatttctcatggaagtcccatgcaagaaaggcaaggtatgatcagggtgccacagagaggcgaggcatcatttcaggaacgcaggccatcttcacttccgagtagaagtactgggccaagtccaatgtctcacatttcttccaacacaccatttaaagaacagcagctgaagcagctcagagcacagtgcttagtatttcttgcatttaggaataatttgcagcccaggaaggtacatcttgaaattgctttgggcagagggcctcctgcagaaagtgacagtgcaggtcaaaggggcagcgagggcagagtgtctgatgctctgggaaaggaaaatggtagcagtcgggagaactctggtgtcttttgtaggcaaactgatatctctagacttccagccacatctgcaggaagtattgcagaggatgattccttatcgaaggatccagaaaatgctacaaaaaaaatcaagttagctgaacaggagaagtcattgatggaagtagaaaatgtccagcaagcttctgttatgcaaggaactagttctgaaatgcgttcccaagaaactgcatctcaaaatccatatcgaccacaacagtcatattatcaaggagatacaagaagaatcgcctcggatatccataggactgatgctgaaattttgaaccagaatttaagttggggaggccagggatctactgctttgggtggtactagacagcttctgaatcaggaaactaaagaatcacttgcaccttcaaagtcacaccatatgcctgttgatggttacaactccaatatacaaggaatagatcggactccagagatagctggagctggtaatgatgttgaaaattgtagccacgtagcagatattgtgcctgagcaggctgctgatgaaggagatgaggacctctcagagcatgaggatttattgtcatctccaaagcacacaatgacggaaaaatggatcttagattaccagaagagaatttacaatgagaaacaaaagagaacattggagcagcataaggtacacagcagaatgtcagcaacatatgaggagctaaaggagagcgttaattcatccgaagatctttctgcaaagaccaagagcgtcattgaattgaaaaagcttcagcttctgccacttcaacgtcgtgtacgcagtgaatttttgctggattttttcaagcctaatacatccgacttagagcgcataaaatcactgaagaaacataggcatgggcggcgggtgaaacagcttgaaaaaattgaacagaaaatgaaggaagaaaggcaaaagagaattcgtgagagacagaaggaattctttgctgatattgaagcttacagagagaaactcgaggataacttcaaggttaagagagagcgcttgaaggggttcaatcgatacataaaagaatttcacaaaaggaaagaaagaattcatcgggagaaactggataggatccaacgcgagaaaatcaacctgcttaagaacaatgatgttgaaggttatcttagaatggtcaaggatgcaaaatctgatcgtgtcaagcaactattgcgtgaaactgagaaatatcttcagaaacttgggaacaaattacagagtgcaaagtccacagatggccgctcatcttttgttactgataagagtgacactgcaaacgacattgaagatgagagctaccagccacagcattatctggaaagtaatgaaaagtactatcaactggcacacagtgtaaaggaaactgtaaatgatcagccatcttatcttcagggcggcaaattgcgagagtaccaaatgaatggcttgcgttggctggtttcattgtacaataataatttgaatggtattttagcagatgagatgggccttggtaaaacagtacaagtaatctctttgatatgctaccttatggaaacaaaaaatgaccgtgggccttttctcgtggttgtaccatcatctgttcttcctggatgggaatctgaactcagcttctgggcacctagtataaataaaattgcttatgctggtcctcctgaagaaaggcgcaggatgttcaaagagatgattgttcatcagaagttcaatgttcttctgacaacatatgagtacttgatgaacaagcatgataggccaaaactaagcaaaatacaatggcactatataataatcgatgaagggcatcgtattaaaaatgcttcttgtaaacttaatgctgatttgaagctttatcggagctctcatcggatattattgacaggaacacctcttcagaataatctcgaggagctgtgggcacttctaaattttttgttgcccaatatttttaattcgtcagaggacttctctcagtggtttaacaaaccatttgaaagtaatggtgataattcacctgatgaggccttactttcagaggaggagaacttgttgatcataaatcgtcttcaccaggttcttcggccctttgtactcagaagacttaagcataaggtcgaaaatgagcttcctgaaaaaattgaaagacttgtaagatgtgaggcatctgcttatcagaaacttctcatgacaagggtggaagaaaatcttggtggaattggagccgttaaggttcgctccgttcacaactctgtcatggaattgaggaacatatgcaaccatccatacttgagccagcttcatgttgaagagattgagggctacctacctaaacattacctaccatctattttgaggctctgcggaaaacttgagatgttggacagattgctgcctaaactcaaagctacgggccatagggttctacttttttctacaatgacaagattgcttgatgtaatggaggattacttggtttggaaaaagtataaatatcttcgattggatgggcacacttctggccatgaaagaggagctcttatcgataaatttaacgatcctaattctcaagcattcatttttcttcttagtatacgagctggaggtgttggggtcaatctccaagctgccgatacagttatcatatttgatactgattggaatcctcaggttgatctgcaagcacaggctagggcccacaggattggtcaaaagaaggaggttcttgttttacgtttagaaacggtccgaactgttgaagagcaagtcagggcttcagcagaacacaaattaggtgttgctaatcagagtataactgctggtttttttgacaataacacaagtgctgaagatcgaagagagtatcttgaatcactcctacgtgagtctaaaaaggaagaagcagctccagtgttagatgatgatgctctgaatgacattctagctcggagcgaagctgagattgacatattcgaatctattgacaagcaaaggagagaagaagaaatggcagcttggcaaaaggtggttcaggatggttcaactagtgggctagaccctggagtattgccttctcgtcttgtaactgatgatgatctgaagcccttctgccatgctatgaaactttatgagccatcaaatgtgaaaacagtaaatgtgaatgtgaggaagaagggtgaacttgggggccttgatacacagcactatggaaggggtaaacgagcccgtgaggttcgctcttatgaagaccaatggactgaagaagaatttgaaaaactttgtcaagctgattctcctgaatcatcccaacctggtggcatgtcgaaggatttggatattcttaataaaggcattaagactgaaattcttgtggagagttcaaaagaaccagaacaaacgaagatggaggcatccccaactgtcggtgactctccaccagccaaacggcggagaggtagacctaaaaggtcagatgtttttgtatctcctactgctggtctgactgatgctgtcaaacaagacacaggaaccacacaggacggtagttctgctacaccagcaagtaccatccactctgatgcaccagctactgcaatcaattcagctgtttcagatgttaatatacattctattccaccagctgataccaagaaacaagagttcagtactgataccaaggtttccagttctgtttctgttttggaaggatctgtgccgaatgaaattggtacaccattacagagtgttcataatgtagcagtttctgcaccaccgcatcaatcagctaggggcaggaaatgccaagcaggagaaacacctcgtaggcgaggccgaaaaccaaaatctctatcttcatctggtgtagatgatgttagtcttaacccaaccttttcaactgttagtggtgtagcagacactagttatgttccttcatattctcaggtctcatcacaaggcactgctgtggcactggcaggaatccagaaggattttgtgacagttaagttggatacattgttaccagatagtggtaagggtgctcctcctgttaatgagggagataaaggtgctactgttacaacacctgtggcaaaagatatatgtgctgggactgtgacaacatcagacaacactgtcaccctgacaccaaatactcttaaggaaaacattggattagttcaagtggcatctgcaccttctatgctcgtggcttctgaagaactaatgaaaatagcacatgttgcggtggccgataagcctgttgagaagcaaactgcttcacgtcgccgcagaaagaaaacatctagtagcgaggatactggagtcagcactagacaaagatcagctatgaaaagatcttactacaacacctctgttgccgttgatgatattggttctgctgtgatcccaaatgaaaaatcaggaataacgaaggaaagagatgtcagttcaattcaaagtacatccaatgaactaccaaatattaactcaccattgtatgagaagtctggatatgattctcaaccaagcacacctatagctgtccccatcaatgaagacactcttcctagtggttttgacacctgtactaattctatgataactcttgccacatctgccaactctgctgaagatgataaaccagttgatttgcaccttaatgcacctgtttctgttgattcccaaaaccaagaacaacacatgacagggaaggaccatttggcagtgtgttctagaatctttgctactcagttacagacggacactgcaaatcctgctattgatcataaaccaggaactgcccagtttgaaccatctgcttccttgccccagaattcaggcaaggatgctactgcactaccttctgaggttgacagtgctgctccaaatagggcatcaagcaggaggaggaaagggtcaactcgagaaccacgcaccagaagtaattctgcatcagctgcaagtgaacgtcgtgcccgacttactggattgaagcaggcagaggacataaagaagttagagatgtcagcaacgccgaccacaacagtgtgtatttcatcggtagagcaacagggagctgcttctttaagtgcgaagattaccaatgcttctgtttctgaaggacagaagaatcctggaaattatatgccttctgccatttcaattcccgtggggagccatgttctgggcctgggcgcaacaagtattgaagaaacaactgccactatgataactcaggctcctgcagtttcaaaatcagaacgaagaaaacttccaggaggcagtcaacaaggtattcagtttgagagttcagcatcaaaaacaaagatggtatcagctgtggaaccagcacctgcaaatgttgaatgcatgcaaggtactgaagttaatagttcagaacagacaatagtttctgctactgaaccagcacctgcaaatgatgaacacatgcaagagcaaccaacaaatatcgtttcatctgtggaatcagaaccttcaaatgatgaagagcacacaaagcatgaagtgtttcttgcgactactggtgataatatgcttgcttctagtgcaggaactgaaatattgcgggatacagttgagcatgctgcttgccagccagaagcagtatgcacagatggaactgcaaggcagtctgaattgtcgcaacttgatagaaaagcctttcatgatgcctcatataaatacactcatgggtccactaaagatgatggtatcttgcccagtgaaggtacttctgttgatgttactggttctaagcaggatgatgtgaacattgttggcacacaaactgatgatgtttctcggggttctagtcattttccagttattttacaatcaactgagtcagatcggcctccaggtcaagtgaagaatttggagagtaggatggagcaggtgaaaacagaagaagctttggttaacagttctggtggcaatcaaactcacagtctgggcgatgaaccttctcataatacatcattagcaagaaattctccctcagaacactcgaatgagcgttgctctgatcaagtaattggtgaaaatttcaaaagtaaagaaaatattgttgaagtccattctggcattaatactgatggccccgatgaagctctgaatgcattgcacacccaatctaaggaggccagcatgacagatattggtgtacctactgatggtgatagatgtgaaggtaaagggactagtgtcgaggtctgtgctgacatgaatactgatgggcctgtggctacccaggatgcttcgtccacgaaatctgataaagagtcctgcatgatggaatgtggtgtgtctaccgatggctgtcccacagtttgcaaaacacacaatgatctccagggtcatgtatcttgtgaagaaacctttgttaggactggtggtgatgacacaacccatatcaccaatgcaaattatggttctaataatgaaagtgaggccaccattgctagtcctgttgaaaccacacaaaaactgatggaagggagcactgttattgtgtcggagaattctgatttaaataagcaatgccacacattgcatactagaaatgatcctcctgcaaataccctgttgatagttgagtctaacaaagttacttgtgatgctgaaattgtttgtgctagcaggttagaatcttctggcattgaggctgaaacagtgggtatccaagagtcagctcttactgattttgagggaacaaaaggaactggggatttgggtgacagaactaacagtcaactgcatgatgatgttcatgggacatcatgttccacgatagctcttgtatctgagaaagaaccttccgaagatcttaccaccggtagccattcagaagcatctaatttacttgctgctgtagaacaaactcaagaaactactgttgagaaccaagagatcatagatgcagtagtgtttatggatgcctgcaaggcagaacctgttggtgattttactattgctaaaggagctgaacagactgtagaaatggttcattatgttgataagcaatctgctgtattagactatgttgagacacagacaaaacgaacttcggtttgtggttctacgctaaatgaatcccctcaggctgcagggttggaagaagactgctctgtactgaagcatggtgatcctacttcatctgagcttcttactgtagcacctaatccaatcggtgaaacttctgttattcaagtggaaccagaggcaagaaactcagatggatactgcacaacagaggctggcagtgctttatctgaaactgtcatgggattggagccaaataaagaaactgcggttccaatgcaagagaatattggagaagctaatgataattttaataattgcgaagcacacaataattcggagattcatgcatttgaagtgtcgatggaaacgcagtcatcagaagtcaaggaagtatcttctattcagtctggtgcagcaaatttgagcacacagacaactgcactgcctgatgtaacaggacaaaccagtatggcatcgactggagaactagtatctacaaatgaacacatacacatgcaaggcactgaaatcaattcagagcaacaaacaaagatggtttcacctgctgaatcagcacctgctaatgatgaacacgtgcaagacattgtgattcttagttcagaacagcaaacaaagatggttttagctgcagagattgacgcattatgcgtccaggagactgcaattattgatcttgggggagcaagaggaacagttgacctgaatgacataagaacacaggttcctgcattacctggaagggatgtgctaggtgatgaaattaagggttcagaacaagcaaaaatcgaatcgattgcagagatcgaaacagtgggcgtcaaggagaatgtcattgctgatcataaggaaacaggtaacaacagtggcgtaagtatacatgcgcctctattagttgaatctggacaaaaggcatcacctggagttgaattgcgtggtattgaggttgatgctcatgttttggaacaagcaaagatggtttcagctctagaaccagactctactccagaagtttgtgctgacaagttagaaccttctggtgctgatgatgttggaatgattgttgtccaggaggctgcttctgttgatgatcacaatagagcacaaggtggtgaggctcattgttcagaacaaataaagatggcttcaattgcacaagcggtgtctagcatggctttagtaggatattcttcttcagaagactcaatggtggatgctgctgcccgagtaactgatgctgattttgtggatagtaaagcagctggtgtttatcgccaagaaactatgcctactcaaaccacctctaccctcccagagaacatggattctcctgcaactgctgctaccatggttgaatcgaagtttgctgcctcgtctgagcacgttgcaggacccgagccaattgatgaaacttctgttatgcaagtggaactggcaacaagcacaggggatggatgtgcagcagatggtcacaatcttgtttcatctgaaactgttgttgaagtgaagcttgctcaagaaattgttgttcctagtccaggtggtagcatagaagctaataatacttctaccatcagcgaagtatacaaagatacccagtctcgtgcatctggtgaagcatgcaatgatggtcagtctcatggtgatgaaaatatgaaacttggtgaagcttacactgaactgcagctggcaccttcctctggtgaggaggccatgacatgtatgtgtagtgagctgcccagccaggaggtggaggctccaagcagtgaccctttggagaataatgaagaaacgaaaaatgaagctgctgctcaaggatcagtaaatgaggattctgctcctcgtgctgaaaatgcaaagattgatgaagctgacacagaacaggaactgcttccatctggtgaggccacggtagacgaatccagcgagctactcagccaagacgaaaaggtggctcgtaaagatgcaaagatggaagagtctgctgctgctgctgctgcacagagacagctaactactgaagttgctcatgcaagtgaaaacgcgaaacttggtgaagatggcacggagctgcaactgccaccaccttcaatggtagacatatctagggagcaactcagccaggaagtggaggttgcaagctctgggccttcaggaactgatgaaactgctgagatgaaacggctaaacactgaacattcacctggtgatgaaacttcaaaacttgttggaactgatctaggactgcaattgtcaccttctggtgatgccatggtagatatatctaataagccacccagctgccaagacgtaaaggaggccccgagcagtgacattttgggaaatgatgaaaattcagacaccgagaagactcctgctgccttgcatggacggctgaacaccgaacttgctcctagtggcagaaatacagaatttagtgaagctgacactggaaaacaagagacacccgtgtctgctgaggctatggtagaatcatcgagcgagcctcgcagccatgaggcaaaggaagctccaacccctgacctgtctggggatgatgaaaaagcgaagtcagcaagggctgctgttgttgcggaactttttggagatgcaacagaaggtggttcggatcagccattgccgtctcctagagaacaaggcaaggaagcagaggccgatggaggcttttagagtaaagttgcaaatattgtatcaagagatactagaatccgtgtaagtaagaactgctaatagtgcttttagttgtaactggtgtaagcttctactcagaatcaaaagcgacgtgctgagattacagcaacagtggcctacggcagtttactactgttttgtgcaatattgctgctgagttttgttgagacaggcaattgatctgtcatctgtctcgtcttgcatcgaagttggcagcaccatggtgaggtgctcccgccttaacctggaagcgctgacagagggaagaacaatactctctggtttcctaatgttttcctgttcactgttttgatttgatgctgcattgcagtagtgtgacttagtaacataatggtgcgtttggatagacggacataccgatccagaatcatctgaacctaaatattgagtacaagcttagattatctgtttggtctgctttatgtctgggtgcaatgctctctgatttctggacggagtggtaccgcaatccaaacagactttaatgtttgggtgcttcaggtcataatcaaccatctaatttactttgcaaatgaatgtttcaaactggactgctcaagcctaccaagtttaatggtccttcctagtattgaatccttttgagtctagcccgtttcctcatttgaattttcactgttagtgtg

SEQ ID NO: 58892 - DNA, 12272 bp, Zea Mays
gagagagtgcatcagcactgcaggggtctactgaggcactccaagtggggaaatggcggaggcgacgaattcgagcttgggcacgtaggcgtcgctcctgccatcgccgcagcggtcactggactctcacgccgccgccgccgccgccggagaccattagttctcctgcgcggcggctccgcggctcccgccctctcccttaccttcttcccgctagggttttctccgatccccaatcactgctggttcacaaatggcttcatctcagcatgttgagatggaggctgcgaaacttctacataaacttatccaggagtcgaaggatgagcctgctaaactagcaacaaaactttacgtgatatgtcagcatatgaaactaagtggaaaggagcaatcactgccatatcaagtcatatcaagggctatggagacagttgtgaaccaacatggaattgatatggatgcattgcgatcatcacgaattccatttgctggtggtcctcaggcaggggattctagtggtgtcatgtcaaaggacaaggaggtcattggtaaccagtctcccatggtcggaagtgatgcttcccaaagtagtggacaagctggattatggcagcttccatcaggttcaaccgatatgataagacatggggcatctatttcaggtagggtacccacagggccaaataggggagatttctcagcagctgatattcatcaaggctccatgtcacaaaaaagcggtagatcctctggcattgaaagccctgcaagtctgcagatggaggacaccagatctatgaattcacatgattctttgaaatccgatgagaaaacaagtaagaaaacctcttccaagagaaaaaggatggattcaaaaggagctggtgatttgcgttcagaagacaactcaaagtcagatgttatctccactggacagaataccaggaaggggaaacaggttggtaaggctggtagacaaggtcagccttccatgggaattgagcatgagcagcaacctcataaactgcaaggtggtactggtcaggtaccacctatacatggtggtgcaccttttctcaggactcgctcagaaggtccttctgggaggacaatggacaagactaaaccatcaaatccattctcaatgggtcaaattccaaattttcctgaagggctggcttctactggtgctccaatcgagttgcagaaaagtatacagggtggagcaagtttatttaatcctggttttggctggaaccaaaatccacaagttcaaaccttgaagaattctcaaggttctattcataatttagtgaggtctggagttactgttgaagggaaagttaatgtaggggcacaaggagcttttaactctgcctctgcaccacagatggaatttcccacagttcctccatacaacccctcttccttcggagctagctcacagtttctggacaaaggcaaggagttggtttccagcattataagcactgaacctcattcatctaaagttgcatctcagcctgggatttctcatggaagtcccatgcaagaaaggcaaggtatgatcagggtgccacagagaggcgaggcatcatttcaggaacgcaggccatcttcacttccgagtagaagtactgggccaagtccaatgtctcacatttcttccaacacaccatttaaagaacagcagctgaagcagctcagagcacagtgcttagtatttcttgcatttaggaataatttgcagcccaggaaggtacatcttgaaattgctttgggcagagggcctcctgcagaaagtgacagtgcaggtcaaaggggcagcgagggcagagtgtctgatgctctgggaaaggaaaatggtagcagtcgggagaactctggtgtcttttgtaggcaaactgatatctctagacttccagccacatctgcaggaagtattgcagaggatgattccttatcgaaggatccagaaaatgctacaaaaaaaatcaagttagctgaacaggagaagtcattgatggaagtagaaaatgtccagcaagcttctgttatgcaaggaactagttctgaaatgcgttcccaagaaactgcatctcaaaatccatatcgaccacaacagtcatattatcaaggagatacaagaagaatcgcctcggatatccataggactgatgctgaaattttgaaccagaatttaagttggggaggccagggatctactgctttgggtggtactagacagcttctgaatcaggaaactaaagaatcacttgcaccttcaaagtcacaccatatgcctgttgatggttacaactccaatatacaaggaatagatcggactccagagatagctggagctggtaatgatgttgaaaattgtagccacgtagcagatattgtgcctgagcaggctgctgatgaaggagatgaggacctctcagagcatgaggatttattgtcatctccaaagcacacaatgacggaaaaatggatcttagattaccagaagagaatttacaatgagaaacaaaagagaacattggagcagcataaggtacacagcagaatgtcagcaacatatgaggagctaaaggagagcgttaattcatccgaagatctttctgcaaagaccaagagcgtcattgaattgaaaaagcttcagcttctgccacttcaacgtcgtgtacgcagtgaatttttgctggattttttcaagcctaatacatccgacttagagcgcataaaatcactgaagaaacataggcatgggcggcgggtgaaacagcttgaaaaaattgaacagaaaatgaaggaagaaaggcaaaagagaattcgtgagagacagaaggaattctttgctgatattgaagcttacagagagaaactcgaggataacttcaaggttaagagagagcgcttgaaggggttcaatcgatacataaaagaatttcacaaaaggaaagaaagaattcatcgggagaaactggataggatccaacgcgagaaaatcaacctgcttaagaacaatgatgttgaaggttatcttagaatggtcaaggatgcaaaatctgatcgtgtcaagcaactattgcgtgaaactgagaaatatcttcagaaacttgggaacaaattacagagtgcaaagtccacagatggccgctcatcttttgttactgataagagtgacactgcaaacgacattgaagatgagagctaccagccacagcattatctggaaagtaatgaaaagtactatcaactggcacacagtgtaaaggaaactgtaaatgatcagccatcttatcttcagggcggcaaattgcgagagtaccaaatgaatggcttgcgttggctggtttcattgtacaataataatttgaatggtattttagcagatgagatgggccttggtaaaacagtacaagtaatctctttgatatgctaccttatggaaacaaaaaatgaccgtgggccttttctcgtggttgtaccatcatctgttcttcctggatgggaatctgaactcagcttctgggcacctagtataaataaaattgcttatgctggtcctcctgaagaaaggcgcaggatgttcaaagagatgattgttcatcagaagttcaatgttcttctgacaacatatgagtacttgatgaacaagcatgataggccaaaactaagcaaaatacaatggcactatataataatcgatgaagggcatcgtattaaaaatgcttcttgtaaacttaatgctgatttgaagctttatcggagctctcatcggatattattgacaggaacacctcttcagaataatctcgaggagctgtgggcacttctaaattttttgttgcccaatatttttaattcgtcagaggacttctctcagtggtttaacaaaccatttgaaagtaatggtgataattcacctgatgaggccttactttcagaggaggagaacttgttgatcataaatcgtcttcaccaggttcttcggccctttgtactcagaagacttaagcataaggtcgaaaatgagcttcctgaaaaaattgaaagacttgtaagatgtgaggcatctgcttatcagaaacttctcatgacaagggtggaagaaaatcttggtggaattggagccgttaaggttcgctccgttcacaactctgtcatggaattgaggaacatatgcaaccatccatacttgagccagcttcatgttgaagagattgagggctacctacctaaacattacctaccatctattttgaggctctgcggaaaacttgagatgttggacagattgctgcctaaactcaaagctacgggccatagggttctacttttttctacaatgacaagattgcttgatgtaatggaggattacttggtttggaaaaagtataaatatcttcgattggatgggcacacttctggccatgaaagaggagctcttatcgataaatttaacgatcctaattctcaagcattcatttttcttcttagtatacgagctggaggtgttggggtcaatctccaagctgccgatacagttatcatatttgatactgattggaatcctcaggttgatctgcaagcacaggctagggcccacaggattggtcaaaagaaggaggttcttgttttacgtttagaaacggtccgaactgttgaagagcaagtcagggcttcagcagaacacaaattaggtgttgctaatcagagtataactgctggtttttttgacaataacacaagtgctgaagatcgaagagagtatcttgaatcactcctacgtgagtctaaaaaggaagaagcagctccagtgttagatgatgatgctctgaatgacattctagctcggagcgaagctgagattgacatattcgaatctattgacaagcaaaggagagaagaagaaatggcagcttggcaaaaggtggttcaggatggttcaactagtgggctagaccctggagtattgccttctcgtcttgtaactgatgatgatctgaagcccttctgccatgctatgaaactttatgagccatcaaatgtgaaaacagtaaatgtgaatgtgaggaagaagggtgaacttgggggccttgatacacagcactatggaaggggtaaacgagcccgtgaggttcgctcttatgaagaccaatggactgaagaagaatttgaaaaactttgtcaagctgattctcctgaatcatcccaacctggtggcatgtcgaaggatttggatattcttaataaaggcattaagactgaaattcttgtggagagttcaaaagaaccagaacaaacgaagatggaggcatccccaactgtcggtgactctccaccagccaaacggcggagaggtagacctaaaaggtcagatgtttttgtatctcctactgctggtctgactgatgctgtcaaacaagacacaggaaccacacaggacggtagttctgctacaccagcaagtaccatccactctgatgcaccagctactgcaatcaattcagctgtttcagatgttaatatacattctattccaccagctgataccaagaaacaagagttcagtactgataccaaggtttccagttctgtttctgttttggaaggatctgtgccgaatgaaattggtacaccattacagagtgttcataatgtagcagtttctgcaccaccgcatcaatcagctaggggcaggaaatgccaagcaggagaaacacctcgtaggcgaggccgaaaaccaaaatctctatcttcatctggtgtagatgatgttagtcttaacccaaccttttcaactgttagtggtgtagcagacactagttatgttccttcatattctcaggtctcatcacaaggcactgctgtggcactggcaggaatccagaaggattttgtgacagttaagttggatacattgttaccagatagtggtaagggtgctcctcctgttaatgagggagataaaggtgctactgttacaacacctgtggcaaaagatatatgtgctgggactgtgacaacatcagacaacactgtcaccctgacaccaaatactcttaaggaaaacattggattagttcaagtggcatctgcaccttctatgctcgtggcttctgaagaactaatgaaaatagcacatgttgcggtggccgataagcctgttgagaagcaaactgcttcacgtcgccgcagaaagaaaacatctagtagcgaggatactggagtcagcactagacaaagatcagctatgaaaagatcttactacaacacctctgttgccgttgatgatattggttctgctgtgatcccaaatgaaaaatcaggaataacgaaggaaagagatgtcagttcaattcaaagtacatccaatgaactaccaaatattaactcaccattgtatgagaagtctggatatgattctcaaccaagcacacctatagctgtccccatcaatgaagacactcttcctagtggttttgacacctgtactaattctatgataactcttgccacatctgccaactctgctgaagatgataaaccagttgatttgcaccttaatgcacctgtttctgttgattcccaaaaccaagaacaacacatgacagggaaggaccatttggcagtgtgttctagaatctttgctactcagttacagacggacactgcaaatcctgctattgatcataaaccaggaactgcccagtttgaaccatctgcttccttgccccagaattcaggcaaggatgctactgcactaccttctgaggttgacagtgctgctccaaatagggcatcaagcaggaggaggaaagggtcaactcgagaaccacgcaccagaagtaattctgcatcagctgcaagtgaacgtcgtgcccgacttactggattgaagcaggcagaggacataaagaagttagagatgtcagcaacgccgaccacaacagtgtgtatttcatcggtagagcaacagggagctgcttctttaagtgcgaagattaccaatgcttctgtttctgaaggacagaagaatcctggaaattatatgccttctgccatttcaattcccgtggggagccatgttctgggcctgggcgcaacaagtattgaagaaacaactgccactatgataactcaggctcctgcagtttcaaaatcagaacgaagaaaacttccaggaggcagtcaacaaggtattcagtttgagagttcagcatcaaaaacaaagatggtatcagctgtggaaccagcacctgcaaatgttgaatgcatgcaaggtactgaagttaatagttcagaacagacaatagtttctgctactgaaccagcacctgcaaatgatgaacacatgcaagagcaaccaacaaatatcgtttcatctgtggaatcagaaccttcaaatgatgaagagcacacaaagcatgaagtgtttcttgcgactactggtgataatatgcttgcttctagtgcaggaactgaaatattgcgggatacagttgagcatgctgcttgccagccagaagcagtatgcacagatggaactgcaaggcagtctgaattgtcgcaacttgatagaaaagcctttcatgatgcctcatataaatacactcatgggtccactaaagatgatggtatcttgcccagtgaagtcattttccagttattttacaatcaactgagtcagatcggcctccaggtcaagtgaagaatttggagagtaggatggagcaggtgaaaacagaagaagctttggttaacagttctggtggcaatcaaactcacagtctgggcgatgaaccttctcataatacatcattagcaagaaattctccctcagaacactcgaatgagcgttgctctgatcaagtaattggtgaaaatttcaaaagtaaagaaaatattgttgaagtccattctggcattaatactgatggccccgatgaagctctgaatgcattgcacacccaatctaaggaggccagcatgacagatattggtgtacctactgatggtgatagatgtgaaggtaaagggactagtgtcgaggtctgtgctgacatgaatactgatgggcctgtggctacccaggatgcttcgtccacgaaatctgataaagagtcctgcatgatggaatgtggtgtgtctaccgatggctgtcccacagtttgcaaaacacacaatgatctccagggtcatgtatcttgtgaagaaacctttgttaggactggtggtgatgacacaacccatatcaccaatgcaaattatggttctaataatgaaagtgaggccaccattgctagtcctgttgaaaccacacaaaaactgatggaagggagcactgttattgtgtcggagaattctgatttaaataagcaatgccacacattgcatactagaaatgatcctcctgcaaataccctgttgatagttgagtctaacaaagttacttgtgatgctgaaattgtttgtgctagcaggttagaatcttctggcattgaggctgaaacagtgggtatccaagagtcagctcttactgattttgagggaacaaaaggaactggggatttgggtgacagaactaacagtcaactgcatgatgatgttcatgggacatcatgttccacgatagctcttgtatctgagaaagaaccttccgaagatcttaccaccggtagccattcagaagcatctaatttacttgctgctgtagaacaaactcaagaaactactgttgagaaccaagagatcatagatgcagtagtgtttatggatgcctgcaaggcagaacctgttggtgattttactattgctaaaggagctgaacagactgtagaaatggttcattatgttgataagcaatctgctgtattagactatgttgagacacagacaaaacgaacttcggtttgtggttctacgctaaatgaatcccctcaggctgcagggttggaagaagactgctctgtactgaagcatggtgatcctacttcatctgagcttcttactgtagcacctaatccaatcggtgaaacttctgttattcaagtggaaccagaggcaagaaactcagatggatactgcacaacagaggctggcagtgctttatctgaaactgtcatgggattggagccaaataaagaaactgcggttccaatgcaagagaatattggagaagctaatgataattttaataattgcgaagcacacaataattcggagattcatgcatttgaagtgtcgatggaaacgcagtcatcagaagtcaaggaagtatcttctattcagtctggtgcagcaaatttgagcacacagacaactgcactgcctgatgtaacaggacaaaccagtatggcatcgactggagaactagtatctacaaatgaacacatacacatgcaaggcactgaaatcaattcagagcaacaaacaaagatggtttcacctgctgaatcagcacctgctaatgatgaacacgtgcaagacattgtgattcttagttcagaacagcaaacaaagatggttttagctgcagagattgacgcattatgcgtccaggagactgcaattattgatcttgggggagcaagaggaacagttgacctgaatgacataagaacacaggttcctgcattacctggaagggatgtgctagatgtggaggcacatattttggagcaaaaaaaaacatcttcaccaggtgatgaaattaagggttcagaacaagcaaaaatcgaatcgattgcagagatcgaaacagtgggcgtcaaggagaatgtcattgctgatcataaggaaacaggtaacaacagtggcgtaagtatacatgcgcctctattagttgaatctggacaaaaggcatcacctggagttgaattgcgtggtattgaggttgatgctcatgttttggaacaagcaaagatggtttcagctctagaaccagactctactccagaagtttgtgctgacaagttagaaccttctggtggtgaggctcattgttcagaacaaataaagatggcttcaattgcacaagcggtgtctagcatggctttagtaggatattcttcttcagaagactcaatggtggatgctgctgcccgagtaactgatgctgattttgtggatagtaaagcagctggtgtttatcgccaagaaactatgcctactcaaaccacctctaccctcccagagaacatggattctcctgcaactgctgctaccatggttgaatcgaagtttgctgcctcgtctgagcacgttgcaggacccgagccaattgatgaaacttctgttatgcaagtggaactggcaacaagcacaggggatggatgtgcagcagatggtcacaatcttgtttcatctgaaactgttgttgaagtgaagcttgctcaagaaattgttgttcctagtccaggtggtagcatagaagctaataatacttctaccatcagcgaagtatacaaagatacccagtctcgtgcatctggtgaagcatgcaatgatggtcagtctcatggtgatgaaaatatgaaacttggtgaagcttacactgaactgcagctggcaccttcctctggtgaggaggccatgacatgtatgtgtagtgagctgcccagccaggaggtggaggctccaagcagtgaccctttggagaataatgaagaaacgaaaaatgaagctgctgctcaaggatcagtaaatgaggattctgctcctcgtgctgaaaatgcaaagattgatgaagctgacacagaacaggaactgcttccatctggtgaggccacggtagacgaatccagcgagctactcagccaagacgaaaaggtggctcgtaaagatgcaaagatggaagagtctgctgctgctgctgctgcacagagacagctaactactgaagttgctcatgcaagtgaaaacgcgaaacttggtgaagatggcacggagctgcaactgccaccaccttcaatggtagacatatctagggagcaactcagccaggaagtggaggttgcaagctctgggccttcaggaactgatgaaactgctgagatgaaacggctaaacactgaacattcacctggtgatgaaacttcaaaacttgttggaactgatctaggactgcaattgtcaccttctggtgatgccatggtagatatatctaataagccacccagctgccaagacgtaaaggaggccccgagcagtgacattttgggaaatgatgaaaattcagacaccgagaagactcctgctgccttgcatggacggctgaacaccgaacttgctcctagtggcagaaatacagaatttagtgaagctgacactggaaaacaagagacacccgtgtctgctgaggctatggtagaatcatcgagcgagcctcgcagccatgaggcaaaggaagctccaacccctgacctgtctggggatgatgaaaaagcgaagtcagcaagggctgctgttgttgcggaactttttggagatgcaacagaaggtggttcggatcagccattgccgtctcctagagaacaaggcaaggaagcagaggccgatggaggcttttagagtaaagttgcaaatattgtatcaagagatactagaatccgtgtaagtaagaactgctaatagtgcttttagttgtaactggtgtaagcttctactcagaatcaaaagcgacgtgctgagattacagcaacagtggcctacggcagtttactactgttttgtgcaatattgctgctgagttttgttgagacaggcaattgatctgtcatctgtctcgtcttgcatcgaagttggcagcaccatggtgaggtgctcccgccttaacctggaagcgctgacagagggaagaacaatactctctggtttcctaatgttttcctgttcactgttttgatttgatgctgcattgcagtagtgtgacttagtaacataatggtgcgtttggatagacggacataccgatccagaatcatctgaacctaaatattgagtacaagcttagattatctgtttggtctgctttatgtctgggtgcaatgctctctgatttctggacggagtggtaccgcaatccaaacagactttaatgtttgggtgcttcaggtcataatcaaccatctaatttactttgcaaatgaatgtttcaaactggactgctcaagcctaccaagtttaatggtccttcctagtattgaatccttttgagtctagcccgtttcctcatttgaattttcactgttagtgtg

SEQ ID NO: 58893 - DNA, 12423 bp, Zea Mays
gagagagtgcatcagcactgcaggggtctactgaggcactccaagtggggaaatggcggaggcgacgaattcgagcttgggcacgtaggcgtcgctcctgccatcgccgcagcggtcactggactctcacgccgccgccgccgccgccggagaccattagttctcctgcgcggcggctccgcggctcccgccctctcccttaccttcttcccgctagggttttctccgatccccaatcactgctggttcacaaatggcttcatctcagcatgttgagatggaggctgcgaaacttctacataaacttatccaggagtcgaaggatgagcctgctaaactagcaacaaaactttacgtgatatgtcagcatatgaaactaagtggaaaggagcaatcactgccatatcaagtcatatcaagggctatggagacagttgtgaaccaacatggaattgatatggatgcattgcgatcatcacgaattccatttgctggtggtcctcaggcaggggattctagtggtgtcatgtcaaaggacaaggaggtcattggtaaccagtctcccatggtcggaagtgatgcttcccaaagtagtggacaagctggattatggcagcttccatcaggttcaaccgatatgataagacatggggcatctatttcaggtagggtacccacagggccaaataggggagatttctcagcagctgatattcatcaaggctccatgtcacaaaaaagcggtagatcctctggcattgaaagccctgcaagtctgcagatggaggacaccagatctatgaattcacatgattctttgaaatccgatgagaaaacaagtaagaaaacctcttccaagagaaaaaggatggattcaaaaggagctggtgatttgcgttcagaagacaactcaaagtcagatgttatctccactggacagaataccaggaaggggaaacaggttggtaaggctggtagacaaggtcagccttccatgggaattgagcatgagcagcaacctcataaactgcaaggtggtactggtcaggtaccacctatacatggtggtgcaccttttctcaggactcgctcagaaggtccttctgggaggacaatggacaagactaaaccatcaaatccattctcaatgggtcaaattccaaattttcctgaagggctggcttctactggtgctccaatcgagttgcagaaaagtatacagggtggagcaagtttatttaatcctggttttggctggaaccaaaatccacaagttcaaaccttgaagaattctcaaggttctattcataatttagtgaggtctggagttactgttgaagggaaagttaatgtaggggcacaaggagcttttaactctgcctctgcaccacagatggaatttcccacagttcctccatacaacccctcttccttcggagctagctcacagtttctggacaaaggcaaggagttggtttccagcattataagcactgaacctcattcatctaaagttgcatctcagcctgggatttctcatggaagtcccatgcaagaaaggcaaggtatgatcagggtgccacagagaggcgaggcatcatttcaggaacgcaggccatcttcacttccgagtagaagtactgggccaagtccaatgtctcacatttcttccaacacaccatttaaagaacagcagctgaagcagctcagagcacagtgcttagtatttcttgcatttaggaataatttgcagcccaggaaggtacatcttgaaattgctttgggcagagggcctcctgcagaaagtgacagtgcaggtcaaaggggcagcgagggcagagtgtctgatgctctgggaaaggaaaatggtagcagtcgggagaactctggtgtcttttgtaggcaaactgatatctctagacttccagccacatctgcaggaagtattgcagaggatgattccttatcgaaggatccagaaaatgctacaaaaaaaatcaagttagctgaacaggagaagtcattgatggaagtagaaaatgtccagcaagcttctgttatgcaaggaactagttctgaaatgcgttcccaagaaactgcatctcaaaatccatatcgaccacaacagtcatattatcaaggagatacaagaagaatcgcctcggatatccataggactgatgctgaaattttgaaccagaatttaagttggggaggccagggatctactgctttgggtggtactagacagcttctgaatcaggaaactaaagaatcacttgcaccttcaaagtcacaccatatgcctgttgatggttacaactccaatatacaaggaatagatcggactccagagatagctggagctggtaatgatgttgaaaattgtagccacgtagcagatattgtgcctgagcaggctgctgatgaaggagatgaggacctctcagagcatgaggatttattgtcatctccaaagcacacaatgacggaaaaatggatcttagattaccagaagagaatttacaatgagaaacaaaagagaacattggagcagcataaggtacacagcagaatgtcagcaacatatgaggagctaaaggagagcgttaattcatccgaagatctttctgcaaagaccaagagcgtcattgaattgaaaaagcttcagcttctgccacttcaacgtcgtgtacgcagtgaatttttgctggattttttcaagcctaatacatccgacttagagcgcataaaatcactgaagaaacataggcatgggcggcgggtgaaacagcttgaaaaaattgaacagaaaatgaaggaagaaaggcaaaagagaattcgtgagagacagaaggaattctttgctgatattgaagcttacagagagaaactcgaggataacttcaaggttaagagagagcgcttgaaggggttcaatcgatacataaaagaatttcacaaaaggaaagaaagaattcatcgggagaaactggataggatccaacgcgagaaaatcaacctgcttaagaacaatgatgttgaaggttatcttagaatggtcaaggatgcaaaatctgatcgtgtcaagcaactattgcgtgaaactgagaaatatcttcagaaacttgggaacaaattacagagtgcaaagtccacagatggccgctcatcttttgttactgataagagtgacactgcaaacgacattgaagatgagagctaccagccacagcattatctggaaagtaatgaaaagtactatcaactggcacacagtgtaaaggaaactgtaaatgatcagccatcttatcttcagggcggcaaattgcgagagtaccaaatgaatggcttgcgttggctggtttcattgtacaataataatttgaatggtattttagcagatgagatgggccttggtaaaacagtacaagtaatctctttgatatgctaccttatggaaacaaaaaatgaccgtgggccttttctcgtggttgtaccatcatctgttcttcctggatgggaatctgaactcagcttctgggcacctagtataaataaaattgcttatgctggtcctcctgaagaaaggcgcaggatgttcaaagagatgattgttcatcagaagttcaatgttcttctgacaacatatgagtacttgatgaacaagcatgataggccaaaactaagcaaaatacaatggcactatataataatcgatgaagggcatcgtattaaaaatgcttcttgtaaacttaatgctgatttgaagctttatcggagctctcatcggatattattgacaggaacacctcttcagaataatctcgaggagctgtgggcacttctaaattttttgttgcccaatatttttaattcgtcagaggacttctctcagtggtttaacaaaccatttgaaagtaatggtgataattcacctgatgaggccttactttcagaggaggagaacttgttgatcataaatcgtcttcaccaggttcttcggccctttgtactcagaagacttaagcataaggtcgaaaatgagcttcctgaaaaaattgaaagacttgtaagatgtgaggcatctgcttatcagaaacttctcatgacaagggtggaagaaaatcttggtggaattggagccgttaaggttcgctccgttcacaactctgtcatggaattgaggaacatatgcaaccatccatacttgagccagcttcatgttgaagagattgagggctacctacctaaacattacctaccatctattttgaggctctgcggaaaacttgagatgttggacagattgctgcctaaactcaaagctacgggccatagggttctacttttttctacaatgacaagattgcttgatgtaatggaggattacttggtttggaaaaagtataaatatcttcgattggatgggcacacttctggccatgaaagaggagctcttatcgataaatttaacgatcctaattctcaagcattcatttttcttcttagtatacgagctggaggtgttggggtcaatctccaagctgccgatacagttatcatatttgatactgattggaatcctcaggttgatctgcaagcacaggctagggcccacaggattggtcaaaagaaggaggttcttgttttacgtttagaaacggtccgaactgttgaagagcaagtcagggcttcagcagaacacaaattaggtgttgctaatcagagtataactgctggtttttttgacaataacacaagtgctgaagatcgaagagagtatcttgaatcactcctacgtgagtctaaaaaggaagaagcagctccagtgttagatgatgatgctctgaatgacattctagctcggagcgaagctgagattgacatattcgaatctattgacaagcaaaggagagaagaagaaatggcagcttggcaaaaggtggttcaggatggttcaactagtgggctagaccctggagtattgccttctcgtcttgtaactgatgatgatctgaagcccttctgccatgctatgaaactttatgagccatcaaatgtgaaaacagtaaatgtgaatgtgaggaagaagggtgaacttgggggccttgatacacagcactatggaaggggtaaacgagcccgtgaggttcgctcttatgaagaccaatggactgaagaagaatttgaaaaactttgtcaagctgattctcctgaatcatcccaacctggtggcatgtcgaaggatttggatattcttaataaaggcattaagactgaaattcttgtggagagttcaaaagaaccagaacaaacgaagatggaggcatccccaactgtcggtgactctccaccagccaaacggcggagaggtagacctaaaaggtcagatgtttttgtatctcctactgctggtctgactgatgctgtcaaacaagacacaggaaccacacaggacggtagttctgctacaccagcaagtaccatccactctgatgcaccagctactgcaatcaattcagctgtttcagatgttaatatacattctattccaccagctgataccaagaaacaagagttcagtactgataccaaggtttccagttctgtttctgttttggaaggatctgtgccgaatgaaattggtacaccattacagagtgttcataatgtagcagtttctgcaccaccgcatcaatcagctaggggcaggaaatgccaagcaggagaaacacctcgtaggcgaggccgaaaaccaaaatctctatcttcatctggtgtagatgatgttagtcttaacccaaccttttcaactgttagtggtgtagcagacactagttatgttccttcatattctcaggtctcatcacaaggcactgctgtggcactggcaggaatccagaaggattttgtgacagttaagttggatacattgttaccagatagtggtaagggtgctcctcctgttaatgagggagataaaggtgctactgttacaacacctgtggcaaaagatatatgtgctgggactgtgacaacatcagacaacactgtcaccctgacaccaaatactcttaaggaaaacattggattagttcaagtggcatctgcaccttctatgctcgtggcttctgaagaactaatgaaaatagcacatgttgcggtggccgataagcctgttgagaagcaaactgcttcacgtcgccgcagaaagaaaacatctagtagcgaggatactggagtcagcactagacaaagatcagctatgaaaagatcttactacaacacctctgttgccgttgatgatattggttctgctgtgatcccaaatgaaaaatcaggaataacgaaggaaagagatgtcagttcaattcaaagtacatccaatgaactaccaaatattaactcaccattgtatgagaagtctggatatgattctcaaccaagcacacctatagctgtccccatcaatgaagacactcttcctagtggttttgacacctgtactaattctatgataactcttgccacatctgccaactctgctgaagatgataaaccagttgatttgcaccttaatgcacctgtttctgttgattcccaaaaccaagaacaacacatgacagggaaggaccatttggcagtgtgttctagaatctttgctactcagttacagacggacactgcaaatcctgctattgatcataaaccaggaactgcccagtttgaaccatctgcttccttgccccagaattcaggcaaggatgctactgcactaccttctgaggttgacagtgctgctccaaatagggcatcaagcaggaggaggaaagggtcaactcgagaaccacgcaccagaagtaattctgcatcagctgcaagtgaacgtcgtgcccgacttactggattgaagcaggcagaggacataaagaagttagagatgtcagcaacgccgaccacaacagtgtgtatttcatcggtagagcaacagggagctgcttctttaagtgcgaagattaccaatgcttctgtttctgaaggacagaagaatcctggaaattatatgccttctgccatttcaattcccgtggggagccatgttctgggcctgggcgcaacaagtattgaagaaacaactgccactatgataactcaggctcctgcagtttcaaaatcagaacgaagaaaacttccaggaggcagtcaacaaggtattcagtttgagagttcagcatcaaaaacaaagatggtatcagctgtggaaccagcacctgcaaatgttgaatgcatgcaaggtactgaagttaatagttcagaacagacaatagtttctgctactgaaccagcacctgcaaatgatgaacacatgcaagagcaaccaacaaatatcgtttcatctgtggaatcagaaccttcaaatgatgaagagcacacaaagcatgaagtgtttcttgcgactactggtgataatatgcttgcttctagtgcaggaactgaaatattgcgggatacagttgagcatgctgcttgccagccagaagcagtatgcacagatggaactgcaaggcagtctgaattgtcgcaacttgatagaaaagcctttcatgatgcctcatataaatacactcatgggtccactaaagatgatggtatcttgcccagtgaaggtacttctgttgatgttactggttctaagcaggatgatgtgaacattgttggcacacaaactgatgatgtttctcggggttctagtcattttccagttattttacaatcaactgagtcagatcggcctccaggtcaagtgaagaatttggagagtaggatggagcaggtgaaaacagaagaagctttggttaacagttctggtggcaatcaaactcacagtctgggcgatgaaccttctcataatacatcattagcaagaaattctccctcagaacactcgaatgagcgttgctctgatcaagtaattggtgaaaatttcaaaagtaaagaaaatattgttgaagtccattctggcattaatactgatggccccgatgaagctctgaatgcattgcacacccaatctaaggaggccagcatgacagatattggtgtacctactgatggtgatagatgtgaaggtaaagggactagtgtcgaggtctgtgctgacatgaatactgatgggcctgtggctacccaggatgcttcgtccacgaaatctgataaagagtcctgcatgatggaatgtggtgtgtctaccgatggctgtcccacagtttgcaaaacacacaatgatctccagggtcatgtatcttgtgaagaaacctttgttaggactggtggtgatgacacaacccatatcaccaatgcaaattatggttctaataatgaaagtgaggccaccattgctagtcctgttgaaaccacacaaaaactgatggaagggagcactgttattgtgtcggagaattctgatttaaataagcaatgccacacattgcatactagaaatgatcctcctgcaaataccctgttgatagttgagtctaacaaagttacttgtgatgctgaaattgtttgtgctagcaggttagaatcttctggcattgaggctgaaacagtgggtatccaagagtcagctcttactgattttgagggaacaaaaggaactggggatttgggtgacagaactaacagtcaactgcatgatgatgttcatgggacatcatgttccacgatagctcttgtatctgagaaagaaccttccgaagatcttaccaccggtagccattcagaagcatctaatttacttgctgctgtagaacaaactcaagaaactactgttgagaaccaagagatcatagatgcagtagtgtttatggatgcctgcaaggcagaacctgttggtgattttactattgctaaaggagctgaacagactgtagaaatggttcattatgttgataagcaatctgctgtattagactatgttgagacacagacaaaacgaacttcggtttgtggttctacgctaaatgaatcccctcaggctgcagggttggaagaagactgctctgtactgaagcatggtgatcctacttcatctgagcttcttactgtagcacctaatccaatcggtgaaacttctgttattcaagtggaaccagaggcaagaaactcagatggatactgcacaacagaggctggcagtgctttatctgaaactgtcatgggattggagccaaataaagaaactgcggttccaatgcaagagaatattggagaagctaatgataattttaataattgcgaagcacacaataattcggagattcatgcatttgaagtgtcgatggaaacgcagtcatcagaagtcaaggaagtatcttctattcagtctggtgcagcaaatttgagcacacagacaactgcactgcctgatgtaacaggacaaaccagtatggcatcgactggagaactagtatctacaaatgaacacatacacatgcaaggcactgaaatcaattcagagcaacaaacaaagatggtttcacctgctgaatcagcacctgctaatgatgaacacgtgcaagacattgtgattcttagttcagaacagcaaacaaagatggttttagctgcagagattgacgcattatgcgtccaggagactgcaattattgatcttgggggagcaagaggaacagttgacctgaatgacataagaacacaggttcctgcattacctggaagggatgtgctagatgtggaggcacatattttggagcaaaaaaaaacatcttcaccaggtgatgaaattaagggttcagaacaagcaaaaatcgaatcgattgcagagatcgaaacagtgggcgtcaaggagaatgtcattgctgatcataaggaaacaggtaacaacagtggcgtaagtatacatgcgcctctattagttgaatctggacaaaaggcatcacctggagttgaattgcgtggtattgaggttgatgctcatgttttggaacaagcaaagatggtttcagctctagaaccagactctactccagtttgtgctgacaagttagaaccttctggtgctgatgatgttggaatgattgttgtccaggaggctgcttctgttgatgatcacaatagagcacaaggtggtgaggctcattgttcagaacaaataaagatggcttcaattgcacaagcggtgtctagcatggctttagtaggatattcttcttcagaagactcaatggtggatgctgctgcccgagtaactgatgctgattttgtggatagtaaagcagctggtgtttatcgccaagaaactatgcctactcaaaccacctctaccctcccagagaacatggattctcctgcaactgctgctaccatggttgaatcgaagtttgctgcctcgtctgagcacgttgcaggacccgagccaattgatgaaacttctgttatgcaagtggaactggcaacaagcacaggggatggatgtgcagcagatggtcacaatcttgtttcatctgaaactgttgttgaagtgaagcttgctcaagaaattgttgttcctagtccaggtggtagcatagaagctaataatacttctaccatcagcgaagtatacaaagatacccagtctcgtgcatctggtgaagcatgcaatgatggtcagtctcatggtgatgaaaatatgaaacttggtgaagcttacactgaactgcagctggcaccttcctctggtgaggaggccatgacatgtatgtgtagtgagctgcccagccaggaggtggaggctccaagcagtgaccctttggagaataatgaagaaacgaaaaatgaagctgctgctcaaggatcagtaaatgaggattctgctcctcgtgctgaaaatgcaaagattgatgaagctgacacagaacaggaactgcttccatctggtgaggccacggtagacgaatccagcgagctactcagccaagacgaaaaggtggctcgtaaagatgcaaagatggaagagtctgctgctgctgctgctgcacagagacagctaactactgaagttgctcatgcaagtgaaaacgcgaaacttggtgaagatggcacggagctgcaactgccaccaccttcaatggtagacatatctagggagcaactcagccaggaagtggaggttgcaagctctgggccttcaggaactgatgaaactgctgagatgaaacggctaaacactgaacattcacctggtgatgaaacttcaaaacttgttggaactgatctaggactgcaattgtcaccttctggtgatgccatggtagatatatctaataagccacccagctgccaagacgtaaaggaggccccgagcagtgacattttgggaaatgatgaaaattcagacaccgagaagactcctgctgccttgcatggacggctgaacaccgaacttgctcctagtggcagaaatacagaatttagtgaagctgacactggaaaacaagagacacccgtgtctgctgaggctatggtagaatcatcgagcgagcctcgcagccatgaggcaaaggaagctccaacccctgacctgtctggggatgatgaaaaagcgaagtcagcaagggctgctgttgttgcggaactttttggagatgcaacagaaggtggttcggatcagccattgccgtctcctagagaacaaggcaaggaagcagaggccgatggaggcttttagagtaaagttgcaaatattgtatcaagagatactagaatccgtgtaagtaagaactgctaatagtgcttttagttgtaactggtgtaagcttctactcagaatcaaaagcgacgtgctgagattacagcaacagtggcctacggcagtttactactgttttgtgcaatattgctgctgagttttgttgagacaggcaattgatctgtcatctgtctcgtcttgcatcgaagttggcagcaccatggtgaggtgctcccgccttaacctggaagcgctgacagagggaagaacaatactctctggtttcctaatgttttcctgttcactgttttgatttgatgctgcattgcagtagtgtgacttagtaacataatggtgcgtttggatagacggacataccgatccagaatcatctgaacctaaatattgagtacaagcttagattatctgtttggtctgctttatgtctgggtgcaatgctctctgatttctggacggagtggtaccgcaatccaaacagactttaatgtttgggtgcttcaggtcataatcaaccatctaatttactttgcaaatgaatgtttcaaactggactgctcaagcctaccaagtttaatggtccttcctagtattgaatccttttgagtctagcccgtttcctcatttgaattttcactgttagtgtg

SEQ ID NO: 58894 - DNA, 12200 bp, Zea Mays
atcagcactgcaggggtctactgaggcactccaagtggggaaatggcggaggcgacgaattcgagcttgggcacgtaggcgtcgctcctgccatcgccgcagcggtcactggactctcacgccgccgccgccgccgccggagaccattagttctcctgcgcggcggctccgcggctcccgccctctcccttaccttcttcccgctagggttttctccgatccccaatcactgctggttcacaaatggcttcatctcagcatgttgagatggaggctgcgaaacttctacataaacttatccaggagtcgaaggatgagcctgctaaactagcaacaaaactttacgtgatatgtcagcatatgaaactaagtggaaaggagcaatcactgccatatcaagtcatatcaagggctatggagacagttgtgaaccaacatggaattgatatggatgcattgcgatcatcacgaattccatttgctggtggtcctcaggcaggggattctagtggtgtcatgtcaaaggacaaggaggtcattggtaaccagtctcccatggtcggaagtgatgcttcccaaagtagtggacaagctggattatggcagcttccatcaggttcaaccgatatgataagacatggggcatctatttcaggtagggtacccacagggccaaataggggagatttctcagcagctgatattcatcaaggctccatgtcacaaaaaagcggtagatcctctggcattgaaagccctgcaagtctgcagatggaggacaccagatctatgaattcacatgattctttgaaatccgatgagaaaacaagtaagaaaacctcttccaagagaaaaaggatggattcaaaaggagctggtgatttgcgttcagaagacaactcaaagtcagatgttatctccactggacagaataccaggaaggggaaacaggttggtaaggctggtagacaaggtcagccttccatgggaattgagcatgagcagcaacctcataaactgcaaggtggtactggtcaggtaccacctatacatggtggtgcaccttttctcaggactcgctcagaaggtccttctgggaggacaatggacaagactaaaccatcaaatccattctcaatgggtcaaattccaaattttcctgaagggctggcttctactggtgctccaatcgagttgcagaaaagtatacagggtggagcaagtttatttaatcctggttttggctggaaccaaaatccacaagttcaaaccttgaagaattctcaaggttctattcataatttagtgaggtctggagttactgttgaagggaaagttaatgtaggggcacaaggagcttttaactctgcctctgcaccacagatggaatttcccacagttcctccatacaacccctcttccttcggagctagctcacagtttctggacaaaggcaaggagttggtttccagcattataagcactgaacctcattcatctaaagttgcatctcagcctgggatttctcatggaagtcccatgcaagaaaggcaaggtatgatcagggtgccacagagaggcgaggcatcatttcaggaacgcaggccatcttcacttccgagtagaagtactgggccaagtccaatgtctcacatttcttccaacacaccatttaaagaacagcagctgaagcagctcagagcacagtgcttagtatttcttgcatttaggaataatttgcagcccaggaaggtacatcttgaaattgctttgggcagagggcctcctgcagaaagtgacagtgcaggtcaaaggggcagcgagggcagagtgtctgatgctctgggaaaggaaaatggtagcagtcgggagaactctggtgtcttttgtaggcaaactgatatctctagacttccagccacatctgcaggaagtattgcagaggatgattccttatcgaaggatccagaaaatgctacaaaaaaaatcaagttagctgaacaggagaagtcattgatggaagtagaaaatgtccagcaagcttctgttatgcaaggaactagttctgaaatgcgttcccaagaaactgcatctcaaaatccatatcgaccacaacagtcatattatcaaggagatacaagaagaatcgcctcggatatccataggactgatgctgaaattttgaaccagaatttaagttggggaggccagggatctactgctttgggtggtactagacagcttctgaatcaggaaactaaagaatcacttgcaccttcaaagtcacaccatatgcctgttgatggttacaactccaatatacaaggaatagatcggactccagagatagctggagctggtaatgatgttgaaaattgtagccacgtagcagatattgtgcctgagcaggctgctgatgaaggagatgaggacctctcagagcatgaggatttattgtcatctccaaagcacacaatgacggaaaaatggatcttagattaccagaagagaatttacaatgagaaacaaaagagaacattggagcagcataaggtacacagcagaatgtcagcaacatatgaggagctaaaggagagcgttaattcatccgaagatctttctgcaaagaccaagagcgtcattgaattgaaaaagcttcagcttctgccacttcaacgtcgtgtacgcagtgaatttttgctggattttttcaagcctaatacatccgacttagagcgcataaaatcactgaagaaacataggcatgggcggcgggtgaaacagcttgaaaaaattgaacagaaaatgaaggaagaaaggcaaaagagaattcgtgagagacagaaggaattctttgctgatattgaagcttacagagagaaactcgaggataacttcaaggttaagagagagcgcttgaaggggttcaatcgatacataaaagaatttcacaaaaggaaagaaagaattcatcgggagaaactggataggatccaacgcgagaaaatcaacctgcttaagaacaatgatgttgaaggttatcttagaatggtcaaggatgcaaaatctgatcgtgtcaagcaactattgcgtgaaactgagaaatatcttcagaaacttgggaacaaattacagagtgcaaagtccacagatggccgctcatcttttgttactgataagagtgacactgcaaacgacattgaagatgagagctaccagccacagcattatctggaaagtaatgaaaagtactatcaactggcacacagtgtaaaggaaactgtaaatgatcagccatcttatcttcagggcggcaaattgcgagagtaccaaatgaatggcttgcgttggctggtttcattgtacaataataatttgaatggtattttagcagatgagatgggccttggtaaaacagtacaagtaatctctttgatatgctaccttatggaaacaaaaaatgaccgtgggccttttctcgtggttgtaccatcatctgttcttcctggatgggaatctgaactcagcttctgggcacctagtataaataaaattgcttatgctggtcctcctgaagaaaggcgcaggatgttcaaagagatgattgttcatcagaagttcaatgttcttctgacaacatatgagtacttgatgaacaagcatgataggccaaaactaagcaaaatacaatggcactatataataatcgatgaagggcatcgtattaaaaatgcttcttgtaaacttaatgctgatttgaagctttatcggagctctcatcggatattattgacaggaacacctcttcaggtcgaaaatgagcttcctgaaaaaattgaaagacttgtaagatgtgaggcatctgcttatcagaaacttctcatgacaagggtggaagaaaatcttggtggaattggagccgttaaggttcgctccgttcacaactctgtcatggaattgaggaacatatgcaaccatccatacttgagccagcttcatgttgaagagattgagggctacctacctaaacattacctaccatctattttgaggctctgcggaaaacttgagatgttggacagattgctgcctaaactcaaagctacgggccatagggttctacttttttctacaatgacaagattgcttgatgtaatggaggattacttggtttggaaaaagtataaatatcttcgattggatgggcacacttctggccatgaaagaggagctcttatcgataaatttaacgatcctaattctcaagcattcatttttcttcttagtatacgagctggaggtgttggggtcaatctccaagctgccgatacagttatcatatttgatactgattggaatcctcaggttgatctgcaagcacaggctagggcccacaggattggtcaaaagaaggaggttcttgttttacgtttagaaacggtccgaactgttgaagagcaagtcagggcttcagcagaacacaaattaggtgttgctaatcagagtataactgctggtttttttgacaataacacaagtgctgaagatcgaagagagtatcttgaatcactcctacgtgagtctaaaaaggaagaagcagctccagtgttagatgatgatgctctgaatgacattctagctcggagcgaagctgagattgacatattcgaatctattgacaagcaaaggagagaagaagaaatggcagcttggcaaaaggtggttcaggatggttcaactagtgggctagaccctggagtattgccttctcgtcttgtaactgatgatgatctgaagcccttctgccatgctatgaaactttatgagccatcaaatgtgaaaacagtaaatgtgaatgtgaggaagaagggtgaacttgggggccttgatacacagcactatggaaggggtaaacgagcccgtgaggttcgctcttatgaagaccaatggactgaagaagaatttgaaaaactttgtcaagctgattctcctgaatcatcccaacctggtggcatgtcgaaggatttggatattcttaataaaggcattaagactgaaattcttgtggagagttcaaaagaaccagaacaaacgaagatggaggcatccccaactgtcggtgactctccaccagccaaacggcggagaggtagacctaaaaggtcagatgtttttgtatctcctactgctggtctgactgatgctgtcaaacaagacacaggaaccacacaggacggtagttctgctacaccagcaagtaccatccactctgatgcaccagctactgcaatcaattcagctgtttcagatgttaatatacattctattccaccagctgataccaagaaacaagagttcagtactgataccaaggtttccagttctgtttctgttttggaaggatctgtgccgaatgaaattggtacaccattacagagtgttcataatgtagcagtttctgcaccaccgcatcaatcagctaggggcaggaaatgccaagcaggagaaacacctcgtaggcgaggccgaaaaccaaaatctctatcttcatctggtgtagatgatgttagtcttaacccaaccttttcaactgttagtggtgtagcagacactagttatgttccttcatattctcaggtctcatcacaaggcactgctgtggcactggcaggaatccagaaggattttgtgacagttaagttggatacattgttaccagatagtggtaagggtgctcctcctgttaatgagggagataaaggtgctactgttacaacacctgtggcaaaagatatatgtgctgggactgtgacaacatcagacaacactgtcaccctgacaccaaatactcttaaggaaaacattggattagttcaagtggcatctgcaccttctatgctcgtggcttctgaagaactaatgaaaatagcacatgttgcggtggccgataagcctgttgagaagcaaactgcttcacgtcgccgcagaaagaaaacatctagtagcgaggatactggagtcagcactagacaaagatcagctatgaaaagatcttactacaacacctctgttgccgttgatgatattggttctgctgtgatcccaaatgaaaaatcaggaataacgaaggaaagagatgtcagttcaattcaaagtacatccaatgaactaccaaatattaactcaccattgtatgagaagtctggatatgattctcaaccaagcacacctatagctgtccccatcaatgaagacactcttcctagtggttttgacacctgtactaattctatgataactcttgccacatctgccaactctgctgaagatgataaaccagttgatttgcaccttaatgcacctgtttctgttgattcccaaaaccaagaacaacacatgacagggaaggaccatttggcagtgtgttctagaatctttgctactcagttacagacggacactgcaaatcctgctattgatcataaaccaggaactgcccagtttgaaccatctgcttccttgccccagaattcaggcaaggatgctactgcactaccttctgaggttgacagtgctgctccaaatagggcatcaagcaggaggaggaaagggtcaactcgagaaccacgcaccagaagtaattctgcatcagctgcaagtgaacgtcgtgcccgacttactggattgaagcaggcagaggacataaagaagttagagatgtcagcaacgccgaccacaacagtgtgtatttcatcggtagagcaacagggagctgcttctttaagtgcgaagattaccaatgcttctgtttctgaaggacagaagaatcctggaaattatatgccttctgccatttcaattcccgtggggagccatgttctgggcctgggcgcaacaagtattgaagaaacaactgccactatgataactcaggctcctgcagtttcaaaatcagaacgaagaaaacttccaggaggcagtcaacaaggtattcagtttgagagttcagcatcaaaaacaaagatggtatcagctgtggaaccagcacctgcaaatgttgaatgcatgcaaggtactgaagttaatagttcagaacagacaatagtttctgctactgaaccagcacctgcaaatgatgaacacatgcaagagcaaccaacaaatatcgtttcatctgtggaatcagaaccttcaaatgatgaagagcacacaaagcatgaagtgtttcttgcgactactggtgataatatgcttgcttctagtgcaggaactgaaatattgcgggatacagttgagcatgctgcttgccagccagaagcagtatgcacagatggaactgcaaggcagtctgaattgtcgcaacttgatagaaaagcctttcatgatgcctcatataaatacactcatgggtccactaaagatgatggtatcttgcccagtgaaggtacttctgttgatgttactggttctaagcaggatgatgtgaacattgttggcacacaaactgatgatgtttctcggggttctagtcattttccagttattttacaatcaactgagtcagatcggcctccaggtcaagtgaagaatttggagagtaggatggagcaggtgaaaacagaagaagctttggttaacagttctggtggcaatcaaactcacagtctgggcgatgaaccttctcataatacatcattagcaagaaattctccctcagaacactcgaatgagcgttgctctgatcaagtaattggtgaaaatttcaaaagtaaagaaaatattgttgaagtccattctggcattaatactgatggccccgatgaagctctgaatgcattgcacacccaatctaaggaggccagcatgacagatattggtgtacctactgatggtgatagatgtgaaggtaaagggactagtgtcgaggtctgtgctgacatgaatactgatgggcctgtggctacccaggatgcttcgtccacgaaatctgataaagagtcctgcatgatggaatgtggtgtgtctaccgatggctgtcccacagtttgcaaaacacacaatgatctccagggtcatgtatcttgtgaagaaacctttgttaggactggtggtgatgacacaacccatatcaccaatgcaaattatggttctaataatgaaagtgaggccaccattgctagtcctgttgaaaccacacaaaaactgatggaagggagcactgttattgtgtcggagaattctgatttaaataagcaatgccacacattgcatactagaaatgatcctcctgcaaataccctgttgatagttgagtctaacaaagttacttgtgatgctgaaattgtttgtgctagcaggttagaatcttctggcattgaggctgaaacagtgggtatccaagagtcagctcttactgattttgagggaacaaaaggaactggggatttgggtgacagaactaacagtcaactgcatgatgatgttcatgggacatcatgttccacgatagctcttgtatctgagaaagaaccttccgaagatcttaccaccggtagccattcagaagcatctaatttacttgctgctgtagaacaaactcaagaaactactgttgagaaccaagagatcatagatgcagtagtgtttatggatgcctgcaaggcagaacctgttggtgattttactattgctaaaggagctgaacagactgtagaaatggttcattatgttgataagcaatctgctgtattagactatgttgagacacagacaaaacgaacttcggtttgtggttctacgctaaatgaatcccctcaggctgcagggttggaagaagactgctctgtactgaagcatggtgatcctacttcatctgagcttcttactgtagcacctaatccaatcggtgaaacttctgttattcaagtggaaccagaggcaagaaactcagatggatactgcacaacagaggctggcagtgctttatctgaaactgtcatgggattggagccaaataaagaaactgcggttccaatgcaagagaatattggagaagctaatgataattttaataattgcgaagcacacaataattcggagattcatgcatttgaagtgtcgatggaaacgcagtcatcagaagtcaaggaagtatcttctattcagtctggtgcagcaaatttgagcacacagacaactgcactgcctgatgtaacaggacaaaccagtatggcatcgactggagaactagtatctacaaatgaacacatacacatgcaaggcactgaaatcaattcagagcaacaaacaaagatggtttcacctgctgaatcagcacctgctaatgatgaacacgtgcaagacattgtgattcttagttcagaacagcaaacaaagatggttttagctgcagagattgacgcattatgcgtccaggagactgcaattattgatcttgggggagcaagaggaacagttgacctgaatgacataagaacacaggttcctgcattacctggaagggatgtgctagatgtggaggcacatattttggagcaaaaaaaaacatcttcaccaggtgatgaaattaagggttcagaacaagcaaaaatcgaatcgattgcagagatcgaaacagtgggcgtcaaggagaatgtcattgctgatcataaggaaacaggtaacaacagtggcgtaagtatacatgcgcctctattagttgaatctggacaaaaggcatcacctggagttgaattgcgtggtattgaggttgatgctcatgttttggaacaagcaaagatggtttcagctctagaaccagactctactccagaagtttgtgctgacaagttagaaccttctggtgctgatgatgttggaatgattgttgtccaggaggctgcttctgttgatgatcacaatagagcacaaggtggtgaggctcattgttcagaacaaataaagatggcttcaattgcacaagcggtgtctagcatggctttagtaggatattcttcttcagaagactcaatggtggatgctgctgcccgagtaactgatgctgattttgtggatagtaaagcagctggtgtttatcgccaagaaactatgcctactcaaaccacctctaccctcccagagaacatggattctcctgcaactgctgctaccatggttgaatcgaagtttgctgcctcgtctgagcacgttgcaggacccgagccaattgatgaaacttctgttatgcaagtggaactggcaacaagcacaggggatggatgtgcagcagatggtcacaatcttgtttcatctgaaactgttgttgaagtgaagcttgctcaagaaattgttgttcctagtccaggtggtagcatagaagctaataatacttctaccatcagcgaagtatacaaagatacccagtctcgtgcatctggtgaagcatgcaatgatggtcagtctcatggtgatgaaaatatgaaacttggtgaagcttacactgaactgcagctggcaccttcctctggtgaggaggccatgacatgtatgtgtagtgagctgcccagccaggaggtggaggctccaagcagtgaccctttggagaataatgaagaaacgaaaaatgaagctgctgctcaaggatcagtaaatgaggattctgctcctcgtgctgaaaatgcaaagattgatgaagctgacacagaacaggaactgcttccatctggtgaggccacggtagacgaatccagcgagctactcagccaagacgaaaaggtggctcgtaaagatgcaaagatggaagagtctgctgctgctgctgctgcacagagacagctaactactgaagttgctcatgcaagtgaaaacgcgaaacttggtgaagatggcacggagctgcaactgccaccaccttcaatggtagacatatctagggagcaactcagccaggaagtggaggttgcaagctctgggccttcaggaactgatgaaactgctgagatgaaacggctaaacactgaacattcacctggtgatgaaacttcaaaacttgttggaactgatctaggactgcaattgtcaccttctggtgatgccatggtagatatatctaataagccacccagctgccaagacgtaaaggaggccccgagcagtgacattttgggaaatgatgaaaattcagacaccgagaagactcctgctgccttgcatggacggctgaacaccgaacttgctcctagtggcagaaatacagaatttagtgaagctgacactggaaaacaagagacacccgtgtctgctgaggctatggtagaatcatcgagcgagcctcgcagccatgaggcaaaggaagctccaacccctgacctgtctggggatgatgaaaaagcgaagtcagcaagggctgctgttgttgcggaactttttggagatgcaacagaaggtggttcggatcagccattgccgtctcctagagaacaaggcaaggaagcagaggccgatggaggcttttagagtaaagttgcaaatattgtatcaagagatactagaatccgtgtaagtaagaactgctaatagtgcttttagttgtaactggtgtaagcttctactcagaatcaaaagcgacgtgctgagattacagcaacagtggcctacggcagtttactactgttttgtgcaatattgctgctgagttttgttgagacaggcaattgatctgtcatctgtctcgtcttgcatcgaagttggcagcaccatggtgaggtgctcccgccttaacctggaagcgctgacagagggaagaacaatactctctggtttcctaatgttttcctgttcactgttttgatttgatgctgcattgcagtagtgtgacttagtaacataatggtgcgtttggatagacggacataccgatccagaatcatctgaacctaaatattgagtacaagcttagattatctgtttggtctgctttatgtctgggtgcaatgctctctgatttctggacggagtggtaccgcaatccaaacagactttaatgtttgggtgcttcaggtcataatcaaccatctaatttactttgcaaatgaatgtttcaaactggactgctcaagcctaccaagtttaatggtccttcctagtattgaatccttttgagtctagcccgtttcctcatttgaattttcactgttagtgtg

SEQ ID NO: 58895 - DNA, 12354 bp, Zea Mays
gaattcgagcttgggcacgtaggcgtcgctcctgccatcgccgcagcggtcactggactctcacgccgccgccgccgccgccggagaccattagttctcctgcgcggcggctccgcggctcccgccctctcccttaccttcttcccgctagggttttctccgatccccaatcactgctggttcacaaatggcttcatctcagcatgttgagatggaggctgcgaaacttctacataaacttatccaggagtcgaaggatgagcctgctaaactagcaacaaaactttacgtgatatgtcagcatatgaaactaagtggaaaggagcaatcactgccatatcaagtcatatcaagggctatggagacagttgtgaaccaacatggaattgatatggatgcattgcgatcatcacgaattccatttgctggtggtcctcaggcaggggattctagtggtgtcatgtcaaaggacaaggaggtcattggtaaccagtctcccatggtcggaagtgatgcttcccaaagtagtggacaagctggattatggcagcttccatcaggttcaaccgatatgataagacatggggcatctatttcaggtagggtacccacagggccaaataggggagatttctcagcagctgatattcatcaaggctccatgtcacaaaaaagcggtagatcctctggcattgaaagccctgcaagtctgcagatggaggacaccagatctatgaattcacatgattctttgaaatccgatgagaaaacaagtaagaaaacctcttccaagagaaaaaggatggattcaaaaggagctggtgatttgcgttcagaagacaactcaaagtcagatgttatctccactggacagaataccaggaaggggaaacaggttggtaaggctggtagacaaggtcagccttccatgggaattgagcatgagcagcaacctcataaactgcaaggtggtactggtcaggtaccacctatacatggtggtgcaccttttctcaggactcgctcagaaggtccttctgggaggacaatggacaagactaaaccatcaaatccattctcaatgggtcaaattccaaattttcctgaagggctggcttctactggtgctccaatcgagttgcagaaaagtatacagggtggagcaagtttatttaatcctggttttggctggaaccaaaatccacaagttcaaaccttgaagaattctcaaggttctattcataatttagtgaggtctggagttactgttgaagggaaagttaatgtaggggcacaaggagcttttaactctgcctctgcaccacagatggaatttcccacagttcctccatacaacccctcttccttcggagctagctcacagtttctggacaaaggcaaggagttggtttccagcattataagcactgaacctcattcatctaaagttgcatctcagcctgggatttctcatggaagtcccatgcaagaaaggcaaggtatgatcagggtgccacagagaggcgaggcatcatttcaggaacgcaggccatcttcacttccgagtagaagtactgggccaagtccaatgtctcacatttcttccaacacaccatttaaagaacagcagctgaagcagctcagagcacagtgcttagtatttcttgcatttaggaataatttgcagcccaggaaggtacatcttgaaattgctttgggcagagggcctcctgcagaaagtgacagtgcaggtcaaaggggcagcgagggcagagtgtctgatgctctgggaaaggaaaatggtagcagtcgggagaactctggtgtcttttgtaggcaaactgatatctctagacttccagccacatctgcaggaagtattgcagaggatgattccttatcgaaggatccagaaaatgctacaaaaaaaatcaagttagctgaacaggagaagtcattgatggaagtagaaaatgtccagcaagcttctgttatgcaaggaactagttctgaaatgcgttcccaagaaactgcatctcaaaatccatatcgaccacaacagtcatattatcaaggagatacaagaagaatcgcctcggatatccataggactgatgctgaaattttgaaccagaatttaagttggggaggccagggatctactgctttgggtggtactagacagcttctgaatcaggaaactaaagaatcacttgcaccttcaaagtcacaccatatgcctgttgatggttacaactccaatatacaaggaatagatcggactccagagatagctggagctggtaatgatgttgaaaattgtagccacgtagcagatattgtgcctgagcaggctgctgatgaaggagatgaggacctctcagagcatgaggatttattgtcatctccaaagcacacaatgacggaaaaatggatcttagattaccagaagagaatttacaatgagaaacaaaagagaacattggagcagcataaggtacacagcagaatgtcagcaacatatgaggagctaaaggagagcgttaattcatccgaagatctttctgcaaagaccaagagcgtcattgaattgaaaaagcttcagcttctgccacttcaacgtcgtgtacgcagtgaatttttgctggattttttcaagcctaatacatccgacttagagcgcataaaatcactgaagaaacataggcatgggcggcgggtgaaacagcttgaaaaaattgaacagaaaatgaaggaagaaaggcaaaagagaattcgtgagagacagaaggaattctttgctgatattgaagcttacagagagaaactcgaggataacttcaaggttaagagagagcgcttgaaggggttcaatcgatacataaaagaatttcacaaaaggaaagaaagaattcatcgggagaaactggataggatccaacgcgagaaaatcaacctgcttaagaacaatgatgttgaaggttatcttagaatggtcaaggatgcaaaatctgatcgtgtcaagcaactattgcgtgaaactgagaaatatcttcagaaacttgggaacaaattacagagtgcaaagtccacagatggccgctcatcttttgttactgataagagtgacactgcaaacgacattgaagatgagagctaccagccacagcattatctggaaagtaatgaaaagtactatcaactggcacacagtgtaaaggaaactgtaaatgatcagccatcttatcttcagggcggcaaattgcgagagtaccaaatgaatggcttgcgttggctggtttcattgtacaataataatttgaatggtattttagcagatgagatgggccttggtaaaacagtacaagtaatctctttgatatgctaccttatggaaacaaaaaatgaccgtgggccttttctcgtggttgtaccatcatctgttcttcctggatgggaatctgaactcagcttctgggcacctagtataaataaaattgcttatgctggtcctcctgaagaaaggcgcaggatgttcaagtaaattttaaccttttcaattcatcttgcactagtctatgtggagatttattcacttcagctattttctttcagagagatgattgttcatcagaagttcaatgttcttctgacaacatatgagtacttgatgaacaagcatgataggccaaaactaagcaaaatacaatggcactatataataatcgatgaagggcatcgtattaaaaatgcttcttgtaaacttaatgctgatttgaagctttatcggagctctcatcggatattattgacaggaacacctcttcagaataatctcgaggagctgtgggcacttctaaattttttgttgcccaatatttttaattcgtcagaggacttctctcagtggtttaacaaaccatttgaaagtaatggtgataattcacctgatgaggccttactttcagaggaggagaacttgttgatcataaatcgtcttcaccaggttcttcggccctttgtactcagaagacttaagcataaggtcgaaaatgagcttcctgaaaaaattgaaagacttgtaagatgtgaggcatctgcttatcagaaacttctcatgacaagggtggaagaaaatcttggtggaattggagccgttaaggttcgctccgttcacaactctgtcatggaattgaggaacatatgcaaccatccatacttgagccagcttcatgttgaagagattgagggctacctacctaaacattacctaccatctattttgaggctctgcggaaaacttgagatgttggacagattgctgcctaaactcaaagctacgggccatagggttctacttttttctacaatgacaagattgcttgatgtaatggaggattacttggtttggaaaaagtataaatatcttcgattggatgggcacacttctggccatgaaagaggagctcttatcgataaatttaacgatcctaattctcaagcattcatttttcttcttagtatacgagctggaggtgttggggtcaatctccaagctgccgatacagttatcatatttgatactgattggaatcctcaggttgatctgcaagcacaggctagggcccacaggattggtcaaaagaaggaggttcttgttttacgtttagaaacggtccgaactgttgaagagcaagtcagggcttcagcagaacacaaattaggtgttgctaatcagagtataactgctggtttttttgacaataacacaagtgctgaagatcgaagagagtatcttgaatcactcctacgtgagtctaaaaaggaagaagcagctccagtgttagatgatgatgctctgaatgacattctagctcggagcgaagctgagattgacatattcgaatctattgacaagcaaaggagagaagaagaaatggcagcttggcaaaaggtggttcaggatggttcaactagtgggctagaccctggagtattgccttctcgtcttgtaactgatgatgatctgaagcccttctgccatgctatgaaactttatgagccatcaaatgtgaaaacagtaaatgtgaatgtgaggaagaagggtgaacttgggggccttgatacacagcactatggaaggggtaaacgagcccgtgaggttcgctcttatgaagaccaatggactgaagaagaatttgaaaaactttgtcaagctgattctcctgaatcatcccaacctggtggcatgtcgaaggatttggatattcttaataaaggcattaagactgaaattcttgtggagagttcaaaagaaccagaacaaacgaagatggaggcatccccaactgtcggtgactctccaccagccaaacggcggagaggtagacctaaaaggtcagatgtttttgtatctcctactgctggtctgactgatgctgtcaaacaagacacaggaaccacacaggacggtagttctgctacaccagcaagtaccatccactctgatgcaccagctactgcaatcaattcagctgtttcagatgttaatatacattctattccaccagctgataccaagaaacaagagttcagtactgataccaaggtttccagttctgtttctgttttggaaggatctgtgccgaatgaaattggtacaccattacagagtgttcataatgtagcagtttctgcaccaccgcatcaatcagctaggggcaggaaatgccaagcaggagaaacacctcgtaggcgaggccgaaaaccaaaatctctatcttcatctggtgtagatgatgttagtcttaacccaaccttttcaactgttagtggtgtagcagacactagttatgttccttcatattctcaggtctcatcacaaggcactgctgtggcactggcaggaatccagaaggattttgtgacagttaagttggatacattgttaccagatagtggtaagggtgctcctcctgttaatgagggagataaaggtgctactgttacaacacctgtggcaaaagatatatgtgctgggactgtgacaacatcagacaacactgtcaccctgacaccaaatactcttaaggaaaacattggattagttcaagtggcatctgcaccttctatgctcgtggcttctgaagaactaatgaaaatagcacatgttgcggtggccgataagcctgttgagaagcaaactgcttcacgtcgccgcagaaagaaaacatctagtagcgaggatactggagtcagcactagacaaagatcagctatgaaaagatcttactacaacacctctgttgccgttgatgatattggttctgctgtgatcccaaatgaaaaatcaggaataacgaaggaaagagatgtcagttcaattcaaagtacatccaatgaactaccaaatattaactcaccattgtatgagaagtctggatatgattctcaaccaagcacacctatagctgtccccatcaatgaagacactcttcctagtggttttgacacctgtactaattctatgataactcttgccacatctgccaactctgctgaagatgataaaccagttgatttgcaccttaatgcacctgtttctgttgattcccaaaaccaagaacaacacatgacagggaaggaccatttggcagtgtgttctagaatctttgctactcagttacagacggacactgcaaatcctgctattgatcataaaccaggaactgcccagtttgaaccatctgcttccttgccccagaattcaggcaaggatgctactgcactaccttctgaggttgacagtgctgctccaaatagggcatcaagcaggaggaggaaagggtcaactcgagaaccacgcaccagaagtaattctgcatcagctgcaagtgaacgtcgtgcccgacttactggattgaagcaggcagaggacataaagaagttagagatgtcagcaacgccgaccacaacagtgtgtatttcatcggtagagcaacagggagctgcttctttaagtgcgaagattaccaatgcttctgtttctgaaggacagaagaatcctggaaattatatgccttctgccatttcaattcccgtggggagccatgttctgggcctgggcgcaacaagtattgaagaaacaactgccactatgataactcaggctcctgcagtttcaaaatcagaacgaagaaaacttccaggaggcagtcaacaaggtattcagtttgagagttcagcatcaaaaacaaagatggtatcagctgtggaaccagcacctgcaaatgttgaatgcatgcaaggtactgaagttaatagttcagaacagacaatagtttctgctactgaaccagcacctgcaaatgatgaacacatgcaagagcaaccaacaaatatcgtttcatctgtggaatcagaaccttcaaatgatgaagagcacacaaagcatgaagtgtttcttgcgactactggtgataatatgcttgcttctagtgcaggaactgaaatattgcgggatacagttgagcatgctgcttgccagccagaagcagtatgcacagatggaactgcaaggcagtctgaattgtcgcaacttgatagaaaagcctttcatgatgcctcatataaatacactcatgggtccactaaagatgatggtatcttgcccagtgaaggtacttctgttgatgttactggttctaagcaggatgatgtgaacattgttggcacacaaactgatgatgtttctcggggttctagtcattttccagttattttacaatcaactgagtcagatcggcctccaggtcaagtgaagaatttggagagtaggatggagcaggtgaaaacagaagaagctttggttaacagttctggtggcaatcaaactcacagtctgggcgatgaaccttctcataatacatcattagcaagaaattctccctcagaacactcgaatgagcgttgctctgatcaagtaattggtgaaaatttcaaaagtaaagaaaatattgttgaagtccattctggcattaatactgatggccccgatgaagctctgaatgcattgcacacccaatctaaggaggccagcatgacagatattggtgtacctactgatggtgatagatgtgaaggtaaagggactagtgtcgaggtctgtgctgacatgaatactgatgggcctgtggctacccaggatgcttcgtccacgaaatctgataaagagtcctgcatgatggaatgtggtgtgtctaccgatggctgtcccacagtttgcaaaacacacaatgatctccagggtcatgtatcttgtgaagaaacctttgttaggactggtggtgatgacacaacccatatcaccaatgcaaattatggttctaataatgaaagtgaggccaccattgctagtcctgttgaaaccacacaaaaactgatggaagggagcactgttattgtgtcggagaattctgatttaaataagcaatgccacacattgcatactagaaatgatcctcctgcaaataccctgttgatagttgagtctaacaaagttacttgtgatgctgaaattgtttgtgctagcaggttagaatcttctggcattgaggctgaaacagtgggtatccaagagtcagctcttactgattttgagggaacaaaaggaactggggatttgggtgacagaactaacagtcaactgcatgatgatgttcatgggacatcatgttccacgatagctcttgtatctgagaaagaaccttccgaagatcttaccaccggtagccattcagaagcatctaatttacttgctgctgtagaacaaactcaagaaactactgttgagaaccaagagatcatagatgcagtagtgtttatggatgcctgcaaggcagaacctgttggtgattttactattgctaaaggagctgaacagactgtagaaatggttcattatgttgataagcaatctgctgtattagactatgttgagacacagacaaaacgaacttcggtttgtggttctacgctaaatgaatcccctcaggctgcagggttggaagaagactgctctgtactgaagcatggtgatcctacttcatctgagcttcttactgtagcacctaatccaatcggtgaaacttctgttattcaagtggaaccagaggcaagaaactcagatggatactgcacaacagaggctggcagtgctttatctgaaactgtcatgggattggagccaaataaagaaactgcggttccaatgcaagagaatattggagaagctaatgataattttaataattgcgaagcacacaataattcggagattcatgcatttgaagtgtcgatggaaacgcagtcatcagaagtcaaggaagtatcttctattcagtctggtgcagcaaatttgagcacacagacaactgcactgcctgatgtaacaggacaaaccagtatggcatcgactggagaactagtatctacaaatgaacacatacacatgcaaggcactgaaatcaattcagagcaacaaacaaagatggtttcacctgctgaatcagcacctgctaatgatgaacacgtgcaagacattgtgattcttagttcagaacagcaaacaaagatggttttagctgcagagattgacgcattatgcgtccaggagactgcaattattgatcttgggggagcaagaggaacagttgacctgaatgacataagaacacaggttcctgcattacctggaagggatgtgctagatgtggaggcacatattttggagcaaaaaaaaacatcttcaccaggtgatgaaattaagggttcagaacaagcaaaaatcgaatcgattgcagagatcgaaacagtgggcgtcaaggagaatgtcattgctgatcataaggaaacaggtattgaggttgatgctcatgttttggaacaagcaaagatggtttcagctctagaaccagactctactccagaagtttgtgctgacaagttagaaccttctggtgctgatgatgttggaatgattgttgtccaggaggctgcttctgttgatgatcacaatagagcacaaggtggtgaggctcattgttcagaacaaataaagatggcttcaattgcacaagcggtgtctagcatggctttagtaggatattcttcttcagaagactcaatggtggatgctgctgcccgagtaactgatgctgattttgtggatagtaaagcagctggtgtttatcgccaagaaactatgcctactcaaaccacctctaccctcccagagaacatggattctcctgcaactgctgctaccatggttgaatcgaagtttgctgcctcgtctgagcacgttgcaggacccgagccaattgatgaaacttctgttatgcaagtggaactggcaacaagcacaggggatggatgtgcagcagatggtcacaatcttgtttcatctgaaactgttgttgaagtgaagcttgctcaagaaattgttgttcctagtccaggtggtagcatagaagctaataatacttctaccatcagcgaagtatacaaagatacccagtctcgtgcatctggtgaagcatgcaatgatggtcagtctcatggtgatgaaaatatgaaacttggtgaagcttacactgaactgcagctggcaccttcctctggtgaggaggccatgacatgtatgtgtagtgagctgcccagccaggaggtggaggctccaagcagtgaccctttggagaataatgaagaaacgaaaaatgaagctgctgctcaaggatcagtaaatgaggattctgctcctcgtgctgaaaatgcaaagattgatgaagctgacacagaacaggaactgcttccatctggtgaggccacggtagacgaatccagcgagctactcagccaagacgaaaaggtggctcgtaaagatgcaaagatggaagagtctgctgctgctgctgctgcacagagacagctaactactgaagttgctcatgcaagtgaaaacgcgaaacttggtgaagatggcacggagctgcaactgccaccaccttcaatggtagacatatctagggagcaactcagccaggaagtggaggttgcaagctctgggccttcaggaactgatgaaactgctgagatgaaacggctaaacactgaacattcacctggtgatgaaacttcaaaacttgttggaactgatctaggactgcaattgtcaccttctggtgatgccatggtagatatatctaataagccacccagctgccaagacgtaaaggaggccccgagcagtgacattttgggaaatgatgaaaattcagacaccgagaagactcctgctgccttgcatggacggctgaacaccgaacttgctcctagtggcagaaatacagaatttagtgaagctgacactggaaaacaagagacacccgtgtctgctgaggctatggtagaatcatcgagcgagcctcgcagccatgaggcaaaggaagctccaacccctgacctgtctggggatgatgaaaaagcgaagtcagcaagggctgctgttgttgcggaactttttggagatgcaacagaaggtggttcggatcagccattgccgtctcctagagaacaaggcaaggaagcagaggccgatggaggcttttagagtaaagttgcaaatattgtatcaagagatactagaatccgtgtaagtaagaactgctaatagtgcttttagttgtaactggtgtaagcttctactcagaatcaaaagcgacgtgctgagattacagcaacagtggcctacggcagtttactactgttttgtgcaatattgctgctgagttttgttgagacaggcaattgatctgtcatctgtctcgtcttgcatcgaagttggcagcaccatggtgaggtgctcccgccttaacctggaagcgctgacagagggaagaacaatactctctggtttcctaatgttttcctgttcactgttttgatttgatgctgcattgcagtagtgtgacttagtaacataatggtgcgtttggatagacggacataccgatccagaatcatctgaacctaaatattgagtacaagcttagattatctgtttggtctgctttatgtctgggtgcaatgctctctgatttctggacggagtggtaccgcaatccaaacagactttaatgtttgggtgcttcaggtcataatcaaccatctaatttactttgcaaatgaatgtttcaaactggactgctcaagcctaccaagtttaatggtccttcctagtattgaatccttttgagtctagcccgtttcctcatttgaattttcactgttagtgtg

SEQ ID NO: 58896 - DNA, 2364 bp, Zea Mays
cggctttctacgcggtccggatcctcgccgtcctaacaacttccggcggcgtgagtcgtgaccgcggtggtgcgaaagcaccacgaaggaaagcgaagctgcgaagagcggcctgtggcactggcagtgcacgtgtgccgtgtgtgctgcggcgcggcgcacacggcaggcactgcacagccagcgaggcagaagaaacacagggagcgccgcgcccccaccagacctgccctgccacccactccagctcgccgggctcgggcgttccggaagaaacaaggctggaaaatatattttttaaacaattcgaccaaccccaagtccagacccgcagcgcccgccggaggcggagggaaccgagccggcgaccggcagaccgcagagaagaggcctggagccgaccgcagagaagaggccaggagccgaccgcaggcagccgccaccgcaccagaacccgaggtctcgaggcaatcgagcgcacgcgggtcgggggctgcggccatgtcgcgagacgtggccgccggcgtccgccgacgagttcgagcccgtcccgcgcctctgccgcgccgtgctcgcgaactacgacgaggagctctccagccccaagttcgcgccgccggagcacggctacttcgatatcgaccccaagggcatcctcaagcgggctaactacgacgaggtccgcaacgcgtgcccgccgtacctcgtctacgtcgacgaggcgcacaaggagatcatcctcgccgtgcgcggcctcaacctcgtgcgcaacgccgactacaaggtgctcatggacaacaagctcgggatgcagatgttcgacggcggctacgtgcaccacggcctgctcaaggccgccaagttcatcctggagcgggagacggagacgctgaggaacctgctgcgccgttacgggcccgagtacaagctcatcctcaccggccactcgctcggctccggcatcgccgcgctcatgaccgtgctggtggtcaacaaccgcaaggagttcgacaacatacccaggagccgagtcaagtgctacgccctcgcgcccgccaggtgtatgtcgctcaacctcgccgtcaagtacgctgacgtcatcaactccgtcgtgctccaggacgactttttgccaagaacaccgactccgctagagtacatttttggttctatcttctgtttggacagcttgccctgcatgctatttctcatctgcttgagagatacatttaaacaagacaagagaaaatttaaagatccaagaagactgtatgcacctgggcgaatgtatcatatcgttgagaggaaattttgcagatgtggaagattcccacctgaggttagaactgcaattccagtggaagggcgctttgagcatgttgtgttatcatgcagtaccacttctgatcatggcatttattggattgaacgagaatcacaaaaggctttagagctaatgataaacagcaagaaggaaacgactccaccttcgcagcaaaagatggagagattgcaaagttttgaggaggaacacaagaatgctctccagagagcaaagaccctggatgttcctcatgctgcggacctgtctgaagaggagattcaggaggaggatagcactgcaccaccctctgatactcatagcgaaacaaccacggaaacaaaatctggaggtagaacgagttgggacgaactgatggagaagcttttcaccagggatgaagatgggagacttgtcgtgaacaaggacgcgatggcgagggaaattgttgtcctgtaacgagtgccgagactgctctgtccgtggtagtttattctattagcgagctgtataaaagagtaagctgcggttgtgatatatttaaaactgtattcaacagcttatctatacccatattcatattcaaagtacactctacaaacagtgtaatatacattacactgtaaaacagtgtttttttgaccatatgggtgaactggtatatattgcacccatatagtcacccaaaatactgttttacaccattttgcaatgtacattacacgtttgtagaatatagtttgaatatgtatatgagtatgaataagttgttggagatagtaggactagtttggaaagtggaaacttaaatctcttcgggattctcgaggattagagagaaaattaatctcaatcttcagaaatttcgaagaggatttaagtttttaaactagtccttagtgtttaaactgtcttttttagatcaaggtctatctggtagacaattacacactttaaatagtacaaagcccgtgttttatgatggcacatagatgtgacgtcacatattgttggggacttgttctcaaatgctaggagttaag

SEQ ID NO: 58897 - DNA, 2391 bp, Zea Mays
atcctcgccgtcctaacaacttccggcggcgtgagtcgtgaccgcggtggtgcgaaagcaccacgaaggaaagcgaagctgcgaagagcggcctgtggcactggcagtgcacgtgtgccgtgtgtgctgcggcgcggcgcacacggcaggcactgcacagccagcgaggcagaagaaacacagggagcgccgcgcccccaccagacctgccctgccacccactccagctcgccgggctcgggcgttccggaagaaacaaggctggaaaatatattttttaaacaattcgaccaaccccaagtccagacccgcagcgcccgccggaggcggagggaaccgagccggcgaccggcagaccgcagagaagaggcctggagccgaccgcagagaagaggccaggagccgaccgcaggcagccgccaccgcaccagaacccgaggtctcgaggcaatcgagcgcacgcgggtcgggggctgcggccatgtcggtgagttgcgggctcgagtgggtggtgtgccttggctgcacgcggtgggcgtggaagcggctcacctacatcggcgcctacgacagcgagacgtggccgccggcgtccgccgacgagttcgagcccgtcccgcgcctctgccgcgccgtgctcgcgaactacgacgaggagctctccagccccaagttcgcgccgccggagcacggctacttcgatatcgaccccaagggcatcctcaagcgggctaactacgacgaggtccgcaacgcgtgcccgccgtacctcgtctacgtcgacgaggcgcacaaggagatcatcctcgccgtgcgcggcctcaacctcgtgcgcaacgccgactacaagatgttcgacggcggctacgtgcaccacggcctgctcaaggccgccaagttcatcctggagcgggagacggagacgctgaggaacctgctgcgccgttacgggcccgagtacaagctcatcctcaccggccactcgctcggctccggcatcgccgcgctcatgaccgtgctggtggtcaacaaccgcaaggagttcgacaacatacccaggagccgagtcaagtgctacgccctcgcgcccgccaggtgtatgtcgctcaacctcgccgtcaagtacgctgacgtcatcaactccgtcgtgctccaggacgactttttgccaagaacaccgactccgctagagtacatttttggttctatcttctgcttgccctgcatgctatttctcatctgcttgagagatacatttaaacaagacaagagaaaatttaaagatccaagaagactgtatgcacctgggcgaatgtatcatatcgttgagaggaaattttgcagatgtggaagattcccacctgaggttagaactgcaattccagtggaagggcgctttgagcatgttgtgttatcatgcagtaccacttctgatcatggcatttattggattgaacgagaatcacaaaaggctttagagctaatgataaacagcaagaaggaaacgactccaccttcgcagcaaaagatggagagattgcaaagttttgaggaggaacacaagaatgctctccagagagcaaagaccctggatgttcctcatgctgcggacctgtctgaagaggagattcaggaggaggatagcactgcaccaccctctgatactcatagcgaaacaaccacggaaacaaaatctggaggtagaacgagttgggacgaactgatggagaagcttttcaccagggatgaagatgggagacttgtcgtgaacaaggacgcgatggcgagggaaattgttgtcctgtaacgagtgccgagactgctctgtccgtggtagtttattctattagcgagctgtataaaagagtaagctgcggttgtgatatatttaaaactgtattcaacagcttatctatacccatattcatattcaaagtacactctacaaacagtgtaatatacattacactgtaaaacagtgtttttttgaccatatgggtgaactggtatatattgcacccatatagtcacccaaaatactgttttacaccattttgcaatgtacattacacgtttgtagaatatagtttgaatatgtatatgagtatgaataagttgttggagatagtaggactagtttggaaagtggaaacttaaatctcttcgggattctcgaggattagagagaaaattaatctcaatcttcagaaatttcgaagaggatttaagtttttaaactagtccttagtgtttaaactgtcttttttagatcaaggtctatctggtagacaattacacactttaaatagtacaaagcccgtgttttatgatggcacatagatgtgacgtcacatattgttggggacttgttctcaaatgctaggagttaag

SEQ ID NO: 58898 - DNA, 2397 bp, Zea Mays
ctcgccgtcctaacaacttccggcggcgtgagtcgtgaccgcggtggtgcgaaagcaccacgaaggaaagcgaagctgcgaagagcggcctgtggcactggcagtgcacgtgtgccgtgtgtgctgcggcgcggcgcacacggcaggcactgcacagccagcgaggcagaagaaacacagggagcgccgcgcccccaccagacctgccctgccacccactccagctcgccgggctcgggcgttccggaagaaacaaggctggaaaatatattttttaaacaattcgaccaaccccaagtccagacccgcagcgcccgccggaggcggagggaaccgagccggcgaccggcagaccgcagagaagaggcctggagccgaccgcagagaagaggccaggagccgaccgcaggcagccgccaccgcaccagaacccgaggtctcgaggcaatcgagcgcacgcgggtcgggggctgcggccatgtcggtgagttgcgggctcgagtgggtggtgtgccttggctgcacgcggtgggcgtggaagcggctcacctacatcggcgcctacgacagcgagacgtggccgccggcgtccgccgacgagttcgagcccgtcccgcgcctctgccgcgccgtgctcgcgaactacgacgaggagctctccagccccaagttcgcgccgccggagcacggctacttcgatatcgaccccaagggcatcctcaagcgggctaactacgacgaggtccgcaacgcgtgcccgccgtacctcgtctacgtcgacgaggcgcacaaggagatcatcctcgccgtgcgcggcctcaacctcgtgcgcaacgccgactacaagatgttcgacggcggctacgtgcaccacggcctgctcaaggccgccaagttcatcctggagcgggagacggagacgctgaggaacctgctgcgccgttacgggcccgagtacaagctcatcctcaccggccactcgctcggctccggcatcgccgcgctcatgaccgtgctggtggtcaacaaccgcaaggagttcgacaacatacccaggagccgagtcaagtgctacgccctcgcgcccgccaggtgtatgtcgctcaacctcgccgtcaagtacgctgacgtcatcaactccgtcgtgctccaggacgactttttgccaagaacaccgactccgctagagtacatttttggttctatcttctgtttggacagcttgccctgcatgctatttctcatctgcttgagagatacatttaaacaagacaagagaaaatttaaagatccaagaagactgtatgcacctgggcgaatgtatcatatcgttgagaggaaattttgcagatgtggaagattcccacctgaggttagaactgcaattccagtggaagggcgctttgagcatgttgtgttatcatgcagtaccacttctgatcatggcatttattggattgaacgagaatcacaaaaggctttagagctaatgataaacagcaagaaggaaacgactccaccttcgcagcaaaagatggagagattgcaaagttttgaggaggaacacaagaatgctctccagagagcaaagaccctggatgttcctcatgctgcggacctgtctgaagaggagattcaggaggaggatagcactgcaccaccctctgatactcatagcgaaacaaccacggaaacaaaatctggaggtagaacgagttgggacgaactgatggagaagcttttcaccagggatgaagatgggagacttgtcgtgaacaaggacgcgatggcgagggaaattgttgtcctgtaacgagtgccgagactgctctgtccgtggtagtttattctattagcgagctgtataaaagagtaagctgcggttgtgatatatttaaaactgtattcaacagcttatctatacccatattcatattcaaagtacactctacaaacagtgtaatatacattacactgtaaaacagtgtttttttgaccatatgggtgaactggtatatattgcacccatatagtcacccaaaatactgttttacaccattttgcaatgtacattacacgtttgtagaatatagtttgaatatgtatatgagtatgaataagttgttggagatagtaggactagtttggaaagtggaaacttaaatctcttcgggattctcgaggattagagagaaaattaatctcaatcttcagaaatttcgaagaggatttaagtttttaaactagtccttagtgtttaaactgtcttttttagatcaaggtctatctggtagacaattacacactttaaatagtacaaagcccgtgttttatgatggcacatagatgtgacgtcacatattgttggggacttgttctcaaatgctaggagttaag

SEQ ID NO: 58899 - DNA, 2288 bp, Zea Mays
acacggcaggcactgcacagccagcgaggcagaagaaacacagggagcgccgcgcccccaccagacctgccctgccacccactccagctcgccgggctcgggcgttccggaagaaacaaggctggaaaatatattttttaaacaattcgaccaaccccaagtccagacccgcagcgcccgccggaggcggagggaaccgagccggcgaccggcagaccgcagagaagaggcctggagccgaccgcagagaagaggccaggagccgaccgcaggcagccgccaccgcaccagaacccgaggtctcgaggcaatcgagcgcacgcgggtcgggggctgcggccatgtcggtgagttgcgggctcgagtgggtggtgtgccttggctgcacgcggtgggcgtggaagcggctcacctacatcggcgcctacgacagcgagacgtggccgccggcgtccgccgacgagttcgagcccgtcccgcgcctctgccgcgccgtgctcgcgaactacgacgaggagctctccagccccaagttcgcgccgccggagcacggctacttcgatatcgaccccaagggcatcctcaagcgggctaactacgacgaggtccgcaacgcgtgcccgccgtacctcgtctacgtcgacgaggcgcacaaggagatcatcctcgccgtgcgcggcctcaacctcgtgcgcaacgccgactacaaggtgctcatggacaacaagctcgggatgcagatgttcgacggcggctacgtgcaccacggcctgctcaaggccgccaagttcatcctggagcgggagacggagacgctgaggaacctgctgcgccgttacgggcccgagtacaagctcatcctcaccggccactcgctcggctccggcatcgccgcgctcatgaccgtgctggtggtcaacaaccgcaaggagttcgacaacatacccaggagccgagtcaagtgctacgccctcgcgcccgccaggtgtatgtcgctcaacctcgccgtcaagtacgctgacgtcatcaactccgtcgtgctccaggaaaaagaacaactgcatgtatgatcgagtttttcaccatgcctttatgctttggagtttggacagcttgccctgcatgctatttctcatctgcttgagagatacatttaaacaagacaagagaaaatttaaagatccaagaagactgtatgcacctgggcgaatgtatcatatcgttgagaggaaattttgcagatgtggaagattcccacctgaggttagaactgcaattccagtggaagggcgctttgagcatgttgtgttatcatgcagtaccacttctgatcatggcatttattggattgaacgagaatcacaaaaggctttagagctaatgataaacagcaagaaggaaacgactccaccttcgcagcaaaagatggagagattgcaaagttttgaggaggaacacaagaatgctctccagagagcaaagaccctggatgttcctcatgctgcggacctgtctgaagaggagattcaggaggaggatagcactgcaccaccctctgatactcatagcgaaacaaccacggaaacaaaatctggaggtagaacgagttgggacgaactgatggagaagcttttcaccagggatgaagatgggagacttgtcgtgaacaaggacgcgatggcgagggaaattgttgtcctgtaacgagtgccgagactgctctgtccgtggtagtttattctattagcgagctgtataaaagagtaagctgcggttgtgatatatttaaaactgtattcaacagcttatctatacccatattcatattcaaagtacactctacaaacagtgtaatatacattacactgtaaaacagtgtttttttgaccatatgggtgaactggtatatattgcacccatatagtcacccaaaatactgttttacaccattttgcaatgtacattacacgtttgtagaatatagtttgaatatgtatatgagtatgaataagttgttggagatagtaggactagtttggaaagtggaaacttaaatctcttcgggattctcgaggattagagagaaaattaatctcaatcttcagaaatttcgaagaggatttaagtttttaaactagtccttagtgtttaaactgtcttttttagatcaaggtctatctggtagacaattacacactttaaatagtacaaagcccgtgttttatgatggcacatagatgtgacgtcacatattgttggggacttgttctcaaatgctaggagttaag

SEQ ID NO: 58900 - DNA, 3602 bp, Zea Mays
cccgttcctcgccaccactaccctccgccggggcttctcttccccatcccacacaccgcactccacccctgcaacaacactcttctatatcccaccgcaaacaccccgccccgacggcgggcggtgccgcaaccctaggtttacccctcccctcccgccgctgtatgcagccctccaccgatcgccgccgcgggggtggacccgtggtcaccgcctcccatgtgtggcgaccccgccccgccgcctctgcccccggctcgatcctgcccctccctacctcggcctcggcttcggcctcggaggcacgcccgccccgccgccgcccacgccgccctaatcacggtaacagccacaatcaccgccctgccgcgcctcaggagcagaacgacaacgcaggacaccgtcgccggggcccaccgccggagagtccgactcccgcgccgcctgctcgtttctgtgatcgcgcacccgcgcctgcagcggcgtcgactcggggagatggggcggtgccgcagctggtgcaggagatccaggacaagctctcccgcggcgcggtggagtgcatgatctgctacgaaatggtgcggcggtcggcggccatctggtcctgcggcagctgcttctccatattccacctcccctgcatccggaagtgggtgcgctacccggcctccgctgcggatgcatcccgagcagcagagccggcctccccttcctggcgctgcccggggtgtcagttcgtgtacgccaccccggcccgcgagctcacctacagctgcttctgtgggcgccggagagatccccccaacgaccatttcctcacaccccactcctgcggcgagccctgctccaagcctctcgagagagcggaaccgcctggcgccaagggggaggatgttgacgccaccaggtgtccgcacgtctgcgtccttcagtgccacccgggcccgtgcccgccatgcaaagcatttgctccggatcgaccctgcccctgcgggaagcagatcatcgtgcggcgctgtgcggacaggagcacgcctgtgacctgtggccgcccttgtgaacagatgctgccttgcaaaaggcatcgctgcgagaaggtttgccacactggttcttgcggggattgcgctgttctcatctctgtgcgttgcttctgccggaataagaatgagacattgctatgtggagacttgatggaaaagggggagctgtctgaggaggacggggtgttttcttgcaatgaggtatgtggccgcacgcttgcctgtggcaaccatgcttgcaaggatatgtgccacccagggccttgtggggagtgtgagctcatgccgtggaaggtcagtacatgtcattgcggcaagaccaggctgctggagaggagggcgagctgcttggacacaatccccacctgtgataagatatgcgataagaaactgccatgtggggtgcacaagtgcaaggtcaattgccatgagggagaatgcccaccttgtttggtgctcgttgagcagaagtgccgttgtggctcatcaggtcagatggtggagtgtcacaagttctcaatggaagagtttcgctgcaagaagccttgtggcctcaagaagaactgtgggagacatcggtgcagtgagatctgttgtccactgtctaggaaagttgcacaccttgaaggtggcaactgggatcctcatctctgccagatatcatgtggcaagaagctccgatgtgggcagcatgcatgccagctactctgccacagtggtcattgcccaccctgcttggagactatattcactgatctcacttgtgcctgtggcagaacttctctcctgccacctctgccttgtggaacaccaacaccatcttgtccacatcagtgctcagtgccccagccttgtggacatcctgcctcacattcatgccattttggggactgtccgccttgtattgtgccggtgatgagagaatgcattggaggacatgtgatgctgaggaatatcccttgcggatcgaaggatatcaggtgcaaccaaccatgtgggaaaaatcgccaatgtggaatccatgcttgcaacaggccttgccaccctcccccttgtgatcagacacctgcaaatggagatgctagctcaagctctggcggcaaagctgcttgtggacaagtatgcggtgccgcgaggagggaatgcaagcatacatgtactgccccatgccacccatcgtccccatgcccagatttgagatgtgaatttgctgtgactattacctgctcttgtggccgaatcactgcaactgttccctgtggtgctggtggatcctccatgggtgataatatgtttgaagtctccatcatacagaagctgtcaatgcctctccaatcagtggaatcaaatgggagggtgcctcttgggcagaggaagctttgttgtgatgaggagtgtgcaaagatggagaagaagagggtccttgctgaagcatttgacatcactccacccaatttggatgcattgcattttggtgagaattcaagttcatcagatttggtttctgacttgttccggcgtgagccaaagtgggtgctggccatagaagagaggtgtaagtttcttgtacttggcaaggtgagaggcagttcttcaagcaatgtgaaactgcatgtcttttgccccatgatgaaggacaagagagatgctatcaggcaaatcgcagggcggtggaagctttctgttcagtcggctggttgggagcctaagcgttttgttactatccatgccacacccaaatcaaaaccacctgctcgcatcctgggatccaaggcaggtgtacctgttacagctgcccatccttactttgatccacttgttgacatggatccgaggctggtcgttgccatgcttgacctgccacgtgatgctggtgtcagtgctctagtcctaaggtttggcggggaatgtgaattggtctggctgaatgacaagaatgccatagctgtattcaatgatccagctagagcagcaacagcgctgaggaggctggattatgggtctgcttaccagggcgctgcgatgtttatgccaagcagcgctcaggcatctttttcaagcaatgtttggattggagagcagaaggatggggggatcactgctaggaacaatccgtggaagaagcctgcttctgctgctgagcctgatccgccctctggagactggactggtgttgctggccatgctccagcaccaggatggagaggcgtcaacaccgcctctcaagtcatggggaccacaaaccgatggaatgttctggaatcagacgctgctgcaagctctggtccaggcaacgagcggaagcctgctccgcgcatggatactgcatacagcgcaataccaaacgttgggaatgctgggccatcgatgaccaagctgcagcctgacgcagaggtggaccactgggaagaagcttgtgaatgaggtactaagaacggagccaaatgatctgcacacacctagggaggcacatcgtccatcgatgagggcgcacggggtgcttctatagtgtgtttggtttgtggagtcacattgatgaggatgcacggggtgttt

SEQ ID NO: 58901 - DNA, 2357 bp, Zea Mays
cgcaccaccaccactgctggccaaacaaccaccacgttaccaggcagcgaccagcgaggctggcaggcactcgcattttcgcacaggcgaggcgaggcgaggcaccgacgcccaaaaataactaggcgtccccacaaaccgctcaaccttccctccctctcccctcttcatcgctccgctgcgctggccacgagatccacgccgcctcctctccggcgccccgccctcgcctctggtgggccacgctgccctcctcgcgacctccgcgcggctgcgaacgaccgacgaccgccggtttcgctgagcactgcgcaggaggcacgaggaggtggattccccgacaggcgcggtgccggcctgagtgacagggcggccgggcgccggtgacctgctcggcttcgccaaatttgcgggcggcgtcttgcgccgtgctgctgtcgctggaggcgtggagcaagggagcccggaggagggggaggccttgctcgcagccgcattggccggtaatactatctccgaccgaggaggcaggcggccgatttagtagttccctccccgctccggacgcgccgggcgccctaggtgcctctcgcccccgcttggtccatggtccatggggtggaaggttaagtcgtcgccggcggcggcgcccggcgacaagctcaggttccctccctcctccgccgcgcggtcgcggatgaagctctggctggtgcccgccaccaccacggtgctgctctggacctgcgtcctgcagctcaccgccgtcggggacacctggggcccacgtgtgctcaagggctggccctcctgcctcacgccgcacgaggaggcttccgccgcgcgcccgcaccctctcgccgtcgacaaggccgcgctcgcgctgccgcccaaaagaatatataggaacaatggttacttgatggtttcgtgcaatggtgggcttaaccaaatgcgagctgcaatatgtgacatggttgtaattgcaagatatttgaatgtgactttagtcgtgccagagttggataaaacttcattttggaacgatccaagtgagttccaagatatatttgatgttgagcactttataacctcattacgaggtgaagttcgcattctgagagaattacctccaagggtaaagagaagagttgaacttggaatgtttcactccatgcctccaattagttggtctgatatctcctactatcaaaatcagattcttcctttgattcgtaagtacaaggttctccatttgaatagaactgatgctaggctagcaaacaatggtttaccaatagaaattcagaaacttcgatgccgagtaaattatgcctccctcaaatttaccccacaaattgaagagttgggcaagagagtaattagaattcttcgccaaaatggacctttcttggtacttcatttacggtatgaaatggatatgttggctttctctggctgtacacaaggttgcagtactgaagaggcagaagaactcacaagaatgaggtatgcttatccatggtggaaagaaaaagtgattgactcagacttgaaaagaaaagatggcctttgcccattgacgcctgaggagactgctcttgtcctcagagcacttgacatcgatagaagtatgcaaatatacattgctgctggggaaatatacggtggaaagcgcaggatggcttctctaacttcagcatacccgaatgttgtgaggaaggagacacttctggaaccttctgatctgatgttcttccagaaccattcatcacaaatggcagcacttgattacttagtatccttagaaagtgatatatttgttccaacatatgatggaaacatggctaaagtcgttgagggtcatcggagattcatgggttacaagaagaccgtcttgttagaccgaaaactcattgttgagctagtggaccggtacacaaatggttctctgctgtgggatgagttctcttcactgatcaaggttgcccatgcaaagcggatgggatcagcttcaaagaggatggtgattcctgacagacccaaggaagaggactatttctatgccaatccccaagaatgcctccaggatcgtgattttttgcaaacatcataataatctgagttcgtgatctacgggccaaagcattggtgaaagtgtttctgtcggtactgatgatttcttcatgtgggctgggcaaaaacaacgcagagcgttttatcagtttgcatgtgtccgttggcattgtgccaatgccaacgtacttttatttcaccattggcagctttgtcagctgttcagttatcacttgtcaattgtcgtagtgacacaatgccaatataaaagtacttttatg

SEQ ID NO: 58902 - DNA, 2346 bp, Zea Mays
caccactgctggccaaacaaccaccacgttaccaggcagcgaccagcgaggctggcaggcactcgcattttcgcacaggcgaggcgaggcgaggcaccgacgcccaaaaataactaggcgtccccacaaaccgctcaaccttccctccctctcccctcttcatcgctccgctgcgctggccacgagatccacgccgcctcctctccggcgccccgccctcgcctctggtgggccacgctgccctcctcgcgacctccgcgcggctgcgaacgaccgacgaccgccggtttcgctgagcactgcgcaggaggcacgaggaggtggattccccgacaggcgcggtgccggcctgagtgacagggcggccgggcgccggtgacctgctcggcttcgccaaatttgcgggcggcgtcttgcgccgtgctgctgtcgctggaggcgtggagcaagggagcccggaggagggggaggccttgctcgcagccgcattggccggtaatactatctccgaccgaggaggcaggcggccgatttagtagttccctccccgctccggacgcgccgggcgccctaggtgcctctcgcccccgcttggtccatggtccatggggtggaaggttaagtcgtcgccggcggcggcgcccggcgacaagctcaggttccctccctcctccgccgcgcggtcgcggatgaagctctggctggtgcccgccaccaccacggtgctgctctggacctgcgtcctgcagctcaccgccgtcggggacacctggggcccacgtgtgctcaagggctggccctcctgcctcacgccgcacgaggaggcttccgccgcgcgcccgcaccctctcgccgtcgacaaggccgcgctcgcgctgccgcccaaaagaatatataggaacaatggttacttgatggtttcgtgcaatggtgggcttaaccaaatgcgagctgcaatatgtgacatggttgtaattgcaagatatttgaatgtgactttagtcgtgccagagttggataaaacttcattttggaacgatccaagtgagttccaagatatatttgatgttgagcactttataacctcattacgaggtgaagttcgcattctgagagaattacctccaagggtaaagagaagagttgaacttggaatgtttcactccatgcctccaattagttggtctgatatctcctactatcaaaatcagattcttcctttgattcgtaagtacaaggttctccatttgaatagaactgatgctaggctagcaaacaatggtttaccaatagaaattcagaaacttcgatgccgagtaaattatgcctccctcaaatttaccccacaaattgaagagttgggcaagagagtaattagaattcttcgccaaaatggacctttcttggtacttcatttacggtatgaaatggatatgttggctttctctggctgtacacaaggttgcagtactgaagaggcagaagaactcacaagaatgaggtatgcttatccatggtggaaagaaaaagtgattgactcagacttgaaaagaaaagatggcctttgcccattgacgcctgaggagactgctcttgtcctcagagcacttgacatcgatagaagtatgcaaatatacattgctgctggggaaatatacggtggaaagcgcaggatggcttctctaacttcagcatacccgaatgttgtgaggaaggagacacttctggaaccttctgatctgatgttcttccagaaccattcatcacaaatggcagcacttgattacttagtatccttagaaagtgatatatttgttccaacatatgatggaaacatggctaaagtcgttgagggtcatcggagattcatgggttacaagaagaccgtcttgttagaccgaaaactcattgttgagctagtggaccggtacacaaatggttctctgctgtgggatgagttctcttcactgatcaaggttgcccatgcaaagcggatgggatcagcttcaaagaggatggtgattcctgacagacccaaggaagaggactatttctatgccaatccccaagaatgcctccaggatcgtgattttttgcaaacatcataatctgagttcgtgatctacgggccaaagcattggtgaaagtgtttctgtcggtactgatgatttcttcatgtgggctgggcaaaaacaacgcagagcgttttatcagtttgcatgtgtccgttggcattgtgccaatgccaacgtacttttatttcaccattggcagctttgtcagctgttcagttatcacttgtcaattgtcgtagtgacacaatgccaatataaaagtacttttatg

SEQ ID NO: 58903 - DNA, 2082 bp, Zea Mays
ctcagattggcaagccccgcgtaatgcagaacgtcacgcggatttcgttctgtgctaatgtcacctgaatatataggaacaatggttacttgatggtttcgtgcaatggtgggcttaaccaaatgcgagctgcaatatgtgacatggttgtaattgcaagatatttgaatgtgactttagtcgtgccagagttggataaaacttcattttggaacgatccaagtgagttccaagatatatttgatgttgagcactttataacctcattacgaggtgaagttcgcattctgagagaattacctccaagggtaaagagaagagttgaacttggaatgtttcactccatgcctccaattagttggtctgatatctcctactatcaaaatcagattcttcctttgattcgtaagtacaaggttctccatttgaatagaactgatgctaggctagcaaacaatggtttaccaatagaaattcagaaacttcgatgccgagtaaattatgcctccctcaaatttaccccacaaattgaagagttgggcaagagagtaattagaattcttcgccaaaatggacctttcttggtacttcatttacggtatgaaatggatatgttggctttctctggctgtacacaaggttgcagtactgaagaggcagaagaactcacaagaatgaggtatgcttatccatggtggaaagaaaaagtgattgactcagacttgaaaagaaaagatggcctttgcccattgacgcctgaggagactgctcttgtcctcagagcacttgacatcgatagaagtatgcaaatatacattgctgctggggaaatatacggtggaaagcgcaggatggcttctctaacttcagcatacccgaatgttgtgaggaaggagacacttctggaaccttctgatctgatgttcttccagaaccattcatcacaaatggcagcacttgattacttagtatccttagaaagtgatatatttgttccaacatatgatggaaacatggctaaagtcgttgagggtcatcggagattcatgggttacaagaagaccgtcttgttagaccgaaaactcattgttgagctagtggaccggtacacaaatggttctctgctgtgggatgagttctcttcactgatcaaggttgcccatgcaaagcggatgggatcagcttcaaagaggatggtgattcctgacagacccaaggaagaggactatttctatgccaatccccaagaatgcctccaggatcgtgattttttgcaaacatcataatatcctttcatgtctatataccatgttcacattataccattcttctgcaaacaacacaactgaacccaaaagcaatattttggagccagaaaggcgactcggcttctgtcgagtcatagatgaggccgatctgtaaacttgagggagggagggagggaaggagaaaggctgaaagggggtgggtgggggtggatttagttggtaaatacacattatagaatggagggggatttgttcattccaaaataaaaaaaagagagatgggcttgtatagatggtgatagaattaccgctaagaagaatgtaacttagatgcagctgggtctgggttcctgcatctggtcttgcgttgtgtaacatagcagttgttcttggacagccgcccccattgtccccaccggcgaaattttggcaaccatgtagaaagatgtatacactttttattgtatcgatacaacctgtattatatatgtaaattgtgcagaatgtttgtaccacttgcacattttataatgtggttagtacattgaattccttcacggagggtgcttgttgacatctgagttcgtgatctacgggccaaagcattggtgaaagtgtttctgtcggtactgatgatttcttcatgtgggctgggcaaaaacaacgcagagcgttttatcagtttgcatgtgtccgttggcattgtgccaatgccaacgtacttttatttcaccattggcagctttgtcagctgttcagttatcacttgtcaattgtcgtagtgacacaatgccaatataaaagtacttttatg

SEQ ID NO: 58904 - DNA, 1558 bp, Zea Mays
aaacatctcttttttgttccagcaagcctcctcgcatcttatagaaaacagaagaaaaccaagcatctctatttgttccatcgtccgaacccaatgcctcgaaaagccttaaaccccgaccacagcctgtccgagtcacccgaccgttttccatcttcactcccaaccgtttcattcccacctaacttactttttccgatttcgactcgattcgtcattccaaacaggacaccgaatgcacgatcgatcccacaagccgcagccgccggaggctggcgagggcgccggcggcgggaacgtggatcgagtgctcttcaagaacctcgtcgagatggtgccgctcgtcgagtcgctcatggaccggagggtcaactcggcctactcgcgacgcacttcgctagtctacacgccggcgccgcccaagaaggcgagcgaattggaaagtgtcaaattgccacagagcgtatcggccaaaaagcggagagaccctggcgatgtatccaagaagagcacccctgattctaacggcgacaacggcttggttgtgccattgtctctatcgggtgctgaaaataagcccaaggatgatgttgctgggctgcgcgagcaggtcgattacctgcaaaagaaactgctcgagaaggaggaggcgctgaggtccgcggagagcctcgtgactgagatgaacgcggcatatgcaaccatcgatgaactccgacgcctggtgtctgacaaagaagctttgatcagatctaccaattctcagttgcatgatgcaaagattatgcttgcagacaagcaagcatctgtagagaaactggaatgggaggtaaagatgtcaaataaaaaggtcgaagatcttcaaggagatgtgtcaaatatgggattcgagataagctcgttgatggcatttttcgataaaatttcagagaatctttcagagtgaaattgacaagatcgaggtcgacaaaatagagcaggagaggattacctatggtgaagctctcgcggcagcgagagagaaccctgacgaggagcacttgaatatagctgccgaggcaaggtcaaggctgcaggtccttgtactatagtggtggcccccttctaattctagtgtatgtatgataatgttgaactgctgatgtaattttaccttgttggcttgagttgaggcgcttgtgaaatcgttccaggggtaatggaacgagcactgtatcttttttttttcctgaggtctgcattttttatcatgaagcttgagctatagttagattttttgtgacggttatcatctcaagatttaaacctatggttggaactgcttatgtaaattgttcttgagcctaaggtataggcaatagctttttaacagtgtataatggggtctgtttggtatagttttgaagctacgtatgggcatggctaaagtaagctgaaattagaagtcaatctctaggtttcttttgtagtttttttccaaccacgtttctcaccacgactttcatttagaaacgtagaaattggatcagactagcttagttttccatttatactaaag

SEQ ID NO: 58905 - DNA, 1244 bp, Zea Mays
ccctctttcagattagaccacctcacaacgacagtttccctagatcttgtaagcatctcagctttcacatattttgtagcctactgttgaggaatggcagctgagtcttcagtgcgagcgaattggaaagtgtcaaattgccacagagcgtatcggccaaaaagcggagagaccctggcgatgtatccaagaagagcacccctgattctaacggcgacaacggcttggttgtgccattgtctctatcgggtgctgaaaataagcccaaggatgatgttgctgggctgcgcgagcaggtcgattacctgcaaaagaaactgctcgagaaggaggaggcgctgaggtccgcggagagcctcgtgactgagatgaacgcggcatatgcaaccatcgatgaactccgacgcctggtgtctgacaaagaagctttgatcagatctaccaattctcagttgcatgatgcaaagattatgcttgcagacaagcaagcatctgtagagaaactggaatgggaggtaaagatgtcaaataaaaaggtcgaagatcttcaaggagatgtgtcaaatatgggattcgagataagctcgttgatggcatttttcgataaaatttcagagaatctttcagagtgaaattgacaagatcgaggtcgacaaaatagagcaggagaggattacctatggtgaagctctcgcggcagcgagagagaaccctgacgaggagcacttgaatatagctgccgaggcaaggtcaaggctgcaggtccttgtactatagtggtggcccccttctaattctagtgtatgtatgataatgttgaactgctgatgtaattttaccttgttggcttgagttgaggcgcttgtgaaatcgttccaggggtaatggaacgagcactgtatcttttttttttcctgaggtctgcattttttatcatgaagcttgagctatagttagattttttgtgacggttatcatctcaagatttaaacctatggttggaactgcttatgtaaattgttcttgagcctaaggtataggcaatagctttttaacagtgtataatggggtctgtttggtatagttttgaagctacgtatgggcatggctaaagtaagctgaaattagaagtcaatctctaggtttcttttgtagtttttttccaaccacgtttctcaccacgactttcatttagaaacgtagaaattggatcagactagcttagttttccatttatactaaag

SEQ ID NO: 58906 - DNA, 2511 bp, Zea Mays
ctgccaatctacctcagacaacaaagctcccaccatgctctgttccacctctgctcctcgtgttcgcaaaccctgctcgcattaaaccataatacgcgagccccacggcttctctcatgaccccgatctcctttcctgcccaccacaaccgatggccgccgctcacctccggttattgccgctcttgctgctaacgctgacagcggcggccaagaacgtcaccctcgactctgccatactatccttcgcggacctcacgctgctgggggactccttcctccgcaacggctccgtctggctcacccgggataccgacgtgccctcctccagcgccggcaccgtgctctgcacccagcccgtcgcgttccggggccccgacgccacggcctccaatgccaccgccgccgtcgcatcgttcgcggccaggttctccttcgtcatcgccaaccccaacgcgggcgccgcggggggcgacggcatcgcgttcttcatctcccccgaccgcaccacgctcggcgccaccggcggctacctcggcctcttcaactcctccaactccgccgcagccaagaacggctccgcgtccgccaccattgtcgccgtcgagttcgacaccatggccaacccggagttcgccgaccccagcgacaaccacgtcggcctggacctcggctcgccggtctccgtcaccgcggccgacctcgccgcatctggggtcgacctcaagagcggcaacgtcacgacggcgtggatcgactaccgcagcgcggaccgccgcctggaggtgttcctgagcagctacgccgtggccgccaagccgaagcggccggtcctctccgtcgctgtcgacctctcgccgtacatcaaggaggccatgtacgtcggcttctcggcgtccacagaggggagcacgcagcagcacaccatcaaagggtggaccttccagacgttcggcttcccgcccacggccaactcaacctttgaatccaatgccaccagcaactcttcagagccggccgcgccagcgccaccgccagcctccaacgcccccaacagccacaagaggagggtcgggatcgcgcttggaatcctcggccccgttgcgcttgccctcgccttcatcttcttcgcctgggtctccatcaagaagctcatagaactcacctcccggaccgacgccgctttctcgaccgagctggtcaagggcccgaggaagttcagctacagggagctgagcgcggccaccagagggttccacatgagcagggtcgtcggcaagggcgcgttcgggactgtgtacaaggccgccatgccgggagctgccgccaccacctacgccgttaagaggtcgacgcaggcgcaccagagccggagcgagttcgtcgccgagctatccgtcatcgcgtgcctccggcacaagaaccttgtccagcttgaggggtggtgcgaggagaaaggcgagctgctgctggtgtacgagtacatgcccaatggaagcctggacaaggccctctacggcgagccttgcacgttgtcgtggccgcagagatacacggtcgccgccggcatcgcgtcggtgctgtcgtacctccaccaggagtgcgagcagcgcgtcatccaccgggacatcaagaccagcaacatcctgctggacgtcaacctgagcccgcgcctgggcgacttcgggctggccaggctcatggaccacaacaagagccccgtgtccacgctcaccgcggggaccatgggctacctcgcgccggagtaccttcagtccggcaaggccaccgagcagaccgacgtgttcagctacggcgtggtgctcctcgaggtgtgctgcgggaggcggcccatcgacaaggacgagcgcggcgggggcggcaggggcggcgggggcaagaacgtgaacctggtggactgggtgtggcgcctccacggcgaggacaggctcatcgaggccgcggacgcacggttggccggcgagtttgacaaggccgagatgctgctgctgctgctcgtggggctgagctgcgccaatcccaactgtgaggagcgtcccgcgatgcggcgggtggtgcagatcctcaaccgagaggcggagcctgcgcccgtgccgcccaagaaaccactgctggtgttcagctccagcgcgtccgcgaagctgcaggagatcgccttctcctgtggcgatgacgtccgaggcggctactccgttgccaagcctgcatcaccaaagtccgagggagccgacattgaacgctgacgcgaagcagtcgataccaattacactactacagatttgttggtgtgggaatatataggtgcttcagtctggaaagtgctgatgaatgcaaattccatgagtcatctacggtctagagaagctggcattgacgcttgatagcaagcgatcaatgcactgatagtgaattactacttgtgtgattcatatatgcattggccatgtgctcgtgaggggaatatagatttcagagttcagaggaagcgtca

SEQ ID NO: 58907 - DNA, 755 bp, Zea Mays
tggtatattcactttcttctcttccaacaaatccacaagcctctacaaggttgcaaatggaacaaataattaaataatgcacttgaattgccaacagtatatgccattagcatgggaaaatagtaacaggattacagaaggaactaagtttgtaattggtaccttgtaaagaacagatagtgacataagaccatcatcttttgtaatggcagcaagtgcatgaacagagtatttagcctgcctccgtgtaccctctaagcataaacgctctaatagaagatcaagggaactgaaatagaagacacatcaatttagttttgtaaccttagtagttattatcaagacagatcataggatcccaataaacaagatgctcttaagaagatgcaccttgttgaggctaactgttcacgaatagtgccaccagccttcgataacacatgtgcaataccctctttaagcacttcattatcctctttcaggagttcaacaatgtcttcttcaagtccagacaaaagagacggaaagaaactagatattgcctgcacaatgaatggattaagaggttagaagcattaaaaccttactaaccaggttcccagatcgatgggatcgagttacggaaacgttgtacgctactaaaactaagttttaacactatgggaacgagattgttcccaagttcccggaacaaagaatgtggccatgttccacgttcccggtttctaagattaaaacgaccctcttgtgtattg

SEQ ID NO: 58908 - DNA, 755 bp, Zea Mays
ctcaagccagctcacgagctacaatctagccaagacgagccacatattggagctcaccaaccgagccttactgagccgagcctggcttggctcggctcatttctagccctaggtctaggcatttcaccagatagaaacagagaatttgacctctccgcacaatcaatggcacaacgactgcccttttgatgtgccaagaaattcgaagctgtcaggcgcactcctcgatggagaagaagttgatagagatccacttcagcaaccaccgcacctgtggcgagcagccgacaagcttcgtctctagtgaggtgtgatctatgctatgaggaagacgaggggagttgcatgggcccaatggtggacgtggtggtatccttcttggtgcttggactcctagtggtggcgctcatcgtgaggtcggcactagcgctgctcgtgcgggctcgttggtgctgctggttcgaggagaagacaccatatttagaggattttctaaagatgtcaaggaagctgcaaaattaatggagagtgcaagaaatcaacaaagcccttaaaaggaggttgctctcacccgaaccagttgcaaggcatgtcttagagtgacattgaaggatggagtgtggtgagttagtgtttttatgatgagcataaccatcccatggtcacctctccttcaaagaaaaaggaacctttagtctcaccaatcaatggaagatgatgataagtaagtcaatgaagatatgcgtgcccaaaat

SEQ ID NO: 58909 - DNA, 3156 bp, Zea Mays
tttcaaatgtggcattggatccaacgccactgtttatgtctacgtacacatcagtctaacattcagtgatacatacaaggccacagcatattgacgatttggcatatagtactgaaatactcctgcaacactacaaatagagcaagtgttcagaatcctcagcgttagggcacccagcgacgatttgcctttgttcgtcgagccctatgggcatggaggttgagctgcagccaggaaacaacggccatgtggctgagagaagcgtggatctgcaggacgaactacggcgacaaggagaccaagtgccaagcggcgctgacgaggcagagctggtgtggaagctgcggaagtacttgatgctgctagcaatcctttctgcaaccatcacctaccaggcagggcttgctccaccgggcggcctctggctagacaataacgacgaccagcagcacggccatcttgccagcgacatcgtcctgcaatccacctatccgaagcggtacaaggtattcttctactgcaactcgacagcgttcatggcgtccctgatcgtcctgatgctgctcctggtaaggaggctcagctgccatgcagtctggctccgctcgctgcacctcgccatgttgctcaacctgctcgggctcatgggcgcctacgccgcaggcagctgcagggagatcagaacgtccctgtacacctgggcgctgctcgccggtgtcttcacgtacgtcgcgcttcacgtcgtgttcttccgccacctagcgtctccatggcttcgacaaaaactcatgggcgtccagaggtcctggaaggacactctcgcacgcgtgttcaggagcgtaaccgacgagccagagggacgacgaaaaagggaagaaccggagcagatgccagatgcttcttgtgtccaggaaaaagaggcggaagagctggagcagaaacgcggcatgctactggtcctcgccacattgtcaacgacggtgacgtacgcagcggggctgaaccctccaggtgggttctggcccggcagcggcgctcgccatctcgccggtgacccggctctcagagaccactaccccagtcgcttcaaggccttcatggcgtgcaacgacacagcttttgccgggtcccttgtcatcctcgtcatgctcctcagcgacacggcaacgggtcgcgctgtcaggtcgaatgcgcttcgcctgtgtgttcttgtcagcctgtttggcctcatggctgcctatgctgcagggagctgcagggaagtccatacctctatatatgtcttcgccctcgtcgctgctgtcctactgtatctcgtcatccagtgggtcgcacccatcctacccaggccacagcttgtcagcgagcgcatagaatggatcaaaggagaaaaggataaactgactctgaagctgaaatcgttcctgagcagcacaaccaaggagcaggagcagccattagctttgggtcaacagcatccatcgtccaatcatgtcttagcaagcactgatcagaatgatgtgagaaagctgcgcacgtaccttctactacttgggatcctagcagccaccgttacataccaagcagggttgaacccccccggcgggttttggctagacaatgaggacgggcatcgtgctggcaaccccatcctggaggccaccagtccgaggcggtacagcacgttcttctactgcaattccaccgcattcgtgtcatctgtggtcatcatcgccctgctccagagcagcttggtcgctgccggtgccatgaaacggtacgcgctgcagacagccatggttttcgatctcttcggtatgatgggggcatacgctgctggcagcagccggaccttctccacgtctttgtacgtgatgatcttggtcttccttgtcttctcttacgtcatggtccacgtcctgctcttagtgtgcacacgacgacgaggctctggcgatgatgatggaccagcagcttttcaggaagtagacggcgacgaccctgaactgaaacatctggagaagcggcgcaagtttctggtgttgcttgctgttctggcagcgtcgagcacgtatcaggctggcataaacccaccgggtggcttctggcccgacgacagcgatgggcaccgagcaggctatccgatgctcaacgatgagttcccacgccgctacgtggtcttcttctacctaaactccaccgctttcatgtcgtccttggccgtgatcatgctgctcgttagcaaaaggctatgccaaagtgggaccaacggctacttgctgcgtggatgcatgctactggatctgctcagtctcatgggcgccttcgcggcaggaagctgcaggagagtatccacctcagtgtacgccatcctggctgttgctgttgtttttgcctacgtcatggctcaacttctggtgctgacctttgcaaaagagaaggttggctacttcttcgagtgggtgctccgtgccactcctttcaagagtccgcatccatccaaggacggcaagcgaagcatcgtggccagccagaaacctgagcataaatggcgaaaagatcttattctgattgggaccttcgcggcgagcgtcacctaccaggctgggctgctcccgccaggagggctttggcctgatgaccgggacggccatttcaccggcgacccgatcctccatgacgccgatccacggcgatacaaggcattcttctactgcaacgccaccgcgttcatggcgtcggtggtcatagtcatcctgctgctcaacagcacaataagcaagtacaggaggtctctcctccccatgaaaacggcaatggtgctggacctgcttgctctgcttggggcttacgctgctggcagctgcaggaaactgaagacttctgtatacgtcttcgcgctcgtcgttgctgttttcatgtacattgtcgttcacatcttgctgtccttcgataaaatggcacgggtcatgaagaggactggagaacagtgggttccatgtctgaagaagatgtgggcactcattgaaattgaacctccaaaccatcagccatcttcagaggaaccatgagaggctgacccttgaccgtatgcttgtattgtgattaaatgaattgttcaattgatatgtacctaagtaccttagaatcaatatt

SEQ ID NO: 58910 - DNA, 2095 bp, Zea Mays
aagaatacttgtagaagaggaatatgcacaattatattaggtcgaagaagccgccactgccggatctggcgcagcgctagggcacaacgtgcgttggcgaggcaggcgagcgtgccgtgggtctgcgtgcccttggagctcctccaggtgacgtagggccatcacgccaattcacagttcgagatccgacgctggagccgccgctccaccagctcatcggcggtagctccgtgcggacagcgacgtcgacgcgtcgtcatctggtggcatggcagcggtggtcctcaccgatggctcagccatccgcaagagcgcaagcatggggacctctccctcgtcttcgcggggtccaccagcgacagcgcgtccccaactgttgggcccgacctcgccgacagcggtgtggggccatgacttcgaacgacatcgtcctccgcgagccatgagcgtaaaaaggatgaaggatgagaggaataggctgaggatgatcatggcacagtacttggtgtggcttcattcttcatgcaagatctgagcaaccttgagtagcaaatcgaggggaagggtacgagcagcttcggcaagcgccggaacaagacgcacacgctctgcatccgctgcagcagccgtagcttccacctccagaagagcacctgctcctcctgcgattacactgccgcccgcatccgcaagtaaggacaagcctccacgtcgatagaagcaaatcaatccatttcgtttgacaagtagaagattatctgtgttcaaccaaatggacataattagtgctgttttgcaaaagcattttggattttccagtctcaaagcattccaaaaggaagtcttggatgcttggtttgctcatgaggattgtgttctcctaacagccataggatcaggaggtaccaaaggaaatgagcaaaacatagcatacagtctcagatgctgcaggatcacatgaaaattattgaagacgacggtccaggtgcagccttctatgccagtgctaaggccatgactaatggaaatcacactttctatgtgagcaaactgatacagaggttggctagattaagtaaatatgatacaatgtatcacatgcacaggtaatggtgaaatccaaaatctgggagagccgacttctattttctgcatgctggatataccataccttttccacctatatatacttcaaaacttgttttttagtgtttcattttgtttttgtgattcccaagggatctgtctcacaacaatctaaatggaccaataccagatttctatgtcaaatgccatcacttacatttctatataagctttcttgttgatcgacctacatactttaatattgctcaaaacccctctttttatgtttacttcctcttattttgtagggacctctcaagcaacaacctcaatggataaggcatattaaatagtaatgctccttccatttcataatgtgtaaggcatattaaatttcttttaagaacgaaactttataaacattgaccatcaaatagtaaataaaatacatgtagattcatatttcacgtggttttgtagtaattgagaatgatttcaagatgaattaatggtgaaagcattccttgaaagacttcttaaatcctaatatgccttgtaaaatgacaatggatggaatagtttacaacatgacaaactgtccacctgaaattaaaaggataaatattattaatttctaaaggttgttttatgccgtcattgcttatcttgtgtagcattacttcttcagcatcatgggagaaaatcttactgtcagggttcagaggatgttgtacggaatgaagttggttgatttgacgaagaagaaaacatttttagtcttgtggctgtgcgtctagctgttgatgcagctgatgagaagtcggctatagccgagagaatttcagtcatcctgcagaaatatgtcttcccatatgacttctttcgttgttggatttatcatcgagtggagagtggcaatacttagtctggccactacttgtgcttgccaactttgcttaggtaatttcttggcctacttttaagcggtgtcatctgtagacaaaatgag

SEQ ID NO: 58911 - DNA, 1246 bp, Zea Mays
gaggaatatgcacaattatattaggtcgaagaagccgccactgccggatctggcgcagcgctagggcacaacgtgcgttggcgaggcaggcgagcgtgccgtgggtctgcgtgcccttggagctcctccaggtgacgtagggccatcacgccaattcacagttcgagatccgacgctggagccgccgctccaccagctcatcggcggtagctccgtgcggacagcgacgtcgacgcgtcgtcatctggtggcatggcagcggtggtcctcaccgatggctcagccatccgcaagagcgcaagcatggggacctctccctcgtcttcgcggggtccaccagcgacagcgcgtccccaactgttgggcccgacctcgccgacagcggtgtggggccatgacttcgaacgacatcgtcctccgcgagccatgagcgtaaaaaggggaagggtacgagcagcttcggcaagcgccggaacaagacgcacacgctctgcatccgctgcagcagccgtagcttccacctccagaagagcacctgctcctcctgcgattacactgccgcccgcatccgcaagtaaggacaagcctccacgtcgatagaagcaaatcaatccatttcgtttgacaagtagaagattatctgtgttcaaccaaatggacataattagtgctgttttgcaaaagcattttggattttccagtctcaaagcattccaaaaggaagtcttggatgcttggtttgctcatgaggattgtgttctcctaacagccataggatcaggaggtaccaaaggaaatgagcaaaacatagcatacagtctcagatgctgcaggatcacatgaaaattattgaagacgacggtccagggacctctcaagcaacaacctcaatggataaggcatattaaatacattacttcttcagcatcatgggagaaaatcttactgtcagggttcagaggatgttgtacggaatgaagttggttgatttgacgaagaagaaaacatttttagtcttgtggctgtgcgtctagctgttgatgcagctgatgagaagtcggctatagccgagagaatttcagtcatcctgcagaaatatgtcttcccatatgacttctttcgttgttggatttatcatcgagtggagagtggcaatacttagtctggccactacttgtgcttgccaactttgcttaggtaatttcttggcctacttttaagcggtgtcatctgtagacaaaatgag

SEQ ID NO: 58912 - DNA, 1298 bp, Zea Mays
gaggaatatgcacaattatattaggtcgaagaagccgccactgccggatctggcgcagcgctagggcacaacgtgcgttggcgaggcaggcgagcgtgccgtgggtctgcgtgcccttggagctcctccaggtgacgtagggccatcacgccaattcacagttcgagatccgacgctggagccgccgctccaccagctcatcggcggtagctccgtgcggacagcgacgtcgacgcgtcgtcatctggtggcatggcagcggtggtcctcaccgatggctcagccatccgcaagagcgcaagcatggggacctctccctcgtcttcgcggggtccaccagcgacagcgcgtccccaactgttgggcccgacctcgccgacagcggtgtggggccatgacttcgaacgacatcgtcctccgcgagccatgagcgtaaaaaggttaggatgaaggatgagaggaataggctgaggatgatcatggcacagtacttggtgtggcttcattcttcatgcaagatctgagcaaccttgagtagcaaatcgaggggaagggtacgagcagcttcggcaagcgccggaacaagacgcacacgctctgcatccgctgcagcagccgtagcttccacctccagaagagcacctgctcctcctgcgattacactgccgcccgcatccgcaagtaaggacaagcctccacgtcgatagaagcaaatcaatccatttcgtttgacaagcattttggattttccagtctcaaagcattccaaaaggaagtcttggatgcttggtttgctcatgaggattgtgttctcctaacagccataggatcaggaggtaccaaaggaaatgagcaaaacatagcatacagtctcagatgctgcaggatcacatgaaaattattgaagacgacggtccagggacctctcaagcaacaacctcaatggataaggcatattaaatacattacttcttcagcatcatgggagaaaatcttactgtcagggttcagaggatgttgtacggaatgaagttggttgatttgacgaagaagaaaacatttttagtcttgtggctgtgcgtctagctgttgatgcagctgatgagaagtcggctatagccgagagaatttcagtcatcctgcagaaatatgtcttcccatatgacttctttcgttgttggatttatcatcgagtggagagtggcaatacttagtctggccactacttgtgcttgccaactttgcttaggtaatttcttggcctacttttaagcggtgtcatctgtagacaaaatgag

SEQ ID NO: 58913 - DNA, 1214 bp, Zea Mays
gaggaatatgcacaattatattaggtcgaagaagccgccactgccggatctggcgcagcgctagggcacaacgtgcgttggcgaggcaggcgagcgtgccgtgggtctgcgtgcccttggagctcctccaggtgacgtagggccatcacgccaattcacagttcgagatccgacgctggagccgccgctccaccagctcatcggcggtagctccgtgcggacagcgacgtcgacgcgtcgtcatctggtggcatggcagcggtggtcctcaccgatggctcagccatccgcaagagcgcaagcatggggacctctccctcgtcttcgcggggtccaccagcgacagcgcgtccccaactgttgggcccgacctcgccgacagcggtgtggggccatgacttcgaacgacatcgtcctccgcgagccatgagcgtaaaaaggggaagggtacgagcagcttcggcaagcgccggaacaagacgcacacgctctgcatccgctgcagcagccgtagcttccacctccagaagagcacctgctcctcctgcgattacactgccgcccgcatccgcaagtttcgtttcaccgggtaacagaaggacaagcctccacgtcgatagaagcaaatcaatccatttcgtttgacaagtagaagattatctgtgttcaaccaaatggacataattagtgctgttttgcaaaagcattttggattttccagtctcaaagcattccaaaaggaagtcttggatgcttggtttgctcatgaggattgtgttctcctaacagccataggatcaggatcacatgaaaattattgaagacgacggtccagggacctctcaagcaacaacctcaatggataaggcatattaaatacattacttcttcagcatcatgggagaaaatcttactgtcagggttcagaggatgttgtacggaatgaagttggttgatttgacgaagaagaaaacatttttagtcttgtggctgtgcgtctagctgttgatgcagctgatgagaagtcggctatagccgagagaatttcagtcatcctgcagaaatatgtcttcccatatgacttctttcgttgttggatttatcatcgagtggagagtggcaatacttagtctggccactacttgtgcttgccaactttgcttaggtaatttcttggcctacttttaagcggtgtcatctgtagacaaaatgag

SEQ ID NO: 58914 - DNA, 1897 bp, Zea Mays
gaggaatatgcacaattatattaggtcgaagaagccgccactgccggatctggcgcagcgctagggcacaacgtgcgttggcgaggcaggcgagcgtgccgtgggtctgcgtgcccttggagctcctccaggtgacgtagggccatcacgccaattcacagttcgagatccgacgctggagccgccgctccaccagctcatcggcggtagctccgtgcggacagcgacgtcgacgcgtcgtcatctggtggcatggcagcggtggtcctcaccgatggctcagccatccgcaagagcgcaagcatggggacctctccctcgtcttcgcggggtccaccagcgacagcgcgtccccaactgttgggcccgacctcgccgacagcggtgtggggccatgacttcgaacgacatcgtcctccgcgagccatgagcgtaaaaaggttaggtactgccctatctctgcccctcctctctaatcgatcaatggtaatagcacactacgagtactcttgccattgtattccattagcgacaaatctgctagaaaactatgttatggctagaaactgttagaagtttcaggaatggtgttttatgttacctcgtcatatttttcaagatacatgtcttgtggtcgaaatttcttaagatttcttagttgtcttatagttttgattaagttgacaacttgaagtctggatagagaaattaatgatgaaccagtgtgcaatataagacatatatcatatttaatggtttagtgacatccttattagcacccgttttgaggacatggacttccacatacgtggctgattctcttgaaccatgacggtacaatctctgatttcaactgaagaaaatctctgctttcctgtcctttcccatgaaaatcgtccgagagatgactaggatgaaggatgagaggaataggctgaggatgatcatggcacagtacttggtgtggcttcattcttcatgcaagatctgagcaaccttgagtagcaaatcgaggggaagggtacgagcagcttcggcaagcgccggaacaagacgcacacgctctgcatccgctgcagcagccgtagcttccacctccagaagagcacctgctcctcctgcgattacactgccgcccgcatccgcaagtaaggacaagcctccacgtcgatagaagcaaatcaatccatttcgtttgacaagtagaagattatctgtgttcaaccaaatggacataattagtgctgttttgcaaaagcattttggattttccagtctcaaagcattccaaaaggaagtcttggatgcttggtttgctcatgaggattgtgttctcctaacagccataggatcaggaggtaccaaaggaaatgagcaaaacatagcatacagtctcagatgctgcaggatcacatgaaaattattgaagacgacggtccaggtgcagccttctatgccagtgctaaggccatgactaatggaaatcacactttctatgtgagcaaactgatacagaggttggctagattaagtaaatatgatacaatgtatcacatgcacagcattacttcttcagcatcatgggagaaaatcttactgtcagggttcagaggatgttgtacggaatgaagttggttgatttgacgaagaagaaaacatttttagtcttgtggctgtgcgtctagctgttgatgcagctgatgagaagtcggctatagccgagagaatttcagtcatcctgcagaaatatgtcttcccatatgacttctttcgttgttggatttatcatcgagtggagagtggcaatacttagtctggccactacttgtgcttgccaactttgcttaggtaatttcttggcctacttttaagcggtgtcatctgtagacaaaatgag

SEQ ID NO: 58915 - DNA, 1977 bp, Zea Mays
gaggaatatgcacaattatattaggtcgaagaagccgccactgccggatctggcgcagcgctagggcacaacgtgcgttggcgaggcaggcgagcgtgccgtgggtctgcgtgcccttggagctcctccaggtgacgtagggccatcacgccaattcacagttcgagatccgacgctggagccgccgctccaccagctcatcggcggtagctccgtgcggacagcgacgtcgacgcgtcgtcatctggtggcatggcagcggtggtcctcaccgatggctcagccatccgcaagagcgcaagcatggggacctctccctcgtcttcgcggggtccaccagcgacagcgcgtccccaactgttgggcccgacctcgccgacagcggtgtggggccatgacttcgaacgacatcgtcctccgcgagccatgagcgtaaaaaggggaagggtacgagcagcttcggcaagcgccggaacaagacgcacacgctctgcatccgctgcagcagccgtagcttccacctccagaagagcacctgctcctcctgcgattacactgccgcccgcatccgcaagtaaggacaagcctccacgtcgatagaagcaaatcaatccatttcgtttgacaagtagaagattatctgtgttcaaccaaatggacataattagtgctgttttgcaaaagcattttggattttccagtctcaaagcattccaaaaggaagtcttggatgcttggtttgctcatgaggattgtgttctcctaacagccataggatcaggaggtaccaaaggaaatgagcaaaacatagcatacagtctcagatgctgcaggatcacatgaaaattattgaagacgacggtccaggtgcagccttctatgccagtgctaaggccatgactaatggaaatcacactttctatgtgagcaaactgatacagaggttggctagattaagtaaatatgatacaatgtatcacatgcacaggtaatggtgaaatccaaaatctgggagagccgacttctattttctgcatgctggatataccataccttttccacctatatatacttcaaaacttgttttttagtgtttcattttgtttttgtgattcccaagggatctgtctcacaacaatctaaatggaccaataccagatttctatgtcaaatgccatcacttacatttctatataagctttcttgttgatcgacctacatactttaatattgctcaaaacccctctttttatgtttacttcctcttattttgtagggacctctcaagcaacaacctcaatggataaggcatattaaatagtaatgctccttccatttcataatgtgtaaggcatattaaatttcttttaagaacgaaactttataaacattgaccatcaaatagtaaataaaatacatgtagattcatatttcacgtggttttgtagtaattgagaatgatttcaagatgaattaatggtgaaagcattccttgaaagacttcttaaatcctaatatgccttgtaaaatgacaatggatggaatagtttacaacatgacaaactgtccacctgaaattaaaaggataaatattattaatttctaaaggttgttttatgccgtcattgcttatcttgtgtagcattacttcttcagcatcatgggagaaaatcttactgtcagggttcagaggatgttgtacggaatgaagttggttgatttgacgaagaagaaaacatttttagtcttgtggctgtgcgtctagctgttgatgcagctgatgagaagtcggctatagccgagagaatttcagtcatcctgcagaaatatgtcttcccatatgacttctttcgttgttggatttatcatcgagtggagagtggcaatacttagtctggccactacttgtgcttgccaactttgcttaggtaatttcttggcctacttttaagcggtgtcatctgtagacaaaatgag

SEQ ID NO: 58916 - DNA, 1889 bp, Zea Mays
gaggaatatgcacaattatattaggtcgaagaagccgccactgccggatctggcgcagcgctagggcacaacgtgcgttggcgaggcaggcgagcgtgccgtgggtctgcgtgcccttggagctcctccaggtgacgtagggccatcacgccaattcacagttcgagatccgacgctggagccgccgctccaccagctcatcggcggtagctccgtgcggacagcgacgtcgacgcgtcgtcatctggtggcatggcagcggtggtcctcaccgatggctcagccatccgcaagagcgcaagcatggggacctctccctcgtcttcgcggggtccaccagcgacagcgcgtccccaactgttgggcccgacctcgccgacagcggtgtggggccatgacttcgaacgacatcgtcctccgcgagccatgagcgtaaaaaggttaggtactgccctatctctgcccctcctctctaatcgatcaatggtaatagcacactacgagtactcttgccattgtattccattagcgacaaatctgctagaaaactatgttatggctagaaactgttagaagtttcaggaatggtgttttatgttacctcgtcatatttttcaagatacatgtcttgtggtcgaaatttcttaagatttcttagttgtcttatagttttgattaagttgacaacttgaagtctggatagagaaattaatgatgaaccagtgtgcaatataagacatatatcatatttaatggtttagtgacatccttattagcacccgttttgaggacatggacttccacatacgtggctgattctcttgaaccatgacggtacaatctctgatttcaactgaagaaaatctctgctttcctgtcctttcccatgaaaatcgtccgagagatgactaggatgaaggatgagaggaataggctgaggatgatcatggcacagtacttggtgtggcttcattcttcatgcaagatctgagcaaccttgagtagcaaatcgaggggaagggtacgagcagcttcggcaagcgccggaacaagacgcacacgctctgcatccgctgcagcagccgtagcttccacctccagaagagcacctgctcctcctgcgattacactgccgcccgcatccgcaagtaaggacaagcctccacgtcgatagaagcaaatcaatccatttcgtttgacaagtagaagattatctgtgttcaaccaaatggacataattagtgctgttttgcaaaagcattttggattttccagtctcaaagcattccaaaaggaagtcttggatgcttggtttgctcatgaggattgtgttctcctaacagccataggatcaggatcacatgaaaattattgaagacgacggtccaggtgcagccttctatgccagtgctaaggccatgactaatggaaatcacactttctatgtgagcaaactgatacagaggttggctagattaagtaaatatgatacaatgtatcacatgcacagggacctctcaagcaacaacctcaatggataaggcatattaaatacattacttcttcagcatcatgggagaaaatcttactgtcagggttcagaggatgttgtacggaatgaagttggttgatttgacgaagaagaaaacatttttagtcttgtggctgtgcgtctagctgttgatgcagctgatgagaagtcggctatagccgagagaatttcagtcatcctgcagaaatatgtcttcccatatgacttctttcgttgttggatttatcatcgagtggagagtggcaatacttagtctggccactacttgtgcttgccaactttgcttaggtaatttcttggcctacttttaagcggtgtcatctgtagacaaaatgag

SEQ ID NO: 58917 - DNA, 1875 bp, Zea Mays
gaggaatatgcacaattatattaggtcgaagaagccgccactgccggatctggcgcagcgctagggcacaacgtgcgttggcgaggcaggcgagcgtgccgtgggtctgcgtgcccttggagctcctccaggtgacgtagggccatcacgccaattcacagttcgagatccgacgctggagccgccgctccaccagctcatcggcggtagctccgtgcggacagcgacgtcgacgcgtcgtcatctggtggcatggcagcggtggtcctcaccgatggctcagccatccgcaagagcgcaagcatggggacctctccctcgtcttcgcggggtccaccagcgacagcgcgtccccaactgttgggcccgacctcgccgacagcggtgtggggccatgacttcgaacgacatcgtcctccgcgagccatgagcgtaaaaaggttaggtactgccctatctctgcccctcctctctaatcgatcaatggtaatagcacactacgagtactcttgccattgtattccattagcgacaaatctgctagaaaactatgttatggctagaaactgttagaagtttcaggaatggtgttttatgttacctcgtcatatttttcaagatacatgtcttgtggtcgaaatttcttaagatttcttagttgtcttatagttttgattaagttgacaacttgaagtctggatagagaaattaatgatgaaccagtgtgcaatataagacatatatcatatttaatggtttagtgacatccttattagcacccgttttgaggacatggacttccacatacgtggctgattctcttgaaccatgacggtacaatctctgatttcaactgaagaaaatctctgctttcctgtcctttcccatgaaaatcgtccgagagatgactaggatgaaggatgagaggaataggctgaggatgatcatggcacagtacttggtgtggcttcattcttcatgcaagatctgagcaaccttgagtagcaaatcgaggggaagggtacgagcagcttcggcaagcgccggaacaagacgcacacgctctgcatccgctgcagcagccgtagcttccacctccagaagagcacctgctcctcctgcgattacactgccgcccgcatccgcaagtaaggacaagcctccacgtcgatagaagcaaatcaatccatttcgtttgacaagtagaagattatctgtgttcaaccaaatggacataattagtgctgttttgcaaaagcattttggattttccagtctcaaagcattccaaaaggaagtcttggatgcttggtttgctcatgaggattgtgttctcctaacagccataggatcaggatcacatgaaaattattgaagacgacggtccaggtgcagccttctatgccagtgctaaggccatgactaatggaaatcacactttctatgtgagcaaactgatacagaggttggctagattaagtaaatatgatacaatgtatcacatgcacagggacctctcaagcaacaacctcaatggataaggcatattaaatacatcatgggagaaaatcttactgtcagggttcagaggatgttgtacggaatgaagttggttgatttgacgaagaagaaaacatttttagtcttgtggctgtgcgtctagctgttgatgcagctgatgagaagtcggctatagccgagagaatttcagtcatcctgcagaaatatgtcttcccatatgacttctttcgttgttggatttatcatcgagtggagagtggcaatacttagtctggccactacttgtgcttgccaactttgcttaggtaatttcttggcctacttttaagcggtgtcatctgtagacaaaatgag

SEQ ID NO: 58918 - DNA, 1953 bp, Zea Mays
gaggaatatgcacaattatattaggtcgaagaagccgccactgccggatctggcgcagcgctagggcacaacgtgcgttggcgaggcaggcgagcgtgccgtgggtctgcgtgcccttggagctcctccaggtgacgtagggccatcacgccaattcacagttcgagatccgacgctggagccgccgctccaccagctcatcggcggtagctccgtgcggacagcgacgtcgacgcgtcgtcatctggtggcatggcagcggtggtcctcaccgatggctcagccatccgcaagagcgcaagcatggggacctctccctcgtcttcgcggggtccaccagcgacagcgcgtccccaactgttgggcccgacctcgccgacagcggtgtggggccatgacttcgaacgacatcgtcctccgcgagccatgagcgtaaaaaggttaggtactgccctatctctgcccctcctctctaatcgatcaatggtaatagcacactacgagtactcttgccattgtattccattagcgacaaatctgctagaaaactatgttatggctagaaactgttagaagtttcaggaatggtgttttatgttacctcgtcatatttttcaagatacatgtcttgtggtcgaaatttcttaagatttcttagttgtcttatagttttgattaagttgacaacttgaagtctggatagagaaattaatgatgaaccagtgtgcaatataagacatatatcatatttaatggtttagtgacatccttattagcacccgttttgaggacatggacttccacatacgtggctgattctcttgaaccatgacggtacaatctctgatttcaactgaagaaaatctctgctttcctgtcctttcccatgaaaatcgtccgagagatgactaggatgaaggatgagaggaataggctgaggatgatcatggcacagtacttggtgtggcttcattcttcatgcaagatctgagcaaccttgagtagcaaatcgaggggaagggtacgagcagcttcggcaagcgccggaacaagacgcacacgctctgcatccgctgcagcagccgtagcttccacctccagaagagcacctgctcctcctgcgattacactgccgcccgcatccgcaagtaaggacaagcctccacgtcgatagaagcaaatcaatccatttcgtttgacaagtagaagattatctgtgttcaaccaaatggacataattagtgctgttttgcaaaagcattttggattttccagtctcaaagcattccaaaaggaagtcttggatgcttggtttgctcatgaggattgtgttctcctaacagccataggatcaggaggtaccaaaggaaatgagcaaaacatagcatacagtctcagatgctgcaggatcacatgaaaattattgaagacgacggtccaggtgcagccttctatgccagtgctaaggccatgactaatggaaatcacactttctatgtgagcaaactgatacagaggttggctagattaagtaaatatgatacaatgtatcacatgcacagggacctctcaagcaacaacctcaatggataaggcatattaaatagtaatgctccttccatttcataatgtcatcatgggagaaaatcttactgtcagggttcagaggatgttgtacggaatgaagttggttgatttgacgaagaagaaaacatttttagtcttgtggctgtgcgtctagctgttgatgcagctgatgagaagtcggctatagccgagagaatttcagtcatcctgcagaaatatgtcttcccatatgacttctttcgttgttggatttatcatcgagtggagagtggcaatacttagtctggccactacttgtgcttgccaactttgcttaggtaatttcttggcctacttttaagcggtgtcatctgtagacaaaatgag

SEQ ID NO: 58919 - DNA, 1927 bp, Zea Mays
gaggaatatgcacaattatattaggtcgaagaagccgccactgccggatctggcgcagcgctagggcacaacgtgcgttggcgaggcaggcgagcgtgccgtgggtctgcgtgcccttggagctcctccaggtgacgtagggccatcacgccaattcacagttcgagatccgacgctggagccgccgctccaccagctcatcggcggtagctccgtgcggacagcgacgtcgacgcgtcgtcatctggtggcatggcagcggtggtcctcaccgatggctcagccatccgcaagagcgcaagcatggggacctctccctcgtcttcgcggggtccaccagcgacagcgcgtccccaactgttgggcccgacctcgccgacagcggtgtggggccatgacttcgaacgacatcgtcctccgcgagccatgagcgtaaaaaggttaggtactgccctatctctgcccctcctctctaatcgatcaatggtaatagcacactacgagtactcttgccattgtattccattagcgacaaatctgctagaaaactatgttatggctagaaactgttagaagtttcaggaatggtgttttatgttacctcgtcatatttttcaagatacatgtcttgtggtcgaaatttcttaagatttcttagttgtcttatagttttgattaagttgacaacttgaagtctggatagagaaattaatgatgaaccagtgtgcaatataagacatatatcatatttaatggtttagtgacatccttattagcacccgttttgaggacatggacttccacatacgtggctgattctcttgaaccatgacggtacaatctctgatttcaactgaagaaaatctctgctttcctgtcctttcccatgaaaatcgtccgagagatgactaggatgaaggatgagaggaataggctgaggatgatcatggcacagtacttggtgtggcttcattcttcatgcaagatctgagcaaccttgagtagcaaatcgaggggaagggtacgagcagcttcggcaagcgccggaacaagacgcacacgctctgcatccgctgcagcagccgtagcttccacctccagaagagcacctgctcctcctgcgattacactgccgcccgcatccgcaagtaaggacaagcctccacgtcgatagaagcaaatcaatccatttcgtttgacaagtagaagattatctgtgttcaaccaaatggacataattagtgctgttttgcaaaagcattttggattttccagtctcaaagcattccaaaaggaagtcttggatgcttggtttgctcatgaggattgtgttctcctaacagccataggatcaggaggtaccaaaggaaatgagcaaaacatagcatacagtctcagatgctgcaggatcacatgaaaattattgaagacgacggtccaggtgcagccttctatgccagtgctaaggccatgactaatggaaatcacactttctatgtgagcaaactgatacagaggttggctagattaagtaaatatgatacaatgtatcacatgcacagggacctctcaagcaacaacctcaatggataaggcatattaaatacatcatgggagaaaatcttactgtcagggttcagaggatgttgtacggaatgaagttggttgatttgacgaagaagaaaacatttttagtcttgtggctgtgcgtctagctgttgatgcagctgatgagaagtcggctatagccgagagaatttcagtcatcctgcagaaatatgtcttcccatatgacttctttcgttgttggatttatcatcgagtggagagtggcaatacttagtctggccactacttgtgcttgccaactttgcttaggtaatttcttggcctacttttaagcggtgtcatctgtagacaaaatgag

SEQ ID NO: 58920 - DNA, 1669 bp, Zea Mays
gaggaatatgcacaattatattaggtcgaagaagccgccactgccggatctggcgcagcgctagggcacaacgtgcgttggcgaggcaggcgagcgtgccgtgggtctgcgtgcccttggagctcctccaggtgacgtagggccatcacgccaattcacagttcgagatccgacgctggagccgccgctccaccagctcatcggcggtagctccgtgcggacagcgacgtcgacgcgtcgtcatctggtggcatggcagcggtggtcctcaccgatggctcagccatccgcaagagcgcaagcatggggacctctccctcgtcttcgcggggtccaccagcgacagcgcgtccccaactgttgggcccgacctcgccgacagcggtgtggggccatgacttcgaacgacatcgtcctccgcgagccatgagcgtaaaaaggatgaaggatgagaggaataggctgaggatgatcatggcacagtacttggtgtggcttcattcttcatgcaagatctgagcaaccttgagtagcaaatcgaggggaagggtacgagcagcttcggcaagcgccggaacaagacgcacacgctctgcatccgctgcagcagccgtagcttccacctccagaagagcacctgctcctcctgcgattacactgccgcccgcatccgcaagtaaggacaagcctccacgtcgatagaagcaaatcaatccatttcgtttgacaagtagaagattatctgtgttcaaccaaatggacataattagtgctgttttgcaaaagcattttggattttccagtctcaaagcattccaaaaggaagtcttggatgcttggtttgctcatgaggattgtgttctcctaacagccataggatcaggtgcgttttctgtaatgctcctctttatcttctgtaatttattactaccgctgatgtgactttgctttttatatgggctgtaagtgtcagtaatcttttttcataatttctatcattattgaatacttatattttgtatcctttttttcgctgaaccttcttgccttatgtctgaacatgcaacattttgattggggtaggaggtaccaaaggaaatgagcaaaacatagcatacagtctcagatgctgcaggatcacatgaaaattattgaagacgacggtccaggtgcagccttctatgccagtgctaaggccatgactaatggaaatcacactttctatgtgagcaaactgatacagaggttggctagattaagtaaatatgatacaatgtatcacatgcacagggacctctcaagcaacaacctcaatggataaggcatattaaatacattacttcttcagcatcatgggagaaaatcttactgtcagggttcagaggatgttgtacggaatgaagttggttgatttgacgaagaagaaaacatttttagtcttgtggctgtgcgtctagctgttgatgcagctgatgagaagtcggctatagccgagagaatttcagtcatcctgcagaaatatgtcttcccatatgacttctttcgttgttggatttatcatcgagtggagagtggcaatacttagtctggccactacttgtgcttgccaactttgcttaggtaatttcttggcctacttttaagcggtgtcatctgtagacaaaatgag

SEQ ID NO: 58921 - DNA, 2263 bp, Zea Mays
gaggaatatgcacaattatattaggtcgaagaagccgccactgccggatctggcgcagcgctagggcacaacgtgcgttggcgaggcaggcgagcgtgccgtgggtctgcgtgcccttggagctcctccaggtgacgtagggccatcacgccaattcacagttcgagatccgacgctggagccgccgctccaccagctcatcggcggtagctccgtgcggacagcgacgtcgacgcgtcgtcatctggtggcatggcagcggtggtcctcaccgatggctcagccatccgcaagagcgcaagcatggggacctctccctcgtcttcgcggggtccaccagcgacagcgcgtccccaactgttgggcccgacctcgccgacagcggtgtggggccatgacttcgaacgacatcgtcctccgcgagccatgagcgtaaaaaggttaggtactgccctatctctgcccctcctctctaatcgatcaatggtaatagcacactacgagtactcttgccattgtattccattagcgacaaatctgctagaaaactatgttatggctagaaactgttagaagtttcaggaatggtgttttatgttacctcgtcatatttttcaagatacatgtcttgtggtcgaaatttcttaagatttcttagttgtcttatagttttgattaagttgacaacttgaagtctggatagagaaattaatgatgaaccagtgtgcaatataagacatatatcatatttaatggtttagtgacatccttattagcacccgttttgaggacatggacttccacatacgtggctgattctcttgaaccatgacggtacaatctctgatttcaactgaagaaaatctctgctttcctgtcctttcccatgaaaatcgtccgagagatgactaggatgaaggatgagaggaataggctgaggatgatcatggcacagtacttggtgtggcttcattcttcatgcaagatctgagcaaccttgagtagcaaatcgaggggaagggtacgagcagcttcggcaagcgccggaacaagacgcacacgctctgcatccgctgcagcagccgtagcttccacctccagaagagcacctgctcctcctgcgattacactgccgcccgcatccgcaagtaaggacaagcctccacgtcgatagaagcaaatcaatccatttcgtttgacaagtagaagattatctgtgttcaaccaaatggacataattagtgctgttttgcaaaagcattttggattttccagtctcaaagcattccaaaaggaagtcttggatgcttggtttgctcatgaggattgtgttctcctaacagccataggatcaggaggtaccaaaggaaatgagcaaaacatagcatacagtctcagatgctgcaggatcacatgaaaattattgaagacgacggtccaggtgcagccttctatgccagtgctaaggccatgactaatggaaatcacactttctatgtgagcaaactgatacagaggttggctagattaagtaaatatgatacaatgtatcacatgcacagggacctctcaagcaacaacctcaatggataaggcatattaaatagtaatgctccttccatttcataatgtgtaaggcatattaaatttcttttaagaacgaaactttataaacattgaccatcaaatagtaaataaaatacatgtagattcatatttcacgtggttttgtagtaattgagaatgatttcaagatgaattaatggtgaaagcattccttgaaagacttcttaaatcctaatatgccttgtaaaatgacaatggatggaatagtttacaacatgacaaactgtccacctgaaattaaaaggataaatattattaatttctaaaggttgttttatgccgtcattgcttatcttgtgtagcattacttcttcagcatcatgggagaaaatcttactgtcagggttcagaggatgttgtacggaatgaagttggttgatttgacgaagaagaaaacatttttagtcttgtggctgtgcgtctagctgttgatgcagctgatgagaagtcggctatagccgagagaatttcagtcatcctgcagaaatatgtcttcccatatgacttctttcgttgttggatttatcatcgagtggagagtggcaatacttagtctggccactacttgtgcttgccaactttgcttaggtaatttcttggcctacttttaagcggtgtcatctgtagacaaaatgag

SEQ ID NO: 58922 - DNA, 1765 bp, Zea Mays
gaggaatatgcacaattatattaggtcgaagaagccgccactgccggatctggcgcagcgctagggcacaacgtgcgttggcgaggcaggcgagcgtgccgtgggtctgcgtgcccttggagctcctccaggtgacgtagggccatcacgccaattcacagttcgagatccgacgctggagccgccgctccaccagctcatcggcggtagctccgtgcggacagcgacgtcgacgcgtcgtcatctggtggcatggcagcggtggtcctcaccgatggctcagccatccgcaagagcgcaagcatggggacctctccctcgtcttcgcggggtccaccagcgacagcgcgtccccaactgttgggcccgacctcgccgacagcggtgtggggccatgacttcgaacgacatcgtcctccgcgagccatgagcgtaaaaaggttaggtactgccctatctctgcccctcctctctaatcgatcaatggtaatagcacactacgagtactcttgccattgtattccattagcgacaaatctgctagaaaactatgttatggctagaaactgttagaagtttcaggaatggtgttttatgttacctcgtcatatttttcaagatacatgtcttgtggtcgaaatttcttaagatttcttagttgtcttatagttttgattaagttgacaacttgaagtctggatagagaaattaatgatgaaccagtgtgcaatataagacatatatcatatttaatggtttagtgacatccttattagcacccgttttgaggacatggacttccacatacgtggctgattctcttgaaccatgacggtacaatctctgatttcaactgaagaaaatctctgctttcctgtcctttcccatgaaaatcgtccgagagatgactaggatgaaggatgagaggaataggctgaggatgatcatggcacagtacttggtgtggcttcattcttcatgcaagatctgagcaaccttgagtagcaaatcgagaaggacaagcctccacgtcgatagaagcaaatcaatccatttcgtttgacaagtagaagattatctgtgttcaaccaaatggacataattagtgctgttttgcaaaagcattttggattttccagtctcaaagcattccaaaaggaagtcttggatgcttggtttgctcatgaggattgtgttctcctaacagccataggatcaggatcacatgaaaattattgaagacgacggtccaggtgcagccttctatgccagtgctaaggccatgactaatggaaatcacactttctatgtgagcaaactgatacagaggttggctagattaagtaaatatgatacaatgtatcacatgcacagggacctctcaagcaacaacctcaatggataaggcatattaaatagtaatgctccttccatttcataatgtcatcatgggagaaaatcttactgtcagggttcagaggatgttgtacggaatgaagttggttgatttgacgaagaagaaaacatttttagtcttgtggctgtgcgtctagctgttgatgcagctgatgagaagtcggctatagccgagagaatttcagtcatcctgcagaaatatgtcttcccatatgacttctttcgttgttggatttatcatcgagtggagagtggcaatacttagtctggccactacttgtgcttgccaactttgcttaggtaatttcttggcctacttttaagcggtgtcatctgtagacaaaatgag

SEQ ID NO: 58923 - DNA, 1474 bp, Zea Mays
gaggaatatgcacaattatattaggtcgaagaagccgccactgccggatctggcgcagcgctagggcacaacgtgcgttggcgaggcaggcgagcgtgccgtgggtctgcgtgcccttggagctcctccaggtgacgtagggccatcacgccaattcacagttcgagatccgacgctggagccgccgctccaccagctcatcggcggtagctccgtgcggacagcgacgtcgacgcgtcgtcatctggtggcatggcagcggtggtcctcaccgatggctcagccatccgcaagagcgcaagcatggggacctctccctcgtcttcgcggggtccaccagcgacagcgcgtccccaactgttgggcccgacctcgccgacagcggtgtggggccatgacttcgaacgacatcgtcctccgcgagccatgagcgtaaaaaggttaggatgaaggatgagaggaataggctgaggatgatcatggcacagtacttggtgtggcttcattcttcatgcaagatctgagcaaccttgagtagcaaatcgaggggaagggtacgagcagcttcggcaagcgccggaacaagacgcacacgctctgcatccgctgcagcagccgtagcttccacctccagaagagcacctgctcctcctgcgattacactgccgcccgcatccgcaagtaaggacaagcctccacgtcgatagaagcaaatcaatccatttcgtttgacaagtagaagattatctgtgttcaaccaaatggacataattagtgctgttttgcaaaagcattttggattttccagtctcaaagcattccaaaaggaagtcttggatgcttggtttgctcatgaggattgtgttctcctaacagccataggatcaggaggtaccaaaggaaatgagcaaaacatagcatacagtctcagatgctgcaggatcacatgaaaattattgaagacgacggtccaggtgcagccttctatgccagtgctaaggccatgactaatggaaatcacactttctatgtgagcaaactgatacagaggttggctagattaagtaaatatgatacaatgtatcacatgcacagggacctctcaagcaacaacctcaatggataaggcatattaaatacattacttcttcagcatcatgggagaaaatcttactgtcagggttcagaggatgttgtacggaatgaagttggttgatttgacgaagaagaaaacatttttagtcttgtggctgtgcgtctagctgttgatgcagctgatgagaagtcggctatagccgagagaatttcagtcatcctgcagaaatatgtcttcccatatgacttctttcgttgttggatttatcatcgagtggagagtggcaatacttagtctggccactacttgtgcttgccaactttgcttaggtaatttcttggcctacttttaagcggtgtcatctgtagacaaaatgag

SEQ ID NO: 58924 - DNA, 1967 bp, Zea Mays
gaggaatatgcacaattatattaggtcgaagaagccgccactgccggatctggcgcagcgctagggcacaacgtgcgttggcgaggcaggcgagcgtgccgtgggtctgcgtgcccttggagctcctccaggtgacgtagggccatcacgccaattcacagttcgagatccgacgctggagccgccgctccaccagctcatcggcggtagctccgtgcggacagcgacgtcgacgcgtcgtcatctggtggcatggcagcggtggtcctcaccgatggctcagccatccgcaagagcgcaagcatggggacctctccctcgtcttcgcggggtccaccagcgacagcgcgtccccaactgttgggcccgacctcgccgacagcggtgtggggccatgacttcgaacgacatcgtcctccgcgagccatgagcgtaaaaaggttaggtactgccctatctctgcccctcctctctaatcgatcaatggtaatagcacactacgagtactcttgccattgtattccattagcgacaaatctgctagaaaactatgttatggctagaaactgttagaagtttcaggaatggtgttttatgttacctcgtcatatttttcaagatacatgtcttgtggtcgaaatttcttaagatttcttagttgtcttatagttttgattaagttgacaacttgaagtctggatagagaaattaatgatgaaccagtgtgcaatataagacatatatcatatttaatggtttagtgacatccttattagcacccgttttgaggacatggacttccacatacgtggctgattctcttgaaccatgacggtacaatctctgatttcaactgaagaaaatctctgctttcctgtcctttcccatgaaaatcgtccgagagatgactaggatgaaggatgagaggaataggctgaggatgatcatggcacagtacttggtgtggcttcattcttcatgcaagatctgagcaaccttgagtagcaaatcgaggggaagggtacgagcagcttcggcaagcgccggaacaagacgcacacgctctgcatccgctgcagcagccgtagcttccacctccagaagagcacctgctcctcctgcgattacactgccgcccgcatccgcaagtaaggacaagcctccacgtcgatagaagcaaatcaatccatttcgtttgacaagtagaagattatctgtgttcaaccaaatggacataattagtgctgttttgcaaaagcattttggattttccagtctcaaagcattccaaaaggaagtcttggatgcttggtttgctcatgaggattgtgttctcctaacagccataggatcaggaggtaccaaaggaaatgagcaaaacatagcatacagtctcagatgctgcaggatcacatgaaaattattgaagacgacggtccaggtgcagccttctatgccagtgctaaggccatgactaatggaaatcacactttctatgtgagcaaactgatacagaggttggctagattaagtaaatatgatacaatgtatcacatgcacagggacctctcaagcaacaacctcaatggataaggcatattaaatagtaatgctccttccatttcataatgtcattacttcttcagcatcatgggagaaaatcttactgtcagggttcagaggatgttgtacggaatgaagttggttgatttgacgaagaagaaaacatttttagtcttgtggctgtgcgtctagctgttgatgcagctgatgagaagtcggctatagccgagagaatttcagtcatcctgcagaaatatgtcttcccatatgacttctttcgttgttggatttatcatcgagtggagagtggcaatacttagtctggccactacttgtgcttgccaactttgcttaggtaatttcttggcctacttttaagcggtgtcatctgtagacaaaatgag

SEQ ID NO: 58925 - DNA, 1765 bp, Zea Mays
gaggaatatgcacaattatattaggtcgaagaagccgccactgccggatctggcgcagcgctagggcacaacgtgcgttggcgaggcaggcgagcgtgccgtgggtctgcgtgcccttggagctcctccaggtgacgtagggccatcacgccaattcacagttcgagatccgacgctggagccgccgctccaccagctcatcggcggtagctccgtgcggacagcgacgtcgacgcgtcgtcatctggtggcatggcagcggtggtcctcaccgatggctcagccatccgcaagagcgcaagcatggggacctctccctcgtcttcgcggggtccaccagcgacagcgcgtccccaactgttgggcccgacctcgccgacagcggtgtggggccatgacttcgaacgacatcgtcctccgcgagccatgagcgtaaaaaggttaggtactgccctatctctgcccctcctctctaatcgatcaatggtaatagcacactacgagtactcttgccattgtattccattagcgacaaatctgctagaaaactatgttatggctagaaactgttagaagtttcaggaatggtgttttatgttacctcgtcatatttttcaagatacatgtcttgtggtcgaaatttcttaagatttcttagttgtcttatagttttgattaagttgacaacttgaagtctggatagagaaattaatgatgaaccagtgtgcaatataagacatatatcatatttaatggtttagtgacatccttattagcacccgttttgaggacatggacttccacatacgtggctgattctcttgaaccatgacggtacaatctctgatttcaactgaagaaaatctctgctttcctgtcctttcccatgaaaatcgtccgagagatgactaggatgaaggatgagaggaataggctgaggatgatcatggcacagtacttggtgtggcttcattcttcatgcaagatctgagcaaccttgagtagcaaatcgaggggaagggtacgagcagcttcggcaagcgccggaacaagacgcacacgctctgcatccgctgcagcagccgtagcttccacctccagaagagcacctgctcctcctgcgattacactgccgcccgcatccgcaagtaaggacaagcctccacgtcgatagaagcaaatcaatccatttcgtttgacaagcattttggattttccagtctcaaagcattccaaaaggaagtcttggatgcttggtttgctcatgaggattgtgttctcctaacagccataggatcaggaggtaccaaaggaaatgagcaaaacatagcatacagtctcagatgctgcaggatcacatgaaaattattgaagacgacggtccagggacctctcaagcaacaacctcaatggataaggcatattaaatacattacttcttcagcatcatgggagaaaatcttactgtcagggttcagaggatgttgtacggaatgaagttggttgatttgacgaagaagaaaacatttttagtcttgtggctgtgcgtctagctgttgatgcagctgatgagaagtcggctatagccgagagaatttcagtcatcctgcagaaatatgtcttcccatatgacttctttcgttgttggatttatcatcgagtggagagtggcaatacttagtctggccactacttgtgcttgccaactttgcttaggtaatttcttggcctacttttaagcggtgtcatctgtagacaaaatgag

SEQ ID NO: 58926 - DNA, 657 bp, Zea Mays
ttgcaacgagctccaatgtctaggaacaatttagaagagaaggacaagcctccacgtcgatagaagcaaatcaatccatttcgtttgacaagtagaagattatctgtgttcaaccaaatggacataattagtgctgttttgcaaaagcattttggattttccagtctcaaagcattccaaaaggaagtcttggatgcttggtttgctcatgaggattgtgttctcctaacagccataggatcaggatcacatgaaaattattgaagacgacggtccagggacctctcaagcaacaacctcaatggataaggcatattaaatacattacttcttcagcatcatgggagaaaatcttactgtcagggttcagaggatgttgtacggaatgaagttggttgatttgacgaagaagaaaacatttttagtcttgtggctgtgcgtctagctgttgatgcagctgatgagaagtcggctatagccgagagaatttcagtcatcctgcagaaatatgtcttcccatatgacttctttcgttgttggatttatcatcgagtggagagtggcaatacttagtctggccactacttgtgcttgccaactttgcttaggtaatttcttggcctacttttaagcggtgtcatctgtagacaaaatgag

SEQ ID NO: 58927 - DNA, 1513 bp, Zea Mays
caattggttctaacttctttcattctgtaactgtttagtttgatgcaaataaattgcaatggtgttcgtcagagccaaacatagcagacaacactgctttagtttgatgcaaataaattgcaatggtgttcgtcatagccaacttccccaaaacaaatgtcacagaaaaatatctatacctagaacaatgatagatgtagtggtgtcactgacttcttcatcccgtgcatgacttagttcaatcatagactgcacattaacacacaaacacaattaattacatggaacttgcaacatgaatcatagacttcatatacgattaggcatatatatgtggggtctcgcaacacaaaaccatccactgtgaaggatcacatgaaaattattgaagacgacggtccaggtgcagccttctatgccagtgctaaggccatgactaatggaaatcacactttctatgtgagcaaactgatacagaggttggctagattaagtaaatatgatacaatgtatcacatgcacaggtaatggtgaaatccaaaatctgggagagccgacttctattttctgcatgctggatataccataccttttccacctatatatacttcaaaacttgttttttagtgtttcattttgtttttgtgattcccaagggatctgtctcacaacaatctaaatggaccaataccagatttctatgtcaaatgccatcacttacatttctatataagctttcttgttgatcgacctacatactttaatattgctcaaaacccctctttttatgtttacttcctcttattttgtagggacctctcaagcaacaacctcaatggataaggcatattaaatagtaatgctccttccatttcataatgtgtaaggcatattaaatttcttttaagaacgaaactttataaacattgaccatcaaatagtaaataaaatacatgtagattcatatttcacgtggttttgtagtaattgagaatgatttcaagatgaattaatggtgaaagcattccttgaaagacttcttaaatcctaatatgccttgtaaaatgacaatggatggaatagtttacaacatgacaaactgtccacctgaaattaaaaggataaatattattaatttctaaaggttgttttatgccgtcattgcttatcttgtgtagcattacttcttcagcatcatgggagaaaatcttactgtcagggttcagaggatgttgtacggaatgaagttggttgatttgacgaagaagaaaacatttttagtcttgtggctgtgcgtctagctgttgatgcagctgatgagaagtcggctatagccgagagaatttcagtcatcctgcagaaatatgtcttcccatatgacttctttcgttgttggatttatcatcgagtggagagtggcaatacttagtctggccactacttgtgcttgccaactttgcttaggtaatttcttggcctacttttaagcggtgtcatctgtagacaaaatgag

SEQ ID NO: 58928 - DNA, 809 bp, Zea Mays
ctctccggtctccaaatctgactgctgcgccatagccctgttgccgtcgcccgctcgccctcatccctcacaatccttcaggcctccgtttctccgattagggcaacttcatggcgagcgggcacggatccaacgccagcgcctccgctccaacgacctctcccccctcaacgcctccgctgcccctctccctgttcggcgccgatggacaggaagaggagaaagggccgctcgaccgccaccgatggccatggcgtcacagtgtgccccgtccgtcccgcccaaccggtcagcaaacaatggcgtccaacgacagcgacgtggtgatgatgtacgggacacggcgctgctagagccgtccaagcagccctcagtgactttctccgtcaaggtattagaattcctggattccaaatctgagacggatgttgatgttgactataacagcttgtactcaaagcaggactttctacagggttactgaagaaaacctcgcagcactatttataaattgcggacagtctgacgatgaatgtgaaatgtgtgctaggactatctactgcacaaacattgacaagaaggtcactcaagcagatctaaagttattctttgagtccatatgtggtgagatcgatctggagaccaacaagatcatggacttcatcaagtttgacgtcggcaatgtggtcatgatgaccggtgggaggaacaccgggcgtgtaggagcgatcaagaacagggagaagcacaagggcaagggcagcttcgagaccatccacgtgctgcttggagctttttgctatgtctag

SEQ ID NO: 58929 - DNA, 4196 bp, Zea Mays
caggctcaaacggacgagacgaacgattggacggacctgatcctgaccgacgggggcggttcgtttgaaagtcagcagcgacaaatgcgacgcggggtggactcgccccgtctcctccttccgcaccccccttttccctccatccaatccaggccttcattgcctgagccgaacctcccatccaccacctcctccctccgccgcccctggacctccctcccagcgagtcaatcgcccacaacacacgcgcagcagtaagaagaggatctgattcgatcggaggagacctagtgacgccgccaaatcgaatcgaatttcttggcaacagcaacagtaacaaaaactagattctggattcgtcccattttttgcactagggaaataaaatgaggctggtggtacgcgtcatcgaggcgcggggcctcccgcccacggacgcagacgggacgcgggacccctacgccaaggcgcagctcgggaagcagcgggccaagaccaaggtgatgcgcaagacgctctgccccgcctgggacgaggagttcgccttccgggtcggggacctcagggacaacctcctcgtctccgtgttccacgaggaccgctacttcgccgccgacgtcctcggccaggtcaagttgcccctcaccgccgtgctcgacgccgacaaccgcacgctcggaacgcagtggtaccaactgcagcccaagagcaagaagtccaagctcaaggattgcggagaaattcgtctcaacgtttctctggctcaaaactactctgaagaagagacgacggcacctgcacattgggcctcagatgaccttgcatcaaattcagacaaatcaactgaattggtgaaaggatcttctttgctgaatgttcctattgaagtatccacagcagtaccagagatctatgagatagaagctgccgaggaggataaatcaaacgctgctccatcatttgtcaacaagctatatcaaatgtttaatagtaaaccaaaagatacagaagcttctgccccacttccctccaagctgaacgacccttcagatattgccgaagaaacactgtcaaccagctctgaagctcctgagaagcaggatcatgatgtcagtgcaactatgacctttgatgagctactaaaggccttcggttctcagcatgaagggaaagaaatgcctgaaaatttgtctggtggagttgttcttgatcaagtttatgctgttgcaccgagtgacctgaacacacttcttttctctccaagttcagactttctgcagtcacttgcggagattcaaggaactacaggtcttgaaattcaacaatggcgacttgaaaatgacggtgaaatcctgaggagggtggtaagctacacaaaagctcctaccaaactagttaaggccgtgaaagcaacagaggacatgacatatttgaaggcagatggagagatgtttgcagtttttgcagatgttagtactcctgaagttccttttggcaatactttcagagtggaggttttgacctgtataatgccaggacctgaactacgaggtgacgaaaaatcttcacgtcttatggtctcttggcacataaattttgtccaaagtaccatgatgaagagcatgattgaaaatggagccaaacaaggcttgaaggataactatgttcagttctctgagctgctggctaaacattgtaggccagttgatacaaaagatacaactagcagtaatgaagtgctttcttctgtgcaaccagagcaagaatctgactggaagctagcttttcgaatatttggaaatttcgcacttttgtcctcagtttttgcatttttttatgtttctgcacacatcatccttgcaagccctagtataattcaaggtcttgagttcccgggcctggacctgccagattctgctggtgaagttgtagtttgtggagttcttgttctacaaggacagcgtgtgctaaatatgattgcacgatttatccaggcgaagaggcagagaggtgatcatggagtcaaagcacaaggggatggctggttgctgactgttgctctgatggagggaaccaacttggcagcaaccaaatcatctggttactctgatccatatgttgtatttacatgcaatgggaagacaaagacaagttcgattaactttcacacccttgaccctcagtggaatgaaatttttgaatttgacgccatggaagatcctccatcagtgatgaaaatacatgtgtatgatttcgatggaccctttgacgaagttgcatcccttggtcatgctgaagtgaatttcttgaaatataataatatatccgagcttgctgacatttggattcctttgaaaggaaagctggctcaagcatgccagtcaaaattgcatctaagaatcttcttaaacaatacaaggggtactgaagtcgtgaaggattacctggataaagtggagaaagaagttggcaaaaagattgctatgaggtctcctcacacaaacttagcattccagaaaatcttttctttgccaccagaagaatttcttatcaatgattttacttgtcacttaaagaggaaaatgctaacacagggtcgtatttttctatctccaagaatatttgggttttacacaaatctttttggccacaaaacaaaattcttctttctttgggaagatattgaagacatcctactggtccctgcaaccctgtcttccatgggaagtccgtctctggttattattcttcgaaaggacagaggaatggatgcaaagcatggagcaaagcaactggacagtcaagggagactaaagttccatttccagtcttttgtttcattcaatgtggcacataaaacaattacagcactgtggaaggcaaggtccttaacccctgaacaaaaggtacagcttgtagaagaggaatcagaaacagaagacttccaaaatgaggagggagaatctttgttagggatagaggatgccaaaatgtcaggagttttttcatgtacaaaaccttttgatgtatcaacactaatgggcatatttgagggtggtcctttggagtgccgggtgatggagaaagttggctgtatggactactctgttacagcatgggaacctgtcagagctgatatttaccagaggcaagttcattataagtttgacaagaaatcagcacggcacggaggagaagcaatgagcacccagcaaaagtcccctttgtctaataagaatggctggcttgttgaagaagtgatgacacttgaaggtatccctgttggcgaatgtttcaatctccatatccgataccaactggagagcaatgcatccaagcacaagacatgcacaatccaggtatttattggcatagtatggctaaagagctgcaagaaccgaaagaagatcacgcaggatgtagcaaccagtgcatcttctcgcctgaagaagatattcaaccaacttgagaaggaatctataccagcaaagtaggaaccttgtttttgtctgcgtcctacttttgctgctgcacatatgctggcactatgtttgtccttgctggctgctgcccatgctgagcaaagatcagtgacctaatgaggaagttgcagcacaagccaaagccctcaggcagagttttataaagcaacacgaagcaaggaccgcattgcaagatttcagattagagaactaactgtagagcctggaacgtggtttagcttaaccatgtatacataacgttcaaacatcgttctgacttctacaaaaagttaagaggatctgaaattctaaatcttgcctacgcctttttagttagattggaagcaaagatagcttccatgaccacagaaaaataactattcttttcctgttgtaatttctagaagttttgagatattttgtctggtttaaatgcggtgtgtcagcttaatggcaatagccatgacacctctccgccccatgtggaggcggctctctgggaccagttaggcattcacaagtagaggctgcaggtattgaagcatcacccggagcagtacttggtaattttctcagattttagggatcgacagagggtggttcgtcaaggggccattccgcacaggggccgcactttcaactttgaagcatggactgagcgaaggtatggatcgctggctcgttgggaatttcgggtgcaccttcgcattgagg

SEQ ID NO: 58930 - DNA, 4447 bp, Zea Mays
cggacctgatcctgaccgacgggggcggttcgtttgaaagtcagcagcgacaaatgcgacgcggggtggactcgccccgtctcctccttccgcaccccccttttccctccatccaatccaggccttcattgcctgagccgaacctcccatccaccacctcctccctccgccgcccctggacctccctcccagcgagtcaatcgcccacaacacacgcggttcgttcttactggtttccaggagggaggtgtttttttcccattttctttgtgtgtgtttgcgctgctgccttcttatcaagtcttcttgcacgtccttctcttctctcccggattcatgcttggcgatatttagactgttttcgtctgagattctttctgcctcctgcgttcttggtccccggccagcagtcggcaatatcgctctgtcgatcctcctgatacttcgtcttccattggttttttaatcccatgtgagcagcagcagtaagaagaggatctgattcgatcggaggagacctagtgacgccgccaaatcgaatcgaatttcttggcaacagcaacagtaacaaaaactagattctggattcgtcccattttttgcactagggaaataaaatgaggctggtggtacgcgtcatcgaggcgcggggcctcccgcccacggacgcagacgggacgcgggacccctacgccaaggcgcagctcgggaagcagcgggccaagaccaaggtgatgcgcaagacgctctgccccgcctgggacgaggagttcgccttccgggtcggggacctcagggacaacctcctcgtctccgtgttccacgaggaccgctacttcgccgccgacgtcctcggccaggtcaagttgcccctcaccgccgtgctcgacgccgacaaccgcacgctcggaacgcagtggtaccaactgcagcccaagagcaagaagtccaagctcaaggattgcggagaaattcgtctcaacgtttctctggctcaaaactactctgaagaagagacgacggcacctgcacattgggcctcagatgaccttgcatcaaattcagacaaatcaactgaattggtgaaaggatcttctttgctgaatgttcctattgaagtatccacagcagtaccagagatctatgagatagaagctgccgaggaggataaatcaaacgctgctccatcatttgtcaacaagctatatcaaatgtttaatagtaaaccaaaagatacagaagcttctgccccacttccctccaagctgaacgacccttcagatattgccgaagaaacactgtcaaccagctctgaagctcctgagaagcaggatcatgatgtcagtgcaactatgacctttgatgagctactaaaggccttcggttctcagcatgaagggaaagaaatgcctgaaaatttgtctggtggagttgttcttgatcaagtttatgctgttgcaccgagtgacctgaacacacttcttttctctccaagttcagactttctgcagtcacttgcggagattcaaggaactacaggtcttgaaattcaacaatggcgacttgaaaatgacggtgaaatcctgaggagggtggtaagctacacaaaagctcctaccaaactagttaaggccgtgaaagcaacagaggacatgacatatttgaaggcagatggagagatgtttgcagtttttgcagatgttagtactcctgaagttccttttggcaatactttcagagtggaggttttgacctgtataatgccaggacctgaactacgaggtgacgaaaaatcttcacgtcttatggtctcttggcacataaattttgtccaaagtaccatgatgaagagcatgattgaaaatggagccaaacaaggcttgaaggataactatgttcagttctctgagctgctggctaaacattgtaggccagttgatacaaaagatacaactagcagtaatgaagtgctttcttctgtgcaaccagagcaagaatctgactggaagctagcttttcgaatatttggaaatttcgcacttttgtcctcagtttttgcatttttttatgtttctgcacacatcatccttgcaagccctagtataattcaaggtcttgagttcccgggcctggacctgccagattctgctggtgaagttgtagtttgtggagttcttgttctacaaggacagcgtgtgctaaatatgattgcacgatttatccaggcgaagaggcagagaggtgatcatggagtcaaagcacaaggggatggctggttgctgactgttgctctgatggagggaaccaacttggcagcaaccaaatcatctggttactctgatccatatgttgtatttacatgcaatgggaagacaaagacaagttcgattaactttcacacccttgaccctcagtggaatgaaatttttgaatttgacgccatggaagatcctccatcagtgatgaaaatacatgtctggctcaagcatgccagtcaaaattgcatctaagaatcttcttaaacaatacaaggggtactgaagtcgtgaaggattacctggataaagtggagaaagaagttggcaaaaagattgctatgaggtctcctcacacaaacttagcattccagaaaatcttttctttgccaccagaagaatttcttatcaatgattttacttgtcacttaaagaggaaaatgctaacacagggtcgtatttttctatctccaagaatatttgggttttacacaaatctttttggccacaaaacaaaattcttctttctttgggaagatattgaagacatcctactggtccctgcaaccctgtcttccatgggaagtccgtctctggttattattcttcgaaaggacagaggaatggatgcaaagcatggagcaaagcaactggacagtcaagggagactaaagttccatttccagtcttttgtttcattcaatgtggcacataagtaagtacattttcttgcatgatacgtattaacccagtaataagggctgtctacctttctgtctatttacacctcacctgtttggttctgtttcttcatgagtatgtttgtttaaaacgccaatggcctgctctacagaacaattacagcactgtggaaggcaaggtccttaacccctgaacaaaaggtacagcttgtagaagaggaatcagaaacagaagacttccaaaatgaggagggagaatctttgttagggatagaggatgccaaaatgtcaggagttttttcatgtacaaaaccttttgatgtatcaacactaatgggcatatttgagggtggtcctttggagtgccgggtgatggagaaagttggctgtatggactactctgttacagcatgggaacctgtcagagctgatatttaccagaggcaagttcattataagtttgacaagaaatcagcacggcacggaggagaagcaatgagcacccagcaaaagtcccctttgtctaataagaatggctggcttgttgaagaagtgatgacacttgaaggtatccctgttggcgaatgtttcaatctccatatccgataccaactggagagcaatgcatccaagcacaagacatgcacaatccaggtatttattggcatagtatggctaaagagctgcaagaaccgaaagaagatcacgcaggatgtagcaaccagtgcatcttctcgcctgaagaagatattcaaccaacttgagaaggaatctataccagcaaagtaggaaccttgtttttgtctgcgtcctacttttgctgctgcacatatgctggcactatgtttgtccttgctggctgctgcccatgctgagcaaagatcagtgacctaatgaggaagttgcagcacaagccaaagccctcaggcagagttttataaagcaacacgaagcaaggaccgcattgcaagatttcagattagagaactaactgtagagcctggaacgtggtttagcttaaccatgtatacataacgttcaaacatcgttctgacttctacaaaaagttaagaggatctgaaattctaaatcttgcctacgcctttttagttagattggaagcaaagatagcttccatgaccacagaaaaataactattcttttcctgttgtaatttctagaagttttgagatattttgtctggtttaaatgcggtgtgtcagcttaatggcaatagccatgacacctctccgccccatgtggaggcggctctctgggaccagttaggcattcacaagtagaggctgcaggtattgaagcatcacccggagcagtacttggtaattttctcagattttagggatcgacagagggtggttcgtcaaggggccattccgcacaggggccgcactttcaactttgaagcatggactgagcgaaggtatggatcgctggctcgttgggaatttcgggtgcaccttcgcattgagg

SEQ ID NO: 58931 - DNA, 1164 bp, Zea Mays
atgcagggaggaagggaagataccaccgaagggatgatgaggatagggaggatccgggccgtggaggtcgccatcttcggagcaggtcttggtgggatgggagaggctctcattgtcggggggctgttgatgactgctattccaacaacaacaagcatcattttaggggcagttcctcctatcgcagccgtggtctttcccaaaattcttggggggcatggctcttggctttccaaccaggtggctgttgtggaactgcagcacaagggtacctacccgttaaagcctccaagcatcggcaaaaacgtctcttttgcctcccccatcgcaactgttctaggggggcacaactcttcggtgatgtgcgaggagcggcagaattctgttgctcgggtggggagtgcggcgtcccccccaaccatgatggaggtggatggctcaaatttgtcggccaacactgctgctcttgaaccatctctgcttctttctgaggtacaaccttctccatgcctagtggattttattagttcgataacaagaccagtttcccctcccctgattgcgcaaacacctctcacaaaccctgatagaactggtctgaaccggtttcctcatgaaagcaatcactctgctcctcaccttattatccctacagacagcttgaaccatataccctctgatattgctgttgaaccagccttaccacaacctcatgtacatgaaacaaatgggtacagtcctttgcatattatgggagcagcctcagaaccaacctcaaccccccaagatcagctgccaaaaacagttccattttctggaccttccacctccacacaaatgccaattaaaacagttgcctacgctcttgtgcagcattttgatcaaccactgtccaaaggaaagattgaggccatcaagaacctgctggaaaatgggaagcagttgaagaagaaggccaggggcaccaaagtcgcgccagctgttctggcttgcccatctgcgctgggctaatgttggagctggctcattagggtcgtcttcctatatttatccatgttacagtctgctggagtgttgataatggttatgtgtcagggtctgttcccttttggtagttttaaaactaggccttcctacaagtgtgtggaacgtagtaaggtgtca

SEQ ID NO: 58932 - DNA, 2048 bp, Zea Mays
cttccacagcattaccgccgcctcttccacatgaggcttcaattcaaggcgcccaatgcaactcccttttctcttgtccctgtcctttccgcaacagagcttgtgagcttgaccagcgagaggcgagtggctaggacctaggcctccgatccatgcaggtccctgtgggtttcctcggcaagctctggagcttcgtttccttcgtgcccttcttcgtcctcctcctgcttctgggatccatcaaagctgccctagtcggcccggtcacagcttccatcgtattcttcgggagctctgcggttattattggcctctggcctgctcatttcatctggacatactactgcgttcttaaaaaggatcgggctgcagttgaagattcttactggactactgctgccattgccactgcttctcttgccagtacttgctagcatcgggagtctcctgggtggtactggatacggagtttgcgtacctctcatggcgaccttcgaggctgttggcgagggtgtcactgacaagctgacccattgtttcacggatggaaccgtaagcgcgatggctggagcttgcacggttgtccgtgatgtcaccgatttctgcttccactcgtacttctctttcatggatgatcttattgacaaaatgggggacaatgaagaagcccctctcgacatcaagttgtcttatctaccacggagcatggtcgttgccttaatcgccgttccagtggatgtgctgctgataagcgcagtggctttgtggaaaagcccctgcatgttgttcaaaggatggcagaggttatgtgaggatctagttggaagggaagggccgttcttagaaactgtctgcgtgccttttgctggtttggccattgtgttatggccacttgcggtgattggggggttacttgcttcatttttcagcagcttcttcttcggttttcgcgcgggactggttgcttatcaggaggcttctttccaaatgggacttgcatacatgatttcagcagtagcaattttcgatgaatacaccaatgacttgctttacctaagagaaggatcatgccttccaaggcccaagtatcggagagcagatatcatgagggagtgtgaaactgagcctgcagagaggcaacaaactggccatcacaagcatagaaggacgttacctcgatcaaagacgttcatgcaaaccgtccagcgactacgaccgattcaaatatgggattggttcttccggtcctgtgagctcaatggaaggatactactgagcgagggcctgattactgcccaagacatggagcaatacatcaccaatggaaaatgcaagaagctggacactaaattaccctgctggtgtatcttccagtgcctattacgatctgcgaactctgattcagacggtttggtcatatagtccttgactggctgctcggaccactcctgctcatcaaggatcaaatgaagaaactggaggtcaccgaagacgaggagatgtgcctgaggaagctgatcatgacaagcaagaacgagaagccatctgactgggacgattcgggtttcccgtcagacgacaacataaagagaggccagctgcagtcgataatcagaaggttgcaagggattgtggcctacatgtcccgagtgccgagtttcaggaggcgcttcatcaacctggtcaaggccatgtatctagaggccatcgaagcaggggccatcgacggatcgcgcaaagttaaggcggatgtggctgacaggtgtgcggaagatattgccggttcatgttcatcaaccgacacgccagcgaacattcacatggtctgatgatgtttcaccagcatagcagagctcgacgagctgtgctgaattctgctatttcttctgtaaaaagaactgtgctgaattgttgtgctaaactgtgccaaggctgcaaacaaatacaatcgagcgaccatatcttctcattagcaatatggcatataatttttgtctaatggtcgtcagatggttaaaaaaatctgttaatacaaacaggaaactccg

SEQ ID NO: 58933 - DNA, 2097 bp, Zea Mays
cttccacagcattaccgccgcctcttccacatgaggcttcaattcaaggcgcccaatgcaactcccttttctcttgtccctgtcctttccgcaacagagcttgtgagcttgaccagcgagaggcgagtggctaggacctaggcctccgatccatgcaggtccctgtgggtttcctcggcaagctctggagcttcgtttccttcgtgcccttcttcgtcctcctcctgcttctgggatccatcaaagctgccctagtcggcccggtcacagcttccatcgtattcttcgggagctctgcggttattattggcctctggcctgctcatttcatctggacatactactgcgttcttaaaaaggatcgggctgcagttgaagattcttactggactactgctgccattgccactgcttctcttgccagtacttgctagcatcgggagtctcctgggtggtactggatacggagtttgcgtacctctcatggcgaccttcgaggctgttggcgagggtgtcactgacaagctgacccattgtttcacgctgcaggatggaaccgtaagcgcgatggctggagcttgcacggttgtccgtgatgtcaccgatttctgcttccactcgtacttctctttcatggatgatcttattgacaaaatgggggacaatgaagaagcccctctcgacatcaagttgtcttatctaccacggagcatggtcgttgccttaatcgccgttccagtggatgtgctgctgataagcgcagtggctttgtggaaaagcccctgcatgttgttcaaaggatggcagaggttatgtgaggatctagttggaagggaagggccgttcttagaaactgtctgcgtgccttttgctggtttggccattgtgttatggccacttgcggtgattggggggttacttgcttcatttttcagcagcttcttcttcggttttcgcgcgggactggttgcttatcaggaggcttctttccaaatgggacttgcatacatgatttcagcagtagcaattttcgatgaatacaccaatgacttgctttacctaagagaaggatcatgccttccaaggcccaagtatcggagagcagatatcatgagggagtgtgaaactgagcctgcagagaggcaacaaactggccatcacaagcatagaaggacgttacctcgatcaaagacgttcatgcaaaccgtccagcgactacgaccgattcaaatatgggattggttcttccggtcctgtgagctcaatggaaggatactactgagcgagggcctgattactgcccaagacatggagcaatacatcaccaatggaaaatgcaagaagctggacactaaattaccctgctggtgtatcttccagtgcctattacgatctgcgaactctgattcagacggtttggtcatatctgatcatgtccaagtgacgaccctcaactggcccaaagacagagtccttgactggctgctcggaccactcctgctcatcaaggatcaaatgaagaaactggaggtcaccgaagacgaggagatgtgcctgaggaagctgatcatgacaagcaagaacgagaagccatctgactgggacgattcgggtttcccgtcagacgacaacataaagagaggccagctgcagtcgataatcagaaggttgcaagggattgtggcctacatgtcccgagtgccgagtttcaggaggcgcttcatcaacctggtcaaggccatgtatctagaggccatcgaagcaggggccatcgacggatcgcgcaaagttaaggcggatgtggctgacaggtgtgcggaagatattgccggttcatgttcatcaaccgacacgccagcgaacattcacatggtctgatgatgtttcaccagcatagcagagctcgacgagctgtgctgaattctgctatttcttctgtaaaaagaactgtgctgaattgttgtgctaaactgtgccaaggctgcaaacaaatacaatcgagcgaccatatcttctcattagcaatatggcatataatttttgtctaatggtcgtcagatggttaaaaaaatctgttaatacaaacaggaaactccg

SEQ ID NO: 58934 - DNA, 2062 bp, Zea Mays
cacagcattaccgccgcctcttccacatgaggcttcaattcaaggcgcccaatgcaactcccttttctcttgtccctgtcctttccgcaacagagcttgtgagcttgaccagcgagaggcgagtggctaggacctaggcctccgatccatgcaggtccctgtgggtttcctcggcaagctctggagcttcgtttccttcgtgcccttcttcgtcctcctcctgcttctgggatccatcaaagctgccctagtcggcccggtcacagcttccatcgtattcttcgggagctctgcggttattattggcctctggcctgctcatttcatctggacatactactgcgttcttaaaacagaaaggatcgggctgcagttgaagattcttactggactactgctgccattgccactgcttctcttgccagtacttgctagcatcgggagtctcctgggtggtactggatacggagtttgcgtacctctcatggcgaccttcgaggctgttggcgagggtgtcactgacaagctgacccattgtttcacggatggaaccgtaagcgcgatggctggagcttgcacggttgtccgtgatgtcaccgatttctgcttccactcgtacttctctttcatggatgatcttattgacaaaatgggggacaatgaagaagcccctctcgacatcaagttgtcttatctaccacggagcatggtcgttgccttaatcgccgttccagtggatgtgctgctgataagcgcagtggctttgtggaaaagcccctgcatgttgttcaaaggatggcagaggttatgtgaggatctagttggaagggaagggccgttcttagaaactgtctgcgtgccttttgctggtttggccattgtgttatggccacttgcggtgattggggggttacttgcttcatttttcagcagcttcttcttcggttttcgcgcgggactggttgcttatcaggaggcttctttccaaatgggacttgcatacatgatttcagcagtagcaattttcgatgaatacaccaatgacttgctttacctaagagaaggatcatgccttccaaggcccaagtatcggagagcagatatcatgagggagtgtgaaactgagcctgcagagaggcaacaaactggccatcacaagcatagaaggacgttacctcgatcaaagacgttcatgcaaaccgtccagcgactacgaccgattcaactcaatggaaggatactactgagcgagggcctgattactgcccaagacatggagcaatacatcaccaatggaaaatgcaagaagctggacactaaattaccctgctggtgtatcttccagtgcctattacgatctgcgaactctgattcagacggtttggtcatatctgatcatgtccaagtgacgaccctcaactggcccaaagacagagtccttgactggctgctcggaccactcctgctcatcaaggatcaaatgaagaaactggaggtcaccgaagacgaggagatgtgcctgaggaagctgatcatgacaagcaagaacgagaagccatctgactgggacgattcgggtttcccgtcagacgacaacataaagagaggccagctgcagtcgataatcagaaggttgcaagggattgtggcctacatgtcccgagtgccgagtttcaggaggcgcttcatcaacctggtcaaggccatgtatctagaggccatcgaagcaggggccatcgacggatcgcgcaaagttaaggcggatgtggctgacaggtgtgcggaagatattgccggttcatgttcatcaaccgacacgccagcgaacattcacatggtctgatgatgtttcaccagcatagcagagctcgacgagctgtgctgaattctgctatttcttctgtaaaaagaactgtgctgaattgttgtgctaaactgtgccaaggctgcaaacaaatacaatcgagcgaccatatcttctcattagcaatatggcatataatttttgtctaatggtcgtcagatggttaaaaaaatctgttaatacaaacaggaaactccg

SEQ ID NO: 58935 - DNA, 2084 bp, Zea Mays
cgcctcttccacatgaggcttcaattcaaggcgcccaatgcaactcccttttctcttgtccctgtcctttccgcaacagagcttgtgagcttgaccagcgagaggcgagtggctaggacctaggcctccgatccatgcaggtccctgtgggtttcctcggcaagctctggagcttcgtttccttcgtgcccttcttcgtcctcctcctgcttctgggatccatcaaagctgccctagtcggcccggtcacagcttccatcgtattcttcgggagctctgcggttattattggcctctggcctgctcatttcatctggacatactactgcgttcttaaaacagaaaggatcgggctgcagttgaagattcttactggactactgctgccattgccactgcttctcttgccagtacttgctagcatcgggagtctcctgggtggtactggatacggagtttgcgtacctctcatggcgaccttcgaggctgttggcgagggtgtcactgacaagctgacccattgtttcacgctgcaggatggaaccgtaagcgcgatggctggagcttgcacggttgtccgtgatgtcaccgatttctgcttccactcgtacttctctttcatggatgatcttattgacaaaatgggggacaatgaagaagcccctctcgacatcaagttgtcttatctaccacggagcatggtcgttgccttaatcgccgttccagtggatgtgctgctgataagcgcagtggctttgtggaaaagcccctgcatgttgttcaaaggatggcagaggttatgtgaggatctagttggaagggaagggccgttcttagaaactgtctgcgtgccttttgctggtttggccattgtgttatggccacttgcggtgattggggggttacttgcttcatttttcagcagcttcttcttcggttttcgcgcgggactggttgcttatcaggaggcttctttccaaatgggacttgcatacatgatttcagcagtagcaattttcgatgaatacaccaatgacttgctttacctaagagaaggatcatgccttccaaggcccaagtatcggagagcagatatcatgagggagtgtgaaactgagcctgcagagaggcaacaaactggccatcacaagcatagaaggacgttacctcgatcaaagacgttcatgcaaaccgtccagcgactacgaccgattcaaatatgggattggttcttccggtcctgtgagctcaatggaaggatactactgagcgagggcctgattactgcccaagacatggagcaatacatcaccaatggaaaatgcaagaagctggacactaaattaccctgctggtgtatcttccagtgcctattacgatctgcgaactctgattcagacggtttggtcatatctgatcatgtccaagtgacgaccctcaactggcccaaagacagagtccttgactggctgctcggaccactcctgctcatcaaggatcaaatgaagaaactggaggtcaccgaagacgaggagatgtgcctgaggaagctgatcatgacaagcaagaacgagaagccatctgactgggacgattcgggtttcccgtcagacgacaacataaagagaggccagctgcagtcgataatcagaaggttgcaagggattgtggcctacatgtcccgagtgccgagtttcaggaggcgcttcatcaacctggtcaaggccatgtatctagaggccatcgaagcaggggccatcgacggatcgcgcaaagttaaggcggatgtggctgacaggtgtgcggaagatattgccggttcatgttcatcaaccgacacgccagcgaacattcacatggtctgatgatgtttcaccagcatagcagagctcgacgagctgtgctgaattctgctatttcttctgtaaaaagaactgtgctgaattgttgtgctaaactgtgccaaggctgcaaacaaatacaatcgagcgaccatatcttctcattagcaatatggcatataatttttgtctaatggtcgtcagatggttaaaaaaatctgttaatacaaacaggaaactccg

SEQ ID NO: 58936 - DNA, 2227 bp, Zea Mays
tttaaatttccacggaatgaaatatcttctccgtcgccgggcctcccgtccgaatcggatattttttgcgcaccagttctgtcttctgtgggctatccgcctatcccccaaggccccaacccatcactttccacgccgccggccgctgcgctcccagtccggagagacatggactcggaacccgatgtcgagcttcggggccttgacatcgacgtagaacttgacccggaggaccttcagccgtcggtgcccctcaaaaaggtccccggcggcgacctcttcgaggcggcgcgggccggggattgcgaccgcctcgccctcctcctcgacgccggcgccaacgtcaacgcgcgtgaccgttgggactccgtcgcgctctattacgcctgcctggcgggacacgccgaggccgcgcggatgttgctcgaggccggcgccgtctgcgccgagcgcaccttcgacggcgaccgttgccactacgcggccctcaacctgcgcttacgctggctgctcaagtcgttcgaggccaggccgccaccgctcgcgccgctccccaccgcgctgcgggcgacgttccttgcctgccctgccaaccgcaccgctttcctcgagatgctccaggggagcgccggcgccgaatccgccgccctcgccgcggccgccggatttggcccaaaggatgatccatcaagtgcttgccttttccctccagatatcacattctatgtggacagaaagcctgttgaagctcatcgggtcatcctttgtgcccgatctcctttcttcgaaaagaagttcaagacagactggaaagacaggaaggaaactcgaggtagctgttgacgacatggaaaatttggcgcgtgcatgcaaagtttgcaagtgcgaggagttgcaaaaagttttggataaagaagttgtgcatcagaagtatgcggagtacaagtcagcaagagaactggatatggacagctcacagaaacgattcatcttacaagcgcaatccttgcctgaggaagatcgccttccatcagccttgcagcgtattctgcagacttgtctagcaaactcaagagaaggttactgtagtgaggaatcaaatgagatgataaggaactcagaggatgatgatcttgcagatctttatattaaagtaactgtggctttgaagctgctcagaatgttccgcttcttgaggagcatgacataagtgcagaagcatttgaaaagatgctcgaatacatgtatactgataagctagagcatttggaccctggccaggctgaagaactatttgatgttgcatcaaggtacctgctgtttccccttaagcgggttgtagctgatatgctgctgccatatctcgaacatgtttcgcctgcagaactgtgccactggttgatgatgtcagacatatacggtgtcatgaaaataagggagtatatcttggatatcattgcttgcaactttgagatgtttgcagccacccgggagttccgggccttgctcttgactcttccaccaccatccggagatgactcactacggacaacacgtcccagtgcacctgggactggaggcaacaccgaccaaggcaacattcttgatgatttgcgtgagaagtggctagaagcagagggtgccgagctcgacgagagggatgagagtgcagctctgttcgacaagcgactggagatgcttatgctagttgcagagaaagaagccgatgatgaagacgcttgagtttcggagagtacgtgtgctagggtagcattgtttttgcattcttcactgcgcagttgtttaggtttgtgagttacaagttcatcttttgttgtatgaacttcaaacagatcagttttgacccatcaagtatccagtgagcaagtatttatgaacgaattaaacgatgtaagtttcttgcatataatatgcgattttgatgtagggtctagatgatagaactcctagagctaatagctagctagttaataaattattagttagattaagtcagctaatgaactaattattagttgtgaggtatctaactattagctatagcattagctgagtttgtttgaaactcaacaagtaatttttagtagctaactattacttctagagtttcaaacatagttttagttttatgctccctgtaaagtgctttttcattgcccgattgatcgagacctgctcatggaataaaactaagatgtttcttagg

SEQ ID NO: 58937 - DNA, 1736 bp, Zea Mays
gcccacatttcttcgagttctcgttgttgagctctgttgatggatttggcccaaaggatgatccatcaagtgcttgccttttccctccagatatcacattctatgtggacagaaagcctgttgaagctcatcgggtcatcctttgtgcccgatctcctttcttcgaaaagaagttcaagacagactggaaagacaggaaggaagtgagattttctaaccaaaagttgtattttggcgccttatacagcctcatccatttcttctattctgatagactcgaggtagctgttgacgacatggaaaatttggcgcgtgcatgcaaagtttgcaagtgcgaggagttgcaaaaagttttggataaagaagttgtgcatcagaagtatgcggagtacaagtcagcaagagaactggatatggacagctcacagaaacgattcatcttacaagcgcaatccttgcctgaggaagatcgccttccatcagccttgcagcgtattctgcagacttgtctagcaaactcaagagaaggttactgtagtgaggaatcaaatgagatgataaggaactcagaggatgatgatcttgcagatctttatattaaagtaggtgataaggttttccattgtcatcaggtgattttggcctcaaggtcagagtactttagagccaggctatctcgaactgttgattttcttgaaggtaactgtggctttgaagctgctcagaatgttccgcttcttgaggagcatgacataagtgcagaagcatttgaaaagatgctcgaatacatgctgaagaactatttgatgttgcatcaaggtacctgctgtttccccttaagcgggttgtagctgatatgctgctgccatatctcgaacatgtttcgcctgcagaactgtgccactggttgatgatgtcagacatatacggtgtcatgaaaataagggagtatatcttggatatcattgcttgcaactttgagatgtttgcagccacccgggagttccgggccttgctcttgactcttccaccaccatccggagatgactcactacggacaacacgtcccagtgcacctgggactggaggcaacaccgaccaaggcaacattcttgatgatttgcgtgagaagtggctagaagcagagggtgccgagctcgacgagagggatgagagtgcagctctgttcgacaagcgactggagatgcttatgctagttgcagagaaagaagccgatgatgaagacgcttgagtttcggagagtacgtgtgctagggtagcattgtttttgcattcttcactgcgcagttgtttaggtttgtgagttacaagttcatcttttgttgtatgaacttcaaacagatcagttttgacccatcaagtatccagtgagcaagtatttatgaacgaattaaacgatgtaagtttcttgcatataatatgcgattttgatgtagggtctagatgatagaactcctagagctaatagctagctagttaataaattattagttagattaagtcagctaatgaactaattattagttgtgaggtatctaactattagctatagcattagctgagtttgtttgaaactcaacaagtaatttttagtagctaactattacttctagagtttcaaacatagttttagttttatgctccctgtaaagtgctttttcattgcccgattgatcgagacctgctcatggaataaaactaagatgtttcttagg

SEQ ID NO: 58938 - DNA, 1754 bp, Zea Mays
ctcgttgttgagctctgttgatggatttggcccaaaggatgatccatcaagtgcttgccttttccctccagatatcacattctatgtggacagaaagcctgttgaagctcatcgggtcatcctttgtgcccgatctcctttcttcgaaaagaagttcaagacagactggaaagacaggaaggaagtgagattttctaaccaaaagttgtattttggcgccttatacagcctcatccatttcttctattctgatagactcgaggtagctgttgacgacatggaaaatttggcgcgtgcatgcaaagtttgcaagtgcgaggagttgcaaaaagttttggataaagaagttgtgcatcagaagtatgcggagtacaagtcagcaagagaactggatatggacagctcacagaaacgattcatcttacaagcgcaatccttgcctgaggaagatcgccttccatcagccttgcagcgtattctgcagacttgtctagcaaactcaagagaaggttactgtagtgaggaatcaaatgagatgataaggaactcagaggatgatgatcttgcagatctttatattaaagtaggtgataaggttttccattgtcatcaggtgattttggcctcaaggtcagagtactttagagccaggctatctcgaactgttgattttcttgaaggtaactgtggctttgaagctgctcagaatgttccgcttcttgaggagcatgacataagtgcagaagcatttgaaaagatgctcgaatacatgtatactgataagctagagcatttggaccctggccaggctgaagaactatttgatgttgcatcaaggtacctgctgtttccccttaagcgggttgtagctgatatgctgctgccatatctcgaacatgtttcgcctgcagaactgtgccactggttgatgatgtcagacatatacggtgtcatgaaaataagggagtatatcttggatatcattgcttgcaactttgagatgtttgcagccacccgggagttccgggccttgctcttgactcttccaccaccatccggagatgactcactacggacaacacgtcccagtgcacctgggactggaggcaacaccgaccaaggcaacattcttgatgatttgcgtgagaagtggctagaagcagagggtgccgagctcgacgagagggatgagagtgcagctctgttcgacaagcgactggagatgcttatgctagttgcagagaaagaagccgatgatgaagacgcttgagtttcggagagtacgtgtgctagggtagcattgtttttgcattcttcactgcgcagttgtttaggtttgtgagttacaagttcatcttttgttgtatgaacttcaaacagatcagttttgacccatcaagtatccagtgagcaagtatttatgaacgaattaaacgatgtaagtttcttgcatataatatgcgattttgatgtagggtctagatgatagaactcctagagctaatagctagctagttaataaattattagttagattaagtcagctaatgaactaattattagttgtgaggtatctaactattagctatagcattagctgagtttgtttgaaactcaacaagtaatttttagtagctaactattacttctagagtttcaaacatagttttagttttatgctccctgtaaagtgctttttcattgcccgattgatcgagacctgctcatggaataaaactaagatgtttcttagg

SEQ ID NO: 58939 - DNA, 662 bp, Zea Mays
tcgcaaggcgtgcttgagctaaggatctgagaaagtgtataaattgattcttacaaagttcagtttcgtttgtcaatgagttgcttggatgttcattttctggtgcttttatctgcagaacctgatctaaggagactatagaagggggggaatggagaaattggagaaaataaaaggaaagcacagaacctatcctctggccgatttgggataagtgaaaatgggtaatgggacttggcaaacaccgaatagaacacaaacccaacaggtcagatgtgtggagctggtgtgctgcccaaagggaatgtggggccgtgggggtgccaagggaataataagatgggaaattggggagacagccgaagcggaagaaggcagatccgccgcaagcacacaacttggggaaaaaggaaagcgaacctttttctaatttgacaactcgaggaagaagcggagccgatgaagaaagcgacgaatttctcaaagcggatgatgtcgtaaggacgaaacgatggaagacgaagcaacttgaagatggaagatgcggagggagcgaggaggaggagggacgagatggcaagagtgaggagaggcggtcgcagtcaaagcgtccagaagtcttgagaggcgaaggatatgtggtgaggccgaaggaataaaag

SEQ ID NO: 58940 - DNA, 775 bp, Zea Mays
aaatcacactccgatagcaaaaaaccaatgttgaacggattataataataaaactccaattacaatgttcaggatactattttttagaagcccagtcttgtcttgatgatacctggttcaaaaagctcgtcgggaagaggagcaaaacaaaccctatctaaaccgcggcggactcttcgtccagcaaggtttcccatccagatccggccacgccacttgctcctcttctccgccacaccgatggtgtacgtggattcctgggacgagttcgtggagcggtccgtgcagctcttccgcggcgaccccaacgccacccgctacgtgatgaagtaccggcactgcgaggggaagctcgtgctcaaggtcaccgacgaccgcgagtgcttgaagttcaagacagatcaagctcaagacgcaaagaagatggagaagctcaacaacatcttttttgctctcatgacacgtgggcctgatgttgatatcagtgaagtttcagggaaggaacaggcagagcaacagcaagcgaagaaaggaaagtttttccagtacagaaccgagaacaaactaaatgcactctatcatgaatgaatgcatgattgagaaacgcccaaggcttcaaccctgcttcgttttaatgcacgtgaagcgttttcatccatgttttctggtagaggaatgtagcttgatactctgcctgatcttatattgcgcactgcctgttggggttgggccatacgattttaggctattctcaatgggaatgaatttcgtagca

SEQ ID NO: 58941 - DNA, 2187 bp, Zea Mays
cagacatggatttggatattaaacctcacccgctggtaatccgttggatatccgaaattaaccattagtccattactgtcgacccacacatggacaccaatgaacaaatcgccatcccaccattgtccattgagcccaggcgtcaagcgccagcccattgcccactaaggcatcattccgccaaagacccaaagtggcaaacgcccaaatcgacaaaccctaatgacctaatccccaacccccagccggcagccgccgagcaaaccagctcatccggtcggtcatccactcatcctcatcccctgcccatctgatccgatcggtcatctcatcctcatcccctacccgatcggatcccctgctcatccgccgagcaccaccaggcagcaggctccagtcatcgagcaccagcaggagcacggcgcgctgcccagtaggagcacggccaagaggatgacgcccgcatcctgcctcttctcctctgctactggagcctctactgctaggagcacggctaggaggacaacacccgcatccagcaggagcaccagcaggaggaggacgcccatgctgctgccgttgagcgatgatctgatgcgcccccatcatggctcttctcctccctcacggcctcgcctcgatctgctgctgccggtgatctgctgctgccggatccgagcgccgtgcccacgggtcacggccagcgatatgcagggatcaagaatccaactttgagaaaaattgctcgagatgtaaatggcgccgccggagtaccagcagtacctcgtgcaggtgaccaagtaccaggccgcacagaactgcaaggctgccaggtcatggtgatttcacgtccgttaggctcgagaggtggactcaaacatgacatccaagttttgcaagttttgatgttggatgttaaatttctatgctcacccctcgtttggttattgatgtactatttccatctcatgtcacaaatttggcataaggaatgggtattggtggctactgactgtgtttgtttccacgtattatacatgtacaatggaacagttgataatagttttgcatgaactattggtgttggctatctaaaggacagaaaggcagacatgagcaacagatcccgctccatgggctgaaactgggattcgtgatggcagaaagtgctactgtcgctctcaattgtagcggtgtggtactgggatccttgccaataagtgtgtttttagggtgagcccgtccaagatgcccatgcgtccccgcgcccctcgccagctgatgtcgtactaggctaggggattgaagaagcacttgaagaggctcaatgcgcccaagcattggatgctcgacaagcttggcggagcttttgtaagtaaaaaatattttctagctttggtacctacaatcttctgtacttccccatttgtctaatgcttcaggttgttcttttttctgtagatctgtgtaccttatccttgctatactgtccatatatgctgtgtgcatgaaagtcttgcattgaaaatgtcatgtgctacaatcgttaggactattaatagatgttgctctgtctatctatccatttcatcgctggaaattcccatgccctttcatagtacgcctgtgaaatgctcgctgcttttctattggtttgtgtgcagttcatgctctgcaaggtgaggtctgttcagtttggccagaaaggtatcccctacctgaacacctacgatgatcgcaccatccgctaccccgacccgctcatcaaggccaacgacaccatcaagatcgatctagagaccaacaagatcatggacttcatcaagtttgacgtcggcaacgtggtcatggtgaccggcgggaggaacaccgggcgtgtaggagtgatcaagaacagggagaagcacaagggcagcttcgagaccatccacgtgctgcttggagctttttgctatgtctagttttttcctatttgttgtacaagaaaacataaaatggaattcaactttggtggccgcaaaagtttagagacttgatttcatataaagttaggctgaacattactgcaaacagttgtattttagtttagatttagagtacacttatgtatgtgttgtttgacaatgcttatttatgatatattgaatggtacttatttatattatattaattataatgttgttcaat

SEQ ID NO: 58942 - DNA, 1720 bp, Zea Mays
gtcaagcgccagcccattgcccactaaggcatcattccgccaaagacccaaagtggcaaacgcccaaatcgacaaaccctaatgacctaatccccaacccccagccggcagccgccgagcaaaccagctcatccggtcggtcatccactcatcctcatcccctgcccatctgatccgatcggtcatctcatcctcatcccctacccgatcggatcccctgctcatccgccgagcaccaccaggcagcaggctccagtcatcgagcaccagcaggagcacggcgcgctgcccagtaggagcacggccaagaggatgacgcccgcatcctgcctcttctcctctgctactggagcctctactgctaggagcacggctaggaggacaacacccgcatccagcaggagcaccagcaggaggaggacgcccatgctgctgccgttgagcgatgatctgatgcgcccccatcatggctcttctcctccctcacggcctcgcctcgatctgctgctgccggtgatctgctgctgccggatccgagcgccgtgcccacgggtcacggccagcgatatgcagggatcaagaatccaactttgagaaaaattgctcgagatgtaaatggcgccgccggagtaccagcagtacctcgtgcaggtgaccaagtaccaggccgcacagaactgcaaggctcgagaggtggactcaaacatgacatccaagttttgcaagttttgatgttggatgttaaatttctatgctcacccctcgtttggttattgatgtactatttccatctcatgtcacaaatttggcataaggaatgggtattggtggctactgactgtgtttgtttccacgtattatacatgtacaatggaacagttgataatagttttgcatgaactattggtgttggctatctaaaggacagaaaggcagacatgagcaacagatcccgctccatgggctgaaactgggattcgtgatggcagaaagtgctactgtcgctctcaattgtagcggtgtggtactgggatccttgccaataagtgtgtttttagggtgagcccgtccaagatgcccatgcgtccccgcgcccctcgccagctgatgtcgtactaggctaggggattgaagaagcacttgaagaggctcaatgcgcccaagcattggatgctcgacaagcttggcggagcttttttcatgctctgcaaggtgaggtctgttcagtttggccagaaaggtatcccctacctgaacacctacgatgatcgcaccatccgctaccccgacccgctcatcaaggccaacgacaccatcaagatcgatctagagaccaacaagatcatggacttcatcaagtttgacgtcggcaacgtggtcatggtgaccggcgggaggaacaccgggcgtgtaggagtgatcaagaacagggagaagcacaagggcagcttcgagaccatccacgtgctgcttggagctttttgctatgtctagttttttcctatttgttgtacaagaaaacataaaatggaattcaactttggtggccgcaaaagtttagagacttgatttcatataaagttaggctgaacattactgcaaacagttgtattttagtttagatttagagtacacttatgtatgtgttgtttgacaatgcttatttatgatatattgaatggtacttatttatattatattaattataatgttgttcaat

SEQ ID NO: 58943 - DNA, 1638 bp, Zea Mays
cgccagcccattgcccactaaggcatcattccgccaaagacccaaagtggcaaacgcccaaatcgacaaaccctaatgacctaatccccaacccccagccggcagccgccgagcaaaccagctcatccggtcggtcatccactcatcctcatcccctgcccatctgatccgatcggtcatctcatcctcatcccctacccgatcggatcccctgctcatccgccgagcaccaccaggcagcaggctccagtcatcgagcaccagcaggagcacggcgcgctgcccagtaggagcacggccaagaggatgacgcccgcatcctgcctcttctcctctgctactggagcctctactgctaggagcacggctaggaggacaacacccgcatccagcaggagcaccagcaggaggaggacgcccatgctgctgccgttgagcgatgatctgatgcgcccccatcatggctcttctcctccctcacggcctcgcctcgatctgctgctgccggtgatctgctgctgccggatccgagcgccgtgcccacgggtcacggccagcgatatgcagggatcaagaatccaactttgagaaaaattgctcgagatgtaaatggcgccgccggagtaccagcagtacctcgtgcaggtgaccaagtaccaggccgcacagaactgcaaggtcatggtgatttcacgtccgttaggctcgagaggtggactcaaacatgacatccaagttttgcaagttttgatgttggatgttaaatttctatgctcacccctcgtttggttattgatttgataatagttttgcatgaactattggtgttggctatctaaaggacagaaaggcagacatgagcaacagatcccgctccatgggctgaaactgggattcgtgatggcagaaagtgctactgtcgctctcaattgtagcggtgtggtactgggatccttgccaataagtgtgtttttagggtgagcccgtccaagatgcccatgcgtccccgcgcccctcgccagctgatgtcgtactaggctaggggattgaagaagcacttgaagaggctcaatgcgcccaagcattggatgctcgacaagcttggcggagcttttttcatgctctgcaaggtgaggtctgttcagtttggccagaaaggtatcccctacctgaacacctacgatgatcgcaccatccgctaccccgacccgctcatcaaggccaacgacaccatcaagatcgatctagagaccaacaagatcatggacttcatcaagtttgacgtcggcaacgtggtcatggtgaccggcgggaggaacaccgggcgtgtaggagtgatcaagaacagggagaagcacaagggcagcttcgagaccatccacgtgctgcttggagctttttgctatgtctagttttttcctatttgttgtacaagaaaacataaaatggaattcaactttggtggccgcaaaagtttagagacttgatttcatataaagttaggctgaacattactgcaaacagttgtattttagtttagatttagagtacacttatgtatgtgttgtttgacaatgcttatttatgatatattgaatggtacttatttatattatattaattataatgttgttcaat

SEQ ID NO: 58944 - DNA, 1918 bp, Zea Mays
ccagcccattgcccactaaggcatcattccgccaaagacccaaagtggcaaacgcccaaatcgacaaaccctaatgacctaatccccaacccccagccggcagccgccgagcaaaccagctcatccggtcggtcatccactcatcctcatcccctgcccatctgatccgatcggtcatctcatcctcatcccctacccgatcggatcccctgctcatccgccgagcaccaccaggcagcaggctccagtcatcgagcaccagcaggagcacggcgcgctgcccagtaggagcacggccaagaggatgacgcccgcatcctgcctcttctcctctgctactggagcctctactgctaggagcacggctaggaggacaacacccgcatccagcaggagcaccagcaggaggaggacgcccatgctgctgccgttgagcgatgatctgatgcgcccccatcatggctcttctcctccctcacggcctcgcctcgatctgctgctgccggtgatctgctgctgccggatccgagcgccgtgcccacgggtcacggccagcgatatgcagggatcaagaatccaactttgagaaaaattgctcgagatgtaaatggcgccgccggagtaccagcagtacctcgtgcaggtgaccaagtaccaggccgcacagaactgcaaggtcatggtgatttcacgtccgttaggctcgagaggtggactcaaacatgacatccaagttttgcaagttttgatgttggatgttaaatttctatgctcacccctcgtttggttattgatttgataatagttttgcatgaactattggtgttggctatctaaaggacagaaaggcagacatgagcaacagatcccgctccatgggctgaaactgggattcgtgatggcagaaagtgctactgtcgctctcaattgtagcggtgtggtactgggatccttgccaataagggtgagcccgtccaagatgcccatgcgtccccgcgcccctcgccagctgatgtcgtactaggctaggggattgaagaagcacttgaagaggctcaatgcgcccaagcattggatgctcgacaagcttggcggagcttttgtaagtaaaaaatattttctagctttggtacctacaatcttctgtacttccccatttgtctaatgcttcaggttgttcttttttctgtagatctgtgtaccttatccttgctatactgtccatatatgctgtgtgcatgaaagtcttgcattgaaaatgtcatgtgctacaatcgttaggactattaatagatgttgctctgtctatctatccatttcatcgctggaaattcccatgccctttcatagtacgcctgtgaaatgctcgctgcttttctattggtttgtgtgcagttcatgctctgcaaggtgaggtctgttcagtttggccagaaaggtatcccctacctgaacacctacgatgatcgcaccatccgctaccccgacccgctcatcaaggccaacgacaccatcaagatcgatctagagaccaacaagatcatggacttcatcaagtttgacgtcggcaacgtggtcatggtgaccggcgggaggaacaccgggcgtgtaggagtgatcaagaacagggagaagcacaagggcagcttcgagaccatccacgtgctgcttggagctttttgctatgtctagttttttcctatttgttgtacaagaaaacataaaatggaattcaactttggtggccgcaaaagtttagagacttgatttcatataaagttaggctgaacattactgcaaacagttgtattttagtttagatttagagtacacttatgtatgtgttgtttgacaatgcttatttatgatatattgaatggtacttatttatattatattaattataatgttgttcaat

SEQ ID NO: 58945 - DNA, 1742 bp, Zea Mays
gcccattgcccactaaggcatcattccgccaaagacccaaagtggcaaacgcccaaatcgacaaaccctaatgacctaatccccaacccccagccggcagccgccgagcaaaccagctcatccggtcggtcatccactcatcctcatcccctgcccatctgatccgatcggtcatctcatcctcatcccctacccgatcggatcccctgctcatccgccgagcaccaccaggcagcaggctccagtcatcgagcaccagcaggagcacggcgcgctgcccagtaggagcacggccaagaggatgacgcccgcatcctgcctcttctcctctgctactggagcctctactgctaggagcacggctaggaggacaacacccgcatccagcaggagcaccagcaggaggaggacgcccatgctgctgccgttgagcgatgatctgatgcgcccccatcatggctcttctcctccctcacggcctcgcctcgatctgctgctgccggtgatctgctgctgccggatccgagcgccgtgcccacgggtcacggccagcgatatgcagggatcaagaatccaactttgagaaaaattgctcgagatgtaaatggcgccgccggagtaccagcagtacctcgtgcaggtgaccaagtaccaggccgcacagaactgcaaggctgccaggtcatggtgatttcacgtccgttaggctcgagaggtggactcaaacatgacatccaagttttgcaagttttgatgttggatgttaaatttctatgctcacccctcgtttggttattgatgtactatttccatctcatgtcacaaatttggcataaggaatgggtattggtggctactgactgtgtttgtttccacgtattatacatgtacaatggaacagttgataatagttttgcatgaactattggtgttggctatctaaaggacagaaaggcagacatgagcaacagatcccgctccatgggctgaaactgggattcgtgatggcagaaagtgctactgtcgctctcaattgtagcggtgtggtactgggatccttgccaataagtgtgtttttagggtgagcccgtccaagatgcccatgcgtccccgcgcccctcgccagctgatgtcgtactaggctaggggattgaagaagcacttgaagaggctcaatgcgcccaagcattggatgctcgacaagcttggcggagcttttttcatgctctgcaaggtgaggtctgttcagtttggccagaaaggtatcccctacctgaacacctacgatgatcgcaccatccgctaccccgacccgctcatcaaggccaacgacaccatcaagatcgatctagagaccaacaagatcatggacttcatcaagtttgacgtcggcaacgtggtcatggtgaccggcgggaggaacaccgggcgtgtaggagtgatcaagaacagggagaagcacaagggcagcttcgagaccatccacgtgctgcttggagctttttgctatgtctagttttttcctatttgttgtacaagaaaacataaaatggaattcaactttggtggccgcaaaagtttagagacttgatttcatataaagttaggctgaacattactgcaaacagttgtattttagtttagatttagagtacacttatgtatgtgttgtttgacaatgcttatttatgatatattgaatggtacttatttatattatattaattataatgttgttcaat

SEQ ID NO: 58946 - DNA, 1658 bp, Zea Mays
attgcccactaaggcatcattccgccaaagacccaaagtggcaaacgcccaaatcgacaaaccctaatgacctaatccccaacccccagccggcagccgccgagcaaaccagctcatccggtcggtcatccactcatcctcatcccctgcccatctgatccgatcggtcatctcatcctcatcccctacccgatcggatcccctgctcatccgccgagcaccaccaggcagcaggctccagtcatcgagcaccagcaggagcacggcgcgctgcccagtaggagcacggccaagaggatgacgcccgcatcctgcctcttctcctctgctactggagcctctactgctaggagcacggctaggaggacaacacccgcatccagcaggagcaccagcaggaggaggacgcccatgctgctgccgttgagcgatgatctgatgcgcccccatcatggctcttctcctccctcacggcctcgcctcgatctgctgctgccggtgatctgctgctgccggatccgagcgccgtgcccacgggtcacggccagcgatatgcagggatcaagaatccaactttgagaaaaattgctcgagatgtaaatggcgccgccggagtaccagcagtacctcgtgcaggtgaccaagtaccaggccgcacagaactgcaaggtcatggtgatttcacgtccgttaggctcgagaggtggactcaaacatgacatccaagttttgcaagttttgatgttggatgttaaatttctatgctcacccctcgtttggttattgatgtactatttccatctcatgtcacaaatttggcataaggaatgggtattggtggctactgactgtgtttgtttccacgtattatacatgtacaatggaacagttgataatagttttgcatgaactattggtgttggctatctaaaggacagaaaggcagacatgagcaacagatcccgctccatgggctgaaactgggattcgtgatggcagaaagtgctactgtcgctctcaattgtagcggtgtggtactgggatccttgccaataaggctaggggattgaagaagcacttgaagaggctcaatgcgcccaagcattggatgctcgacaagcttggcggagcttttttcatgctctgcaaggtgaggtctgttcagtttggccagaaaggtatcccctacctgaacacctacgatgatcgcaccatccgctaccccgacccgctcatcaaggccaacgacaccatcaagatcgatctagagaccaacaagatcatggacttcatcaagtttgacgtcggcaacgtggtcatggtgaccggcgggaggaacaccgggcgtgtaggagtgatcaagaacagggagaagcacaagggcagcttcgagaccatccacgtgctgcttggagctttttgctatgtctagttttttcctatttgttgtacaagaaaacataaaatggaattcaactttggtggccgcaaaagtttagagacttgatttcatataaagttaggctgaacattactgcaaacagttgtattttagtttagatttagagtacacttatgtatgtgttgtttgacaatgcttatttatgatatattgaatggtacttatttatattatattaattataatgttgttcaat

SEQ ID NO: 58947 - DNA, 1626 bp, Zea Mays
attgcccactaaggcatcattccgccaaagacccaaagtggcaaacgcccaaatcgacaaaccctaatgacctaatccccaacccccagccggcagccgccgagcaaaccagctcatccggtcggtcatccactcatcctcatcccctgcccatctgatccgatcggtcatctcatcctcatcccctacccgatcggatcccctgctcatccgccgagcaccaccaggcagcaggctccagtcatcgagcaccagcaggagcacggcgcgctgcccagtaggagcacggccaagaggatgacgcccgcatcctgcctcttctcctctgctactggagcctctactgctaggagcacggctaggaggacaacacccgcatccagcaggagcaccagcaggaggaggacgcccatgctgctgccgttgagcgatgatctgatgcgcccccatcatggctcttctcctccctcacggcctcgcctcgatctgctgctgccggtgatctgctgctgccggatccgagcgccgtgcccacgggtcacggccagcgatatgcagggatcaagaatccaactttgagaaaaattgctcgagatgtaaatggcgccgccggagtaccagcagtacctcgtgcaggtgaccaagtaccaggccgcacagaactgcaaggctgccaggtcatggtgatttcacgtccgttaggctcgagaggtggactcaaacatgacatccaagttttgcaagttttgatgttggatgttaaatttctatgctcacccctcgtttggttattgatttgataatagttttgcatgaactattggtgttggctatctaaaggacagaaaggcagacatgagcaacagatcccgctccatgggctgaaactgggattcgtgatggcagaaagtgctactgtcgctctcaattgtagcggtgtggtactgggatccttgccaataagggtgagcccgtccaagatgcccatgcgtccccgcgcccctcgccagctgatgtcgtactaggctaggggattgaagaagcacttgaagaggctcaatgcgcccaagcattggatgctcgacaagcttggcggagcttttttcatgctctgcaaggtgaggtctgttcagtttggccagaaaggtatcccctacctgaacacctacgatgatcgcaccatccgctaccccgacccgctcatcaaggccaacgacaccatcaagatcgatctagagaccaacaagatcatggacttcatcaagtttgacgtcggcaacgtggtcatggtgaccggcgggaggaacaccgggcgtgtaggagtgatcaagaacagggagaagcacaagggcagcttcgagaccatccacgtgctgcttggagctttttgctatgtctagttttttcctatttgttgtacaagaaaacataaaatggaattcaactttggtggccgcaaaagtttagagacttgatttcatataaagttaggctgaacattactgcaaacagttgtattttagtttagatttagagtacacttatgtatgtgttgtttgacaatgcttatttatgatatattgaatggtacttatttatattatattaattataatgttgttcaat

SEQ ID NO: 58948 - DNA, 1803 bp, Zea Mays
attgcccactaaggcatcattccgccaaagacccaaagtggcaaacgcccaaatcgacaaaccctaatgacctaatccccaacccccagccggcagccgccgagcaaaccagctcatccggtcggtcatccactcatcctcatcccctgcccatctgatccgatcggtcatctcatcctcatcccctacccgatcggatcccctgctcatccgccgagcaccaccaggcagcaggctccagtcatcgagcaccagcaggagcacggcgcgctgcccagtaggagcacggccaagaggatgacgcccgcatcctgcctcttctcctctgctactggagcctctactgctaggagcacggctaggaggacaacacccgcatccagcaggagcaccagcaggaggaggacgcccatgctgctgccgttgagcgatgatctgatgcgcccccatcatggctcttctcctccctcacggcctcgcctcgatctgctgctgccggtgatctgctgctgccggatccgagcgccgtgcccacgggtcacggccagcgatatgcagggatcaagaatccaactttgagaaaaattgctcgagatgtaaatggcgccgccggagtaccagcagtacctcgtgcaggtgaccaagtaccaggccgcacagaactgcaagttgataatagttttgcatgaactattggtgttggctatctaaaggacagaaaggcagacatgagcaacagatcccgctccatgggctgaaactgggattcgtgatggcagaaagtgctactgtcgctctcaattgtagcggtgtggtactgggatccttgccaataagtgtgtttttagggtgagcccgtccaagatgcccatgcgtccccgcgcccctcgccagctgatgtcgtactaggctaggggattgaagaagcacttgaagaggctcaatgcgcccaagcattggatgctcgacaagcttggcggagcttttgtaagtaaaaaatattttctagctttggtacctacaatcttctgtacttccccatttgtctaatgcttcaggttgttcttttttctgtagatctgtgtaccttatccttgctatactgtccatatatgctgtgtgcatgaaagtcttgcattgaaaatgtcatgtgctacaatcgttaggactattaatagatgttgctctgtctatctatccatttcatcgctggaaattcccatgccctttcatagtacgcctgtgaaatgctcgctgcttttctattggtttgtgtgcagttcatgctctgcaaggtgaggtctgttcagtttggccagaaaggtatcccctacctgaacacctacgatgatcgcaccatccgctaccccgacccgctcatcaaggccaacgacaccatcaagatcgatctagagaccaacaagatcatggacttcatcaagtttgacgtcggcaacgtggtcatggtgaccggcgggaggaacaccgggcgtgtaggagtgatcaagaacagggagaagcacaagggcagcttcgagaccatccacgtgctgcttggagctttttgctatgtctagttttttcctatttgttgtacaagaaaacataaaatggaattcaactttggtggccgcaaaagtttagagacttgatttcatataaagttaggctgaacattactgcaaacagttgtattttagtttagatttagagtacacttatgtatgtgttgtttgacaatgcttatttatgatatattgaatggtacttatttatattatattaattataatgttgttcaat

SEQ ID NO: 58949 - DNA, 249 bp, Zea Mays
gacaattccatttctttatcctctttctttctcacgctactgcagattatttgttatcatttaactactccattacgtaattcatctccttaccaggttaaggacttggtgtttcctgttaacgtgcatcttggccagcacttcactaaaccaccaccacgttattctgagggtgcattgattaaaaagctagaagaacttggaattgggaggccatctacttatgcatctataatgaaagtgttactg

SEQ ID NO: 58950 - DNA, 832 bp, Zea Mays
actacttttacaggaaatggggtttcgagaagctcgtcttccgtaattcgatcaccagagtcaggcgagaccgcaaatatgcgatccgagctcggaacgcgtactccacaggtgtacacatgtcccagaatgtcatcggtaggacaacccacaagacggagagcttgatcctatactaccactatcacaactcgatcaacgtcatgggggagccctgcagggaattcgtgccgagacccaacaatggaagcaaggtgatgtttgaggggataccgtatgtctacgatgacaacatggagcgcgtggcaggggagatcaaacgcttcgaggaggagacacttgggaccgtccgtacataggatcggcgcaaaagcatcgcatcgctggtgcgtatacagctctgtaccttgagctcgtgcccatccgttcgttccccgtgactctcgtcttgtgcactttgagctgccattccaacaagcagaatggaagaatctgtctcggggtcgaattagtgtaaagtttcagtttagctttgaatctgtcatctgtgtggagggcaatgcctttatgctgtgttttccgttcttgtctctatgatgttgtatgtatctcattgtagatttgtctagactgactgttgggctttattagatttttctgaatgtcgtatagggcgcagtgtgaagcgtctgaatatttgacttgttaaccaccctctggagtctgtatttgttcctgcacaaactggagcgtcagttcccatgttttctgttatgtacacctaccagaatagtggacagctcagcaatggtgaagcagttttttaacatgt

SEQ ID NO: 58951 - DNA, 1043 bp, Zea Mays
catcatcatatatctctcatagtcgtcatcaaccaaacatgcttgtccatgcctctcatcgtccttccactatcatatcgccggctagcttataaatactctccggccgtgacccctgctcaccaccatctccactattgctagtagataagccgccatggctgcccatgtggacccgctggttgtggggagggtgatcggcgacgtggtggacttgttcgtgccgacggtggccgtgtcggcgcgcttcggcgccaaggacctcaccaacggctgcgagatcaagccatccgtcgccgcggccgctcccgccgtcctcatcgccggcagggccaacgacctcttcaccctggttatgactgacccagatgctccgagccctagcgagccaacgatgagggagttgctccactggtggagcagatgcttctcaaggcggtgagacggtggtgccgtacgtgggcccgcgcccgccggtgggtatccaccgctacgtgctggtggtgtaccagcagaaggcccgcgtcacggctccgccgtcgctggcgccggcgacggaggcgacgcgcgcacggttcagcaaccgcgccttcgccgaccgccatgacctaggcctccctgtcgccgccatgttcttcaacgcgcagaaggagacagctagtcgccgccgccactactgagacaggctgatcgtcgtccaacggcaattacgtacccagcaaagcttaagccagccgctgcagtcactcatctcatcgagaagaagacaatcttcctagtcgctgttcttgccaagtactagtaccttgttaattattatgtaagctaaacccgtgtgcctgtgattatattgggacgtgtctcgctttaatacaaccgctcaacttgtggcgtttaattattttatttattagatataccaaggtgtcatcaagtcacttgccttacatacatttgtgtttcttatttataatcctttcctaactatcattttgtttaaaaatgtccttttgcttttaaataaaatacaaaatatattttct

SEQ ID NO: 58952 - DNA, 637 bp, Zea Mays
aaggaaaaaaaaggaaagaaaaagaaaaggcggtgagacggtggtgccgtacgtgggcccgcgcccgccggtgggtatccaccgctacgtgctggtggtgtaccagcagaaggcccgcgtcacggctccgccgtcgctggcgccggcgacggaggcgacgcgcgcacggttcagcaaccgcgccttcgccgaccgccatgacctaggcctccctgtcgccgccatgttcttcaacgcgcagaaggagacagctagtcgccgccgccactactgagacaggctgatcgtcgtccaacggcaattacgtacccagcaaagcttaagccagccgctgcagtcactcatctcatcgagaagaagacaatcttcctagtcgctgttcttgccaagtactagtaccttgttaattattatgtaagctaaacccgtgtgcctgtgattatattgggacgtgtctcgctttaatacaaccgctcaacttgtggcgtttaattattttatttattagatataccaaggtgtcatcaagtcacttgccttacatacatttgtgtttcttatttataatcctttcctaactatcattttgtttaaaaatgtccttttgcttttaaataaaatacaaaatatattttct

SEQ ID NO: 58953 - DNA, 813 bp, Zea Mays
atccaaaaagcagatgccaccaagaaagacatggaaggcacataacttgctataggtgagaagttggtgaaaaggttaaccaagggcattgaggagtccaagaaagatagagaaaaactttctgctgaaacagagaagatgatgtctatgttcaaagagattgagaagaaagtatttgttgttcaggaagagtataagaaaacacaggagatgatagacaaccataaagttgagcttgacaaaactaaggaagaatacaccaaactaaaaaaagcaatggatgaactgagagccacagaggttgacgctgagtacaaattgcaagatacaaaaaagcttgccaaggagtgggaaatgaaggtgaaaacattcaagaaaaggcttgatgaaattcatataataatccaaaaggatgctgttgatcctgagaaactcaaagcgactccaggtgatgagcaactaaatgacacatatgacatgaaaagggcaatggagatggtagcattgttagaggcccagattaaagatttgaacccaaatctggattccatagcagagtaccgcacaaaggcttgcttgtacggtgagcgtgttgatgagttaaatgctaccactcaagaacgtgatgatcttaaaaagttgtacgatgggttaaggaagagaaggctggatgaattcatggctggattcaacataatatctttgaaactgaaggagatgtaccagataatggaaacatttggcttcaatgcttcatcctcagacaaattagcaacttatttgaaccaattgactggactgagtttaacataa

SEQ ID NO: 58954 - DNA, 1340 bp, Zea Mays
cccgcgaggagtttatcgaagggtttttaaaaagagaaaaagggagaaaataaaggcgagagaaaaaaaactgcggagaggtagcggtggatcgaaaccctaggcgcggtcggcggcgatggcggcggcggcagcagcggcagctgcagcgcctgagtcgtacatcgggagcttgataagcctcatgtcgaagagcgagatccggtacgagggcgtcctgtacaccatcaacaccgaggagtccagcatcgggctaaaaaacgttcgctcatttggaactgaaggtcgtaagaaggatggccaacagattcctgccagcgacaagatatatgagtacatactctttcgaggaagtgatataaaggatttgcaagtcaaatcatctccaccatctcagtcggcaactttacacaatgatcctgctattattcagcctgtaggagtttcctcatatgtccggtacaacagtagaggtcgcggaagaggaagaggccgtgggcaatcgcatcccataaccaagttcacagaggactttgatttcatggcaatgaatgagaagttcaacaaagatgaagtatggggccatcttggtaaaagaatagggcagttaaatgatgaaccaaatggttacgaagatgatgttatagaagatgatgagatatctcctagaaagccagaagctaaggctgtgtatgttaaagatgacttctttgattcactctcttgcaaccaaattgacaatggagggaggaacggaagagtgaaattctctgagcagaggaaaatagacactgagacctttggtgactcagcaaggcatcgaccaatgggcatccgaggtaggggcccccgtggcggcgctcgtggtcgtggctattatggtattagaggatatggatatacgggtagggggcgtggctactcttacccaaatcaccagccgtgatacctcggtgtctggaagcacactgaatggcaatggtaaattggccaatttgcgtggtaaaactgagatttatcgcagattacagtgctgctgttgtaagcgtcttattagtttgtttactgatgtggttggtaattcaagaatcaacgtctcttttattgatggcagattggtgtagaagctttcacatctatatcttgttagtgtcgatggtcatttatttccttttggaggtagaagctgttagcagattgctagatgatgtaacacagatctgtccaagatcaacggaaaaacaagcagcagtattgataatctgaaaaaaaaagggatggagttcagggtaggaaagtaacttatccaacaaagcaccatgagtacaaaactatactcg

SEQ ID NO: 58955 - DNA, 2345 bp, Zea Mays
cccgcgaggagtttatcgaagggtttttaaaaagagaaaaagggagaaaataaaggcgagagaaaaaaaactgcggagaggtagcggtggatcgaaaccctaggcgcggtcggcggcgatggcggcggcggcagcagcggcagctgcagcgcctgagtcgtacatcgggagcttgataagcctcatgtcgaagagcgagatccggtacgagggcgtcctgtacaccatcaacaccgaggagtccagcatcgggctaaaaaacgttcgctcatttggaactgaaggtcgtaagaaggatggccaacagattcctgccagcgacaagatatatgagtacatactctttcgaggaagtgatataaaggatttgcaagtcaaatcatctccaccatctcagtcggcaactttacacaatgatcctgctattattcagtcacattatcctcatccagcttcgctttctacaagtttgccttctgctgcaagcacaataggagccaaccctacttcacagaatgctccatctttgattcagatgccaccgccatttcaagggaatttgcccccttaccagtctggcaccagcttacagtcatggaactcagcacctatgccatcatctgcaaatggcactggccttacaatgccaccaatgtactggccaggatattacacaccaccaactgggttttctcatctgcagccaccactcttccttaggccaccccacagtttggctgttccacaggtcctgcagcttcctgtacaatatcctggacttggatctttacctgctggatttccaaatatgccggagcttccttctttccttcaacctggtaacagtaatagtttaaatcaaacttcaggtgtacctacatctgtgtcaacgcctgcttcattgagtacatcacaaactgaatcatcaagaagccaactgccaaataagttttcatctgattcagcttctgtattttctgtgggttttactcctccatctgtgactccttcagtttcgacagttgaaccttccattcctgtgtcagcagtcttgccttctctggtgaacagtaagccagtagctctacctgactccaccatgccatctctctccactgccaagcctgtgattgtacctgatgcttcagtgcttacctatctatcatctcagccaccatctgctaatgatgtttctccagtcaatgctgcggagcaggttccattggctgccccctctacagttccatcttctcaggctacattgtttgaaggttcaaccacacaggttgcctcctcttctattttgtcacaacaggtggcaatgacaaatgaaagtaaagtagccaagcagcgtgagtggaaggcaaaacaaactgtggttggtagacccggaaataaggagcccctattgcctgaaccaaagtcggtgtttcaaaagcctgtaggagtttcctcatatgtccggtacaacagtagaggtcgcggaagaggaagaggccgtgggcaatcgcatcccataaccaagttcacagaggactttgatttcatggcaatgaatgagaagttcaacaaagatgaagtatggggccatcttggtaaaagaatagggcagttaaatgatgaaccaaatggttacgaagatgatgttatagaagatgatgagatatctcctagaaagccagaagctaaggctgtgtatgttaaagatgacttctttgattcactctcttgcaaccaaattgacaatggagggaggaacggaagagtgaaattctctgagcagaggaaaatagacactgagacctttggtgactcagcaaggcatcgaccaatgggcatccgaggtaggggcccccgtggcggcgctcgtggtcgtggctattatggtattagaggatatggatatacgggtagggggcgtggctactcttacccaaatcaccagccgtgatacctcggtgtctggaagcacactgaatggcaatggtaaattggccaatttgcgtggtaaaactgagatttatcgcagattacagtgctgctgttgtaagcgtcttattagtttgtttactgatgtggttggtaattcaagaatcaacgtctcttttattgatggcagattggtgtagaagctttcacatctatatcttgttagtgtcgatggtcatttatttccttttggaggtagaagctgttagcagattgctagatgatgtaacacagatctgtccaagatcaacggaaaaacaagcagcagtattgataatctgaaaaaaaaagggatggagttcagggtaggaaagtaacttatccaacaaagcaccatgagtacaaaactatactcg

SEQ ID NO: 58956 - DNA, 1356 bp, Zea Mays
cccgcgaggagtttatcgaagggtttttaaaaagagaaaaagggagaaaataaaggcgagagaaaaaaaactgcggagaggtagcggtggatcgaaaccctaggcgcggtcggcggcgatggcggcggcggcagcagcggcagctgcagcgcctgagtcgtacatcgggagcttgataagcctcatgtcgaagagcgagatccggtacgagggcgtcctgtacaccatcaacaccgaggagtccagcatcgggctaaaaaacgttcgctcatttggaactgaaggtcgtaagaaggatggccaacagattcctgccagcgacaagatatatgagtacatactctttcgaggaagtgatataaaggatttgcaagtcaaatcatctccaccatctcagtcggcaactttacacaatgatcctgctattattcagcaatcgcatcccataaccaagttcacagaggactttgatttcatggcaatgaatgagaagttcaacaaagatgaagtatggggccatcttggtaaaagaatagggcagttaaatgatgaaccaaatggttacgaagatgatgttatagaagatgatgagatatctcctagaaagccagaagctaaggctgtgtatgttaaagatgacttctttgattcactctcttgcaaccaaattgacaatggagggaggaacggaagagtgaaattctctgagcagaggaaaatagacactgaggtattcacagataggcattgaatctttaccttcccatatcaccttagcattcagtgcatatcatgatttattttggctgtagacctttggtgactcagcaaggcatcgaccaatgggcatccgaggtaggggcccccgtggcggcgctcgtggtcgtggctattatggtattagaggatatggatatacgggtagggggcgtggctactcttacccaaatcaccagccgtgatacctcggtgtctggaagcacactgaatggcaatggtaaattggccaatttgcgtggtaaaactgagatttatcgcagattacagtgctgctgttgtaagcgtcttattagtttgtttactgatgtggttggtaattcaagaatcaacgtctcttttattgatggcagattggtgtagaagctttcacatctatatcttgttagtgtcgatggtcatttatttccttttggaggtagaagctgttagcagattgctagatgatgtaacacagatctgtccaagatcaacggaaaaacaagcagcagtattgataatctgaaaaaaaaagggatggagttcagggtaggaaagtaacttatccaacaaagcaccatgagtacaaaactatactcg

SEQ ID NO: 58957 - DNA, 2419 bp, Zea Mays
cccgcgaggagtttatcgaagggtttttaaaaagagaaaaagggagaaaataaaggcgagagaaaaaaaactgcggagaggtagcggtggatcgaaaccctaggcgcggtcggcggcgatggcggcggcggcagcagcggcagctgcagcgcctgagtcgtacatcgggagcttgataagcctcatgtcgaagagcgagatccggtacgagggcgtcctgtacaccatcaacaccgaggagtccagcatcgggctaaaaaacggatttgcaagtcaaatcatctccaccatctcagtcggcaactttacacaatgatcctgctattattcagtcacattatcctcatccagcttcgctttctacaagtttgccttctgctgcaagcacaataggagccaaccctacttcacagaatgctccatctttgattcagatgccaccgccatttcaagggaatttgcccccttaccagtctggcaccagcttacagtcatggaactcagcacctatgccatcatctgcaaatggcactggccttacaatgccaccaatgtactggccaggatattacacaccaccaactgggttttctcatctgcagccaccactcttccttaggccaccccacagtttggctgttccacaggtcctgcagcttcctgtacaatatcctggacttggatctttacctgctggatttccaaatatgccggagcttccttctttccttcaacctggtaacagtaatagtttaaatcaaacttcaggtgtacctacatctgtgtcaacgcctgcttcattgagtacatcacaaactgaatcatcaagaagccaactgccaaataagttttcatctgattcagcttctgtattttctgtgggttttactcctccatctgtgactccttcagtttcgacagttgaaccttccattcctgtgtcagcagtcttgccttctctggtgaacagtaagccagtagctctacctgactccaccatgccatctctctccactgccaagcctgtgattgtacctgatgcttcagtgcttacctatctatcatctcagccaccatctgctaatgatgtttctccagtcaatgctgcggagcaggttccattggtaacccctgggcaacttctgtcaactacttcctctacaattatatcatctcatgccttgcaaactgcttctgctgtggatctatcctctaaggctgccccctctacagttccatcttctcaggctacattgtttgaaggttcaaccacacaggttgcctcctcttctattttgtcacaacaggtggcaatgacaaatgaaagtaaagtagccaagcagcgtgagtggaaggcaaaacaaactgtggttggtagacccggaaataaggagcccctattgcctgaaccaaagtcggtgtttcaaaagcctgtaggagtttcctcatatgtccggtacaacagtagaggtcgcggaagaggaagaggccgtgggcaatcgcatcccataaccaagttcacagaggactttgatttcatggcaatgaatgagaagttcaacaaagatgaagtatggggccatcttggtaaaagaatagggcagttaaatgatgaaccaaatggttacgaagatgatgttatagaagatgatgagatatctcctagaaagccagaagctaaggctgtgtatgttaaagatgacttctttgattcactctcttgcaaccaaattgacaatggagggaggaacggaagagtgaaattctctgagcagaggaaaatagacactgaggtattcacagataggcattgaatctttaccttcccatatcaccttagcattcagtgcatatcatgatttattttggctgtagacctttggtgactcagcaaggcatcgaccaatgggcatccgaggtaggggcccccgtggcggcgctcgtggtcgtggctattatggtattagaggatatggatatacgggtagggggcgtggctactcttacccaaatcaccagccgtgatacctcggtgtctggaagcacactgaatggcaatggtaaattggccaatttgcgtggtaaaactgagatttatcgcagattacagtgctgctgttgtaagcgtcttattagtttgtttactgatgtggttggtaattcaagaatcaacgtctcttttattgatggcagattggtgtagaagctttcacatctatatcttgttagtgtcgatggtcatttatttccttttggaggtagaagctgttagcagattgctagatgatgtaacacagatctgtccaagatcaacggaaaaacaagcagcagtattgataatctgaaaaaaaaagggatggagttcagggtaggaaagtaacttatccaacaaagcaccatgagtacaaaactatactcg

SEQ ID NO: 58958 - DNA, 2038 bp, Zea Mays
attaagatagaacgaataatttgtgagctattgtatctggaatctaattatgttaaggatttgcaagtcaaatcatctccaccatctcagtcggcaactttacacaatgatcctgctattattcagtcacattatcctcatccagcttcgctttctacaagtttgccttctgctgcaagcacaataggagccaaccctacttcacagaatgctccatctttgattcagatgccaccgccatttcaagggaatttgcccccttaccagtctggcaccagcttacagtcatggaactcagcacctatgccatcatctgcaaatggcactggccttacaatgccaccaatgtactggccaggatattacacaccaccaactgggttttctcatctgcagccaccactcttccttaggccaccccacagtttggctgttccacaggtcctgcagcttcctgtacaatatcctggacttggatctttacctgctggatttccaaatatgccggagcttccttctttccttcaacctggtaacagtaatagtttaaatcaaacttcaggtgtacctacatctgtgtcaacgcctgcttcattgagtacatcacaaactgaatcatcaagaagccaactgccaaataagttttcatctgattcagcttctgtattttctgtgggttttactcctccatctgtgactccttcagtttcgacagttgaaccttccattcctgtgtcagcagtcttgccttctctggtgaacagtaagccagtagctctacctgactccaccatgccatctctctccactgccaagcctgtgattgtacctgatgcttcagtgcttacctatctatcatctcagccaccatctgctaatgatgtttctccagtcaatgctgcggagcaggttccattggctgccccctctacagttccatcttctcaggctacattgtttgaaggttcaaccacacaggttgcctcctcttctattttgtcacaacaggtggcaatgacaaatgaaagtaaagtagccaagcagcgtgagtggaaggcaaaacaaactgtggttggtagacccggaaataaggagcccctattgcctgaaccaaagtcggtgtttcaaaagcctgtaggagtttcctcatatgtccggtacaacagtagaggtcgcggaagaggaagaggccgtgggcaatcgcatcccataaccaagttcacagaggactttgatttcatggcaatgaatgagaagttcaacaaagatgaagtatggggccatcttggtaaaagaatagggcagttaaatgatgaaccaaatggttacgaagatgatgttatagaagatgatgagatatctcctagaaagccagaagctaaggctgtgtatgttaaagatgacttctttgattcactctcttgcaaccaaattgacaatggagggaggaacggaagagtgaaattctctgagcagaggaaaatagacactgagacctttggtgactcagcaaggcatcgaccaatgggcatccgaggtaggggcccccgtggcggcgctcgtggtcgtggctattatggtattagaggatatggatatacgggtagggggcgtggctactcttacccaaatcaccagccgtgatacctcggtgtctggaagcacactgaatggcaatggtaaattggccaatttgcgtggtaaaactgagatttatcgcagattacagtgctgctgttgtaagcgtcttattagtttgtttactgatgtggttggtaattcaagaatcaacgtctcttttattgatggcagattggtgtagaagctttcacatctatatcttgttagtgtcgatggtcatttatttccttttggaggtagaagctgttagcagattgctagatgatgtaacacagatctgtccaagatcaacggaaaaacaagcagcagtattgataatctgaaaaaaaaagggatggagttcagggtaggaaagtaacttatccaacaaagcaccatgagtacaaaactatactcg

SEQ ID NO: 58959 - DNA, 1033 bp, Zea Mays
gttcttgaccgtcgcatccaatccaacggcattctggttctagggagcccgcaggaaggcacctctgcggcgaccagcgtgaagaaaggggatcggaacgcctccatctcaaaccccacgaaggcacgaaccctctcttcctaggttcatcgttcctcctccgcgtccttccttccctccgcagcgcggcgcggcgcggcgcgatgatacagctgctcttcacgctgctagcggcggagggcgccgtggcggcggtgctactcttcaagacgccgctgcggaggctggccgtgctcgcgctcgaccacctcaagcggggccgcgggcccgtcatggtgcgcaccatcgcggccaccgtgcttgtcgtgctcgcatccagtctccacagcatgggccaagatccgcggccacgccgagggggagctcgacggctccggggtcgtggggctcacccccaccgaccaggtccttcttgcgcgacacctcctcgaggcgtcactcatggtcattgaccggctgcacaactatgtcaaagaaaatcgaaggctcaggaagaaattggaagaggtgttgaaacagaataaggcactagaagaagcaacaaatggaaagctagaagagaacaggcctgaccagaaagacctttcccatgccaaggataattaacaatgacatgcgctcaagaaactccctgccatcactgcctatgcctgaataggatgccggtcactgatgttctccctgttgagaattagcattggtaaatgaatgctcggttacaacgtgctaaatcctttgcatctggccaaatttgtaaataagcactgggtgatgcccatcagtaaacacatgatgctactgctgttaaactaaatgtggcaaatttcataatgctaggtattgttctcggtatctaaggtgttgtttggttgctaagtatggtggaacgaagtcgctctgctctcattctattgttgtttggagctctcattctattgttgtttggattggtttcgtagagaacagtgactct

SEQ ID NO: 58960 - DNA, 581 bp, Zea Mays
ctcatatctgctacttatttaacactgtgaagacagaagtagcatggtcaactaaaaaactaaggatactccttattccttgctttagtcattgaccggctgcacaactatgtcaaagaaaatcgaaggctcaggaagaaattggaagaggtgttgaaacagaataaggcactagaagaagcaacaaatggaaagctagaagagaacaggcctgaccagaaagacctttcccatgccaaggataattaacaatgacatgcgctcaagaaactccctgccatcactgcctatgcctgaataggatgccggtcactgatgttctccctgttgagaattagcattggtaaatgaatgctcggttacaacgtgctaaatcctttgcatctggccaaatttgtaaataagcactgggtgatgcccatcagtaaacacatgatgctactgctgttaaactaaatgtggcaaatttcataatgctagttggcttcggaactaaacactacccaatacaacgccggtactgtgagcgataaagaccgacccacgattttgtttctggctgagctatgcatttctgtatc

SEQ ID NO: 58961 - DNA, 1969 bp, Zea Mays
cgaaactagtgacacgaatcttttcgtggacacgtagcaggtcgatgatgaggagcggcgacacgtcgtgacggacgttactttcgcgccgtattctagtcttctagagatatccatccagttctcgctatatctttttctccccaagaaaaaaaaggcggcgagagcataagaaaaaaacacacacacacacacacacaaagcgcacttttcaaatcgacaaaggggaaaggttcgcttcttctcgcatcttgctttacttcgagtgccatggccgatccggcggaggagaacgttgtctcgccgccaccgacccctgcggccccagccgtgggcgcctcagactcgcccctgcagcctgttgctgacggcgcctcaacggagaaggtgtctgccccggcgccggaggtaaggtcccggggattcaggcttcttggagaggacacttccgtgcacaaatcccttgggggcggtaaaagtacgtatttctttcttcatttttctgctgactttcttcctgtgctccaattaatcgtatggtgttagcttggagttgtgcttttttataacaggaggtcaggagatgtgtttgtttctttctggttattattctaagtgcataggaaacaatagacgagataacgcacggaatgagattgattatttattcggagtttcttttgagaaagtatattcaaatcactccgtaccggttattaggtgtgttaaattttgttcaaaaataataacgggtgttaaaaaatatgttctaagaaaagctaataatttacgactacaaagaaacgtacctacatatataattattatcgattgaagaatattgatattagtttctccctaggaaaccagcagccaaaaaggaagacatggaaacagattctttagattcattgtttactgcactcgtagatacagtgatggtgataagtatgaaacgcgcaagttgtacagtgatggtgataagaaaaaaaaaagcgcaagttgaccttttcatcggaaacgatgttttttgtccatttttcctaggggcgcactccagaagatgttaatggcttttgacaggtggctacaccaacacacttgtaaaagtgaatctacacttgaatcatatggcttcgggctcctctttttcaatcattgacacttaaaactccagataatatgctttggcaacaaatttaaatttttaacactttgccatacacagtgatgggcaacatatatagtgtaaaagggattatggtgctaacattgtaacatcaaattttatccatcggatccaccataatctatggttgaattcaatcttgtatggggacaaaatataggagttctttagaaagtagtctatgaaattgatagatgaagacatctttaaaccatgagctaaccttaattgagattagcttaggtcattgctgttatctcttttgttctaattctgctccttgtggaggagaactttctgcagctgctgacgttctgttatggaaagacaagaaaacttctgctgttgtaataggcggcgcaactgtcatctgggttctgttcgaagtgcttgattaccacctcctgaccctgatatcccatgtactgattggtgtgcttgccaccttattcctgtggtccaaagcaaccacgttcatcaagaagagtccaccggatattccagtagtgcaggtatctgaggaccttgttgtgaatgtttcacgggcattacggaatgacatcaacagagcgcttcacttgttccgtgagatcgcaatggggcatgatctgaagaagtttttgggtgtgatcgtgggtctgtgggttctctccggagttggaagcagctgtgacttcctcacgttgacatacattgattgcttttccagacaatagtgcatgtctaagtgcatagctgttgttagtgtaagttgctgctactagactgatcatttggaat

SEQ ID NO: 58962 - DNA, 2484 bp, Zea Mays
atcttttcgtggacacgtagcaggtcgatgatgaggagcggcgacacgtcgtgacggacgttactttcgcgccgtattctagtcttctagagatatccatccagttctcgctatatctttttctccccaagaaaaaaaaggcggcgagagcataagaaaaaaacacacacacacacacacacaaagcgcacttttcaaatcgacaaaggggaaaggttcgcttcttctcgcatcttgctttacttcgagtgccatggccgatccggcggaggagaacgttgtctcgccgccaccgacccctgcggccccagccgtgggcgcctcagactcgcccctgcagcctgttgctgacggcgcctcaacggagaaggtgtctgccccggcgccggaggtaaggtcccggggattcaggcttcttggagaggacacttccgtgcacaaatcccttgggggcggtaaaagtacgtatttctttcttcatttttctgctgactttcttcctgtgctccaattaatcgtatggtgttagcttggagttgtgcttttttataacaggaggtcaggagatgtgtttgtttctttctggttattattctaagtgcataggaaacaatagacgagataacgcacggaatgagattgattatttattcggagtttcttttgagaaagtatattcaaatcactccgtaccggttattaggtgtgttaaattttgttcaaaaataataacgggtgttaaaaaatatgttctaagaaaagctaataatttacgactacaaagaaacgtacctacatatataattattatcgattgaagaatattgatattagtttctccctaggaaaccagcagccaaaaaggaagacatggaaacagattctttagattcattgtttactgcactcgtagatacagtgatggtgataagtatgaaacgcgcaagttgtacagtgatggtgataagaaaaaaaaaagcgcaagttgaccttttcatcggaaacgatgttttttgtccatttttcctaggggcgcactccagaagatgttaatggcttttgacaggtggctacaccaacacacttgtaaaagtgaatctacacttgaatcatatggcttcgggctcctctttttcaatcattgacacttaaaactccagataatatgctttggcaacaaatttaaatttttaacactttgccatacacagtgatgggcaacatatatagtgtaaaagggattatggtgctaacattgtaacatcaaattttatccatcggatccaccataatctatggttgaattcaatcttgtatggggacaaaatataggagttctttagaaagtagtctatgaaattgatagatgaagacatctttaaaccatgagctaaccttaattgagattagcttaggtcattgctgttatctcttttgttctaattctgctccttgtggaggagaactttctgcagctgctgacgttctgttatggaaagacaagaaaacttctgctgttgtaataggcggcgcaactgtcatctgggttctgttcgaagtgcttgattaccacctcctgaccctgatatcccatgtactgattggtgtgcttgccaccttattcctgtggtccaaagcaaccacgttcatcaagaagagtccaccggatattccagtagtgcaggtatctgaggaccttgttgtgaatgtttcacgggcattacggaatgacatcaacagagcgcttcacttgttccgtgagatcgcaatggggcatgatctgaagaagtttttgggtgtgatcgtgggtctgtgggttctctccggagttggaagcagctgtgacttcctcacgttgacatacattggacaaggtggaccatgtcgctggaagggcacacaccgaggccctcaagcagtacaaggtgctggatgccaaggtcctgagcaaaatccccaggggtgcggtcaaatccaaaaagcagaactagttaggataagccgcagattgtgaatgcccgtatcatgagtatcgggcttgtggtttgcatggcatatgtaaatctgtctgttggcttcagcttggttcttctgcgactactttgttgatgttattatagtcctatgtatgtactgtgtacatgacagatgttcggacgtctcggctactgctgtagcttgtaaattccagtggtgcgttgctaagcacgatgctccccttgttttatgtggtgttggactaatgattactacactaaggtttaatgactcaattaggatcattttgtgaagaaacattttgtgaaaaaacatttggatcataatcttgaactaaaaactaaaatttatttagtattctatcattttgtgaataaatatttgatcataatctattatcacctataggtttaggtgtctataggtatccttgttttcacataaacactagttaccactggaaattattatttttatttgcatggt

SEQ ID NO: 58963 - DNA, 1466 bp, Zea Mays
atcttttcgtggacacgtagcaggtcgatgatgaggagcggcgacacgtcgtgacggacgttactttcgcgccgtattctagtcttctagagatatccatccagttctcgctatatctttttctccccaagaaaaaaaaggcggcgagagcataagaaaaaaacacacacacacacacacacaaagcgcacttttcaaatcgacaaaggggaaaggttcgcttcttctcgcatcttgctttacttcgagtgccatggccgatccggcggaggagaacgttgtctcgccgccaccgacccctgcggccccagccgtgggcgcctcagactcgcccctgcagcctgttgctgacggcgcctcaacggagaaggtgtctgccccggcgccggaggtaaggtcccggggattcaggcttcttggagaggacacttccgtgcacaaatcccttgggggcggtaaaagcggcgcaactgtcatctgggttctgttcgaagtgcttgattaccacctcctgaccctgatatcccatgtactgattggtgtgcttgccaccttattcctgtggtccaaagcaaccacgttcatcaagaagagtccaccggatattccagtagtgcaggtatctgaggaccttgttgtgaatgtttcacgggcattacggaatgacatcaacagagcgcttcacttgttccgtgagatcgcaatggggcatgatctgaagaagtttttgggtgtgatcgtgggtctgtgggttctctccggagttggaagcagctgtgacttcctcacgttgacatacattgccgtcctgatgctccacacggtgccaatcttgtacgacaagtaccaggacaaggtggaccatgtcgctggaagggcacacaccgaggccctcaagcagtacaaggtgctggatgccaaggtcctgagcaaaatccccaggggtgcggtcaaatccaaaaagcagaactagttaggataagccgcagattgtgaatgcccgtatcatgagtatcgggcttgtggtttgcatggcatatgtaaatctgtctgttggcttcagcttggttcttctgcgactactttgttgatgttattatagtcctatgtatgtactgtgtacatgacagatgttcggacgtctcggctactgctgtagcttgtaaattccagtggtgcgttgctaagcacgatgctccccttgttttatgtggtgttggactaatgattactacactaaggtttaatgactcaattaggatcattttgtgaagaaacattttgtgaaaaaacatttggatcataatcttgaactaaaaactaaaatttatttagtattctatcattttgtgaataaatatttgatcataatctattatcacctataggtttaggtgtctataggtatccttgttttcacataaacactagttaccactggaaattattatttttatttgcatggt

SEQ ID NO: 58964 - DNA, 1591 bp, Zea Mays
attatgaggtccagttttgcttttgggaactagaattcgacgccgctgtggactggtcatggcgtgctaccgcgcatccacggcgccgacggcccaccgaggtctaggaaaaatagaatggttggtatggtagggtaggtgaaccggtgaagattagagggactgagggagagggaccgtgacaccgtgtctagccagccaacctgctgctctagcccacctgcatggcggtgtcagcgccggtcactctctgcccctcggattctcgctccctctcttccgcgctcgtttcttcccgatccaacaagccttcttcacttgatgctgttcggtcacggcggttgaatttgggagattcagcttaactgcagtgcacaccacctgtttgatagaatgcctccttcgtgattccatctgttccctgcccgtctgaagtacgtcatttgtttcctaacagctatgccaacgcagatctccacaaggcagtctcttcggtttgctttaccttcgaacaatgcacgtccaatatcgactgcagcaagaatgacatgttttgctaagaagcaacatattgctgccgtgcccttatgtactttggaggccaaaaggtatgaacctatagtcaaaatgtgtggcattacatctgccttcgatgctgagatggctttgaaggctggagctaaattaattgggatgattctttggcccaagtccaaacgctctatcccattgtctgaagctaaagagatatccagagtggccaaatcttacggggctgaatcagtgggtgtgtttgtggatgatgatagtagtactatcttgacagcatctgattcatgcaacctcgatcttatccagcttcatggagatagctcccgagaactacttcctctgctttggaagaacaacaggattatatatgtgctaaatgctgatgaggatggtaaacttatcaatgctcctccaagtgaggaatatgttcttgattggtttttggtggacagtgcaaaaggtggaagtggcaaagggttcaactgggaaaaattccaaatgccaactgttaaaagcaagaacgggtggttattagcaggaggccttcatgcagataatgttcacgaagccgcttctgctctaaagccaaatggcctggatgttagcagtggcatatgttttcctgacggtttacggaaagacccgaagagaatgtgttccttcatgagcagtgtaaaaactttgaatctcctctaacatactagtgctttattggtcgtagtttcttggtgcagtatgtggaaactgaataaatggcagtcctaataaaaataaaaataaaaataaaatgaccatcataggtaagctgtccagaacagaggcattgtcgatctttggcatcaaccagtaaaattcatgcaatgagcagctatatcattttcagcttctcgttaaggcagttcgacacatgtctgtttactgacgtgttgaatgagacatttgattggaatgtgaagagacaactgagtttttgttttgaaattgtctgctcattaggagtactagtgttatactgctagccttttggcgggcatgcatg

SEQ ID NO: 58965 - DNA, 1453 bp, Zea Mays
gggaactagaattcgacgccgctgtggactggtcatggcgtgctaccgcgcatccacggcgccgacggcccaccgaggtctaggaaaaatagaatggttggtatggtagggtaggtgaaccggtgaagattagagggactgagggagagggaccgtgacaccgtgtctagccagccaacctgctgctctagcccacctgcatggcggtgtcagcgccggtcactctctgcccctcggattctcgctccctctcttccgcgctcgtttcttcccgatccaacaagccttcttcacttgatgctgttcggtcacggcggttgaatttgggagattcagctatgccaacgcagatctccacaaggcagtctcttcggtttgctttaccttcgaacaatgcacgtccaatatcgactgcagcaagaatgacatgttttgctaagaagcaacatattgctgccgtgcccttatgtactttggaggccaaaagtccaaacgctctatcccattgtctgaagctaaagagatatccagagtggccaaatcttacggggctgaatcagtgggtgtgtttgtggatgatgatagtagtactatcttgacagcatctgattcatgcaacctcgatcttatccagcttcatggagatagctcccgagaactacttcctctgctttggaagaacaacaggattatatatgtgctaaatgctgatgaggatggtaaacttatcaatgctcctccaagtgaggaatatgttcttgattggtttttggtggacagtgcaaaaggtggaaggtacaaaattctgcttacatggttggtgtgttgtctaatgtctcgatgtttgctcttggactcctaaatgattgatattcttaaaatggcaaagggttcaactgggaaaaattccaaatgccaactgttaaaagcaagaacgggtggttattagcaggaggccttcatgcagataatgttcacgaagccgcttctgctctaaagccaaatggcctggatgttagcagtggcatatgttttcctgacggtttacggaaagacccgaagagaatgtgttccttcatgagcagtgtaaaaactttgaatctcctctaacatactagtgctttattggtcgtagtttcttggtgcagtatgtggaaactgaataaatggcagtcctaataaaaataaaaataaaaataaaatgaccatcataggtaagctgtccagaacagaggcattgtcgatctttggcatcaaccagtaaaattcatgcaatgagcagctatatcattttcagcttctcgttaaggcagttcgacacatgtctgtttactgacgtgttgaatgagacatttgattggaatgtgaagagacaactgagtttttgttttgaaattgtctgctcattaggagtactagtgttatactgctagccttttggcgggcatgcatg

SEQ ID NO: 58966 - DNA, 1367 bp, Zea Mays
gggaactagaattcgacgccgctgtggactggtcatggcgtgctaccgcgcatccacggcgccgacggcccaccgaggtctaggaaaaatagaatggttggtatggtagggtaggtgaaccggtgaagattagagggactgagggagagggaccgtgacaccgtgtctagccagccaacctgctgctctagcccacctgcatggcggtgtcagcgccggtcactctctgcccctcggattctcgctccctctcttccgcgctcgtttcttcccgatccaacaagccttcttcacttgatgctgttcggtcacggcggttgaatttgggagattcagctatgccaacgcagatctccacaaggcagtctcttcggtttgctttaccttcgaacaatgcacgtccaatatcgactgcagcaagaatgacatgttttgctaagaagcaacatattgctgccgtgcccttatgtactttggaggccaaaagtccaaacgctctatcccattgtctgaagctaaagagatatccagagtggccaaatcttacggggctgaatcagtgggtgtgtttgtggatgatgatagtagtactatcttgacagcatctgattcatgcaacctcgatcttatccagcttcatggagatagctcccgagaactacttcctctgctttggaagaacaacaggattatatatgtgctaaatgctgatgaggatggtaaacttatcaatgctcctccaagtgaggaatatgttcttgattggtttttggtggacagtgcaaaaggtggaagtggcaaagggttcaactgggaaaaattccaaatgccaactgttaaaagcaagaacgggtggttattagcaggaggccttcatgcagataatgttcacgaagccgcttctgctctaaagccaaatggcctggatgttagcagtggcatatgttttcctgacggtttacggaaagacccgaagagaatgtgttccttcatgagcagtgtaaaaactttgaatctcctctaacatactagtgctttattggtcgtagtttcttggtgcagtatgtggaaactgaataaatggcagtcctaataaaaataaaaataaaaataaaatgaccatcataggtaagctgtccagaacagaggcattgtcgatctttggcatcaaccagtaaaattcatgcaatgagcagctatatcattttcagcttctcgttaaggcagttcgacacatgtctgtttactgacgtgttgaatgagacatttgattggaatgtgaagagacaactgagtttttgttttgaaattgtctgctcattaggagtactagtgttatactgctagccttttggcgggcatgcatg

SEQ ID NO: 58967 - DNA, 1299 bp, Zea Mays
acgagatgtagttaagtaaaatttagtccaatgcttgaacaccagtttatgctgcgtctccttgtgtatagtctgctggatttcttttcttcgatcttcagcagttgtttattcaagaatgcaagaaacagttcacacaaacgttggatgattttgatgttcttaggatttttgtatgaggggatactgaagattaatccaatgctataagctctggatactatgcacgtccaatatcgactgcagcaagaatgacatgttttgctaagaagcaacatattgctgccgtgcccttatgtactttggaggccaaaaggtatgaacctatagtcaaaatgtgtggcattacatctgccttcgatgctgagatggctttgaaggctggagctaaattaattgggatgattctttggcccaagtccaaacgctctatcccattgtctgaagctaaagagatatccagagtggccaaatcttacggggctgaatcagtgggtgtgtttgtggatgatgatagtagtactatcttgacagcatctgattcatgcaacctcgatcttatccagcttcatggagatagctcccgagaactacttcctctgctttggaagaacaacaggattatatatgtgctaaatgctgatgaggatggtaaacttatcaatgctcctccaagtgaggaatatgttcttgattggtttttggtggacagtgcaaaaggtggaagtggcaaagggttcaactgggaaaaattccaaatgccaactgttaaaagcaagaacgggtggttattagcaggaggccttcatgcagataatgttcacgaagccgcttctgctctaaagccaaatggcctggatgttagcagtggcatatgttttcctgacggtttacggaaagacccgaagagaatgtgttccttcatgagcagtgtaaaaactttgaatctcctctaacatactagtgctttattggtcgtagtttcttggtgcagtatgtggaaactgaataaatggcagtcctaataaaaataaaaataaaaataaaatgaccatcataggtaagctgtccagaacagaggcattgtcgatctttggcatcaaccagtaaaattcatgcaatgagcagctatatcattttcagcttctcgttaaggcagttcgacacatgtctgtttactgacgtgttgaatgagacatttgattggaatgtgaagagacaactgagtttttgttttgaaattgtctgctcattaggagtactagtgttatactgctagccttttggcgggcatgcatg

SEQ ID NO: 58968 - DNA, 2002 bp, Zea Mays
aatcagcccgtggcccaaatttactcggacttcacctctcccaatcctcctccatctccttcttaaattccacttcttcgatttgatccccacccgtcgccgctcttttttttctgcttatttttttttctgagccgaccagaaagaccagaaactcgagtttgttggctcctgatccaaactattctaatcgcacgaaagaggctgcaaatattgaattttgagtttctttgggagtggtttagtggataaatcggggaaaccataggggaattcctgaccgaaagtggtggaaagtttagtttggtgatggaggaggagaagcagcagatggagccgccggcgccggcgctggtgcgggaagcgggagccgagccaagggcgccacgacaaacgcaacagcagccgaatacggcggtccaggtgcagccttctatgccggtgctgaggccatggccaatggaaatcacgctttctatgaagcctgtggttgaaatgaagagtggcaccccagcaaagaagaagaagcactgtaattgcaaaaactcacaatgtttaaagctgtattgtgagtgttttgcagcaggtgattactgtgacggttgcaattgtaaacaatgtggaaacactgttgagaacgaaaagggtaggcaggaggctattaacaacacaaagctaagaaatccaaacgcctttcaacctaagattgaaaatggtccaattccttctagtgtttggaaggatgctggagcactaccttcacatccaaagcataataaaggttgtcactgcaagaagtcaggttgtctaaagaaatactgtgaatgttttcaagcgaatatcctttgctccaagaattgtaaatgtatggattgcaagaactatgaagggagtgaggagctacgtagtacaactcaaggggataattcatgtgatcgaaataacattcaacaagcagctaatgttgctctgaatggtgccattggatcttcagggtatagattttctccagtacgtagaaaaaggcccccagaagatccccactgtcagacattaaatgttgaaggaagtatgatgcagacacagtttcgagagacaaacaatgtggatgtttcccaaatgacctcatctactggacgtgatggttccactgtaaatttccagggtacatctaaactggtatataggtctccactagcaaatactatccatattactgatgtcaacgacctagccaaccatttggtgattgcatgcagaaaggcagcagagaggttcactacaatagttgataacaaagtggagatggaaatagataaggaaatttgcacaaatactgaccaaaagtttgatgagaacaagaaaggagtccagaaagctgcacttagtcaacttggcaaagtgactgatatagatcaacaaattgttgatgactccagattgcattgctctgatacccaagacgatgctagacctgcctctccaggaacacaagcgctgttgtgtgatgagcaggatctcacatttggtacagttcatagaagttcaattccagtagcaatgcatgatcaggtcatttcagagctacacgctgcacaagaaagtgcagtgttgaaggagttaagaaacaacctccggctaattatcgcacgtggaaaactaaatgaaggaaaatccgcatcagggacacggatggaattggatgctctaaggcatcatgaatcaagcaccagtttagccccagtacgagctgaagagaaatccaacactacagatggccctgaaataacacacgaactaaaatagatttagctcagtttggatttttcatgtcaagataagatatgtattgtaccatagccaatctctgtgtacatacggatagtatagtccttgttgctagaaaaggcaaccggcaatgtagcattaatcattcacgaggtgtaaagtaggaaacagatcacgtatttattttttttatcaataatgagttttaattgag

SEQ ID NO: 58969 - DNA, 1302 bp, Zea Mays
ggtgtgccgtgtgcaaatgtcccgtccctgtccccgtcgtcacgtcttctagaaaacgccgttaccctattccctccccgtcgctatccaccccatcgcgttgccggatcgagcttggctctctcgaaccttgcttcgccgcacggcaccaaaagcacggccgcgctctcatccccctccacacgtttccgcctcccgatccatagccgccgtgagccgccgccgacatagctcctccctctcgcagctctccagctctcggaggcccgcggctcatcaacccgcgcttcttcattctcgacatctcacccggcggcgcggacgcgcagtgcacatcacgagccgcacggcacagccgctcttgttttccttcgtgggttgcggttcgacgcggccacgggatggcggcgagcgctcgggacagcgctgatgcggcggagcgagtcgtggatgaccacgacggctgggcgtcggacggcgagatgggcatggagatggatgtggaaggcgagttccacgaccgcgatgccgaccggagggatggcggcatggatggtgatgatgagtacttgctgctcactaggataagggacacatcagcagctgaagcaagggcaggaaaggatatacaaggtataccatgggagaggatacacatagccaggcaagactaccgaaaagctaggttggaacagtataagaactatgaaaatttccctcaatcaggagagctcatggataagttgtgcaagcaagtggagaagagcagcaagtattatgagtttcagcataacactagatcagtgaagccatcaattctccattttcagaggttcttgacttctctgggcacattgctccggtggagaagcatcctggcagtttgctagaaggtttctctggggttcaagttagcacacttgctgtgaatgagggtttgttggtagctggtggttttcaaggagaactgattggcaaggatttggaaggatgtaatataaaattctgtgcaaggacaactttgagtgacaatgctataacaaatgccatagatatacacagatcgacaagtggaagcttgcgcattacggtatctaataacgattgcggtgttcgtgaatacgatatggagagatttcagctcttgaaccactaccgatataactggccagttaatgcctgatggagcctccacgtgagggggagtattggagtataaatgagttgcccacctttccataatcagcttaagaatttgggttgaaatgatcagtgcatgcaacttaataatatatttaatgc

SEQ ID NO: 58970 - DNA, 1320 bp, Zea Mays
gtcccgtccctgtccccgtcgtcacgtcttctagaaaacgccgttaccctattccctccccgtcgctatccaccccatcgcgttgccggatcgagcttggctctctcgaaccttgcttcgccgcacggcaccaaaagcacggccgcgctctcatccccctccacacgtttccgcctcccgatccatagccgccgtgagccgccgccgacatagctcctccctctcgcagctctccagctctcggaggcccgcggctcatcaacccgcgcttcttcattctcgacatctcacccggcggcgcggacgcgcagtgcacatcacgagccgcacggcacagccgctcttgttttccttcgtgggttgcggttcgacgcggccacgggatggcggcgagcgctcgggacagcgctgatgcggcggagcgagtcgtggatgaccacgacggctgggcgtcggacggcgagatgggcatggagatggatgtggaaggcgagttccacgaccgcgatgccgaccggagggatggcggcatggatggtgatgatgagtacttgctgctcactaggataagggacacatcagcagctgaagcaagggcaggaaaggatatacaaggtataccatgggagaggatacacatagccaggcaagactaccgaaaagctaggttggaacagtataagaactatgaaaatttccctcaatcaggagagctcatggataagttgtgcaagcaagtggagaagagcagcaagtattatgagtttcagcataacactagatcagtgaagccatcaattctccattttcagaggttcttgacttctctgggcacattgctccggtggagaagcatcctggcagtttgctagaaggtttctctggggttcaagttagcacacttgctgtgaatgagggtttgttggtagctggtggttttcaaggagaactgattggcaaggatttggaaggatgtaatataaaattctgtgcaaggacaactttgagtgacaatgctataacaaatgccatagatatacacagatcgacaagtggaagcttgcgcattacggtatctaataacgattgcggtgttcgtgaatacgatatggagagatttcagctcttgaaccactaccgatataactggccagttaatcacacatctgtgagcccggataagaaacttttggctgtggttggagatgatcgggatgctcttcttgtggattcacggaatggaaaggtggaacgattccgggtgcaatccgatgaaaacgaacaaggccttagctggaacggttccgggtgcaatccgac

SEQ ID NO: 58971 - DNA, 1376 bp, Zea Mays
gtccctgtccccgtcgtcacgtcttctagaaaacgccgttaccctattccctccccgtcgctatccaccccatcgcgttgccggatcgagcttggctctctcgaaccttgcttcgccgcacggcaccaaaagcacggccgcgctctcatccccctccacacgtttccgcctcccgatccatagccgccgtgagccgccgccgacatagctcctccctctcgcagctctccagctctcggaggcccgcggctcatcaacccgcgcttcttcattctcgacatctcacccggcggcgcggacgcgcagtgcacatcacgagccgcacggcacagccgctcttgttttccttcgtgggttgcggttcgacgcggccacgggatggcggcgagcgctcgggacagcgctgatgcggcggagcgagtcgtggatgaccacgacggctgggcgtcggacggcgagatgggcatggagatggatgtggaaggcgagttccacgaccgcgatgccgaccggagggatggcggcatggatggtgatgatgagtacttgctgctcactaggataagggacacatcagcagctgaagcaagggcaggaaaggatatacaaggtataccatgggagaggatacacatagccaggcaagactaccgaaaagctaggttggaacagtataagaactatgaaaatttccctcaatcaggagagctcatggataagttgtgcaagcaagtggagaagagcagcaagtattatgagtttcagcataacactagatcagtgaagccatcaattctccattttcagcttaggaatttgttatgggcaacctcgaggcatgatgtatattttatgtcaaattccacagtaacccattggtcatcattgtctcacaaattatcagaggttcttgacttctctgggcacattgctccggtggagaagcatcctggcagtttgctagaaggtttctctggggttcaagttagcacacttgctgtgaatgagggtttgttggtagctggtggttttcaaggagaactgattggcaaggatttggaaggatgtaatataaaattctgtgcaaggacaactttgagtgacaatgctataacaaatgccatagatatacacagatcgacaagtggaagcttgcgcattacggtatctaataacgattgcggtgttcgtgaatacgatatggagagatttcagctcttgaaccactaccgatataactggccagttaatgcctgatggagcctccacgtgagggggagtattggagtataaatgagttgcccacctttccataatcagcttaagaatttgggttgaaatgatcagtgcatgcaacttaataatatatttaatgc

SEQ ID NO: 58972 - DNA, 1281 bp, Zea Mays
gccgttaccctattccctccccgtcgctatccaccccatcgcgttgccggatcgagcttggctctctcgaaccttgcttcgccgcacggcaccaaaagcacggccgcgctctcatccccctccacacgtttccgcctcccgatccatagccgccgtgagccgccgccgacatagctcctccctctcgcagctctccagctctcggaggcccgcggctcatcaacccgcgcttcttcattctcgacatctcacccggcggcgcggacgcgcagtgcacatcacgagccgcacggcacagccgctcttgttttccttcgtgggttgcggttcgacgcggccacgggatggcggcgagcgctcgggacagcgctgatgcggcggagcgagtcgtggatgaccacgacggctgggcgtcggacggcgagatgggcatggagatggatgtggaaggcgagttccacgaccgcgatgccgaccggagggatggcggcatggatggtgatgatgagtacttgctgctcactaggataagggacacatcagcagctgaagcaagggcaggaaaggatatacaaggtataccatgggagaggatacacatagccaggcaagactaccgaaaagctaggttggaacagtataagaactatgaaaatttccctcaatcaggagagctcatggataagttgtgcaagcaagtggagaagagcagcaagtattatgagtttcagcataacactagatcagtgaagccatcaattctccattttcagtaacccattggtcatcattgtctcacaaattatcagaggttcttgacttctctgggcacattgctccggtggagaagcatcctggcagtttgctagaaggtttctctggggttcaagttagcacacttgctgtgaatgagggtttgttggtagctggtggttttcaaggagaactgattggcaaggatttggaaggatgtaatataaaattctgtgcaaggacaactttgagtgacaatgctataacaaatgccatagatatacacagatcgacaagtggaagcttgcgcattacggtatctaataacgattgcggtgttcgtgaatacgatatggagagatttcagctcttgaaccactaccgatataactggccagttaatgcctgatggagcctccacgtgagggggagtattggagtataaatgagttgcccacctttccataatcagcttaagaatttgggttgaaatgatcagtgcatgcaacttaataatatatttaatgc

SEQ ID NO: 58973 - DNA, 1814 bp, Zea Mays
aaaaaagaaggcaattgttttgtagctcactaggataagggacacatcagcagctgaagcaagggcaggaaaggatatacaaggtataccatgggagaggatacacatagccaggcaagactaccgaaaagctaggttggaacagtataagaactatgaaaatttccctcaatcaggagagctcatggataagttgtgcaagcaagtggagaagagcagcaagtattatgagtttcagcataacactagatcagtgaagccatcaattctccattttcaggaatttgttatgggcaacctcgaggcatgatgtatattttatgtcaaattccacagtaacccattggtcatcattgtctcacaaattatcagaggttcttgacttctctgggcacattgctccggtggagaagcatcctggcagtttgctagaaggtttctctggggttcaagttagcacacttgctgtgaatgagggtttgttggtagctggtggttttcaaggagaactgattggcaaggatttggaaggatgtaatataaaattctgtgcaaggacaactttgagtgacaatgctataacaaatgccatagatatacacagatcgacaagtggaagcttgcgcattacggtatctaataacgattgcggtgttcgtgaatacgatatggagagatttcagctcttgaaccactaccgatataactggccagttaatcacacatctgtgagcccggataagaaacttttggctgtggttggagatgatcgggatgctcttcttgtggattcacggaatggaaaggtaacctctaccctagttggccatctggactactcatttgctacggcatggcacccggatagccggacctttgcgaccgggaaccaggacaaaacctgccgtatctgggacacccgcaacttgtcgacctcgcttgcggtattgcggggcaacatcggcgcgatccggtgcatacgctactcctctgatggacggttcctggtgttttcggagcctgcggactttgttcatgtgtacagcgtggctgcggactacaagaaacggcaggaaatcgacttcttcggtgaggtgtccgggatcaccctcagccctgatgacgagtccctgttcgttggagtgtgcgaccgtgtctatgccagcctgttgcagtacaggatgatccatgcattcgactatcttgattcatacgtgtgaaatggagctttggtgttgacgtgttgtgctcggtgctggctgaatgtcacttgttctcggtgacggttctggtgcgcggttcagggaatgtatctgcctgctcttctgcgctagttaatggcgaatgatgattcgttgggactcggacgcgagcgaatctgccatgtaaatagttcagcaattgaagcatagagctgtggaccaatactgtctgaacatatgagctgagtaatgtatgttttgcgttgttagttccagactccagagtacaaatagttttagaccaaattcgtaaagcctctttctactgtggaatgcgccaagggcttagtttgacttcaattatattcacttcgatctccgcgtgttaagagtcgattgatgtaaaaaaaatagtcaattttatttggatagatgtggattaaggtggatacgaattggattagagatgttagactagtttgtgaaattcatttttctcaaagaatttttattttctcaagataaattagttcatttttttttgaaaaaatagaaatcacttagtaaaataaagtttccaaactagcccgaaattttttatatcaggtttag

SEQ ID NO: 58974 - DNA, 1835 bp, Zea Mays
gtcaatggggcttgtggcgcagattcgttttggccagtcatctcactaggataagggacacatcagcagctgaagcaagggcaggaaaggatatacaaggtataccatgggagaggatacacatagccaggcaagactaccgaaaagctaggttggaacagtataagaactatgaaaatttccctcaatcaggagagctcatggataagttgtgcaagcaagtggagaagagcagcaagtattatgagtttcagcataacactagatcagtgaagccatcaattctccattttcagcttaggaatttgttatgggcaacctcgaggcatgatgtatattttatgtcaaattccacagtaacccattggtcatcattgtctcacaaattatcagaggttcttgacttctctgggcacattgctccggtggagaagcatcctggcagtttgctagaaggtttctctggggttcaagttagcacacttgctgtgaatgagggtttgttggtagctggtggttttcaaggagaactgattggcaaggatttggaaggatgtaatataaaattctgtgcaaggacaactttgagtgacaatgctataacaaatgccatagatatacacagatcgacaagtggaagcttgcgcattacggtatctaataacgattgcggtgttcgtgaatacgatatggagagatttcagctcttgaaccactaccgatataactggccagttaatcacacatctgtgagcccggataagaaacttttggctgtggttggagatgatcgggatgctcttcttgtggattcacggaatggaaaggtaacctctaccctagttggccatctggactactcatttgctacggcatggcacccggatagccggacctttgcgaccgggaaccaggacaaaacctgccgtatctgggacacccgcaacttgtcgacctcgcttgcggtattgcggggcaacatcggcgcgatccggtgcatacgctactcctctgatggacggttcctggtgttttcggagcctgcggactttgttcatgtgtacagcgtggctgcggactacaagaaacggcaggaaatcgacttcttcggtgaggtgtccgggatcaccctcagccctgatgacgagtccctgttcgttggagtgtgcgaccgtgtctatgccagcctgttgcagtacaggatgatccatgcattcgactatcttgattcatacgtgtgaaatggagctttggtgttgacgtgttgtgctcggtgctggctgaatgtcacttgttctcggtgacggttctggtgcgcggttcagggaatgtatctgcctgctcttctgcgctagttaatggcgaatgatgattcgttgggactcggacgcgagcgaatctgccatgtaaatagttcagcaattgaagcatagagctgtggaccaatactgtctgaacatatgagctgagtaatgtatgttttgcgttgttagttccagactccagagtacaaatagttttagaccaaattcgtaaagcctctttctactgtggaatgcgccaagggcttagtttgacttcaattatattcacttcgatctccgcgtgttaagagtcgattgatgtaaaaaaaatagtcaattttatttggatagatgtggattaaggtggatacgaattggattagagatgttagactagtttgtgaaattcatttttctcaaagaatttttattttctcaagataaattagttcatttttttttgaaaaaatagaaatcacttagtaaaataaagtttccaaactagcccgaaattttttatatcaggtttag

SEQ ID NO: 58975 - DNA, 1308 bp, Zea Mays
gttccctagaaaattggtgccacgacaatccacctcctaggatggagtcggacgcccttccgctccttttataaacctcgggcattcgctcccttgctggttgtccttgacacatctttcgaactcgtctccaaccgggccagcggtcgaactttgagcttttcaagatgtcgcgctccgtaggtcataggtcgagcggtgcagttgcagtcgacccggagactgcatctcgaccgagttccacatccttctccaccttgggtgctcacggggggttgtgatgcctttcgcacggcacatgaggtcgccgaggtgctgcgagtgcagcttgctgaggtcgacggccgcgtcgttgccttggaagcagagctcgatatactgcgccaccgctctagccagcttcttgattaagttggggcccatggtgcctctttgatcgagcacctggataacgcctcgtgccacgttcaggacattgtagactttgatgttcactgtggggctgtggtgacgctgctcatggcagaggtctgcttgggctacaaccttcaagatctcattggtcccccttcgtccttctcggatgaagggttggaggacctgctggaaggctacgacgacatagctagccacgtcgttcttagggtgtctgttcacgacgtcgtccgcgctgcacgctaactgtggcgtgttatgccttggcactgtccttgtgacaataataataatatatgcaaatacttttgctttctaatttctagcgtcgtggggctttcgaaccccttctccctgttattctttacgggctcggccgggtacctcccatctcttgctagctgatgctttccttcactcatggattgggacggtgttgggggctttcggcttctgaaggaactcaaaaacatgatttaacaatgcctctggagtataatgtgtggacagggatcttcgaacaagaacccacgatatgaagaagcatggaaacaatacgaaggatggaacagagccgaagctatgcacaagggagcttcggcatggtggcagaaaggaggaaactgacttaaagaggaaaagattatctagacccagataaattactatagagttattgtcaaaagcaaagggcctggttgtaattttgcatgggctgcgacccgtgcctataaataggtgaacagtattcccgtactgttcaccctgacttggcattcgcttttgcatcacgcttgtacccttactttccctcgagccgaaggtacatttataatttgttattgttgatatagtaacacaaataaaaataag

SEQ ID NO: 58976 - DNA, 1212 bp, Zea Mays
ctcccttgctggttgtccttgacacatctttcgaactcgtctccaaccgggccagcggtcgaactttgagcttttcaagatgtcgcgctccgtaggtcataggtcgagttgcagtcgacccggagactgcatctcgaccgagttccacatccttctccaccttgggtgctcacggggggttgtgatgcctttcgcacggcacatgaggtcgccgaggtgctgcgagtgcagcttgctgaggtcgacggccgcgtcgttgccttggaagcagagctcgatatactgcgccaccgctctagccagcttcttgattaagttggggcccatggtgcctctttgatcgagcacctggataacgcctcgtgccacgttcaggacattgtagactttgatgttcactgtggggctgtggtgacgctgctcatggcagaggtctgcttgggctacaaccttcaagatctcattggtcccccttcgtccttctcggatgaagggttggaggacctgctggaaggctacgacgacatagctagccacgtcgttcttagggtgtctgttcacgacgtcgtccgcgctgcacgctaactgtggcgtgttatgccttggcactgtccttgtgacaataataataatatatgcaaatacttttgctttctaatttctagcgtcgtggggctttcgaaccccttctccctgttattctttacgggctcggccgggtacctcccatctcttgctagctgatgctttccttcactcatggattgggacggtgttgggggctttcggcttctgaaggaactcaaaaacatgatttaacaatgcctctggagtataatgtgtggacagggatcttcgaacaagaacccacgatatgaagaagcatggaaacaatacgaaggatggaacagagccgaagctatgcacaagggagcttcggcatggtggcagaaaggaggaaactgacttaaagaggaaaagattatctagacccagataaattactatagagttattgtcaaaagcaaagggcctggttgtaattttgcatgggctgcgacccgtgcctataaataggtgaacagtattcccgtactgttcaccctgacttggcattcgcttttgcatcacgcttgtacccttactttccctcgagccgaaggtacatttataatttgttattgttgatatagtaacacaaataaaaataag

SEQ ID NO: 58977 - DNA, 3215 bp, Zea Mays
atcttgccgccaccgcaaacaggcgcccgagctcggaatctcatctcatccagtcccttcggccactccgccggcaggtcaagacaaaaatctcatcactgtgtactgtagttcagcggcagcaaagctcgctctgatttcgagctcgccaatggccgatgggccagtgaccgcgacctcctccatggcggtcccctccgcgcgccgtaaccgggcgctcctaccgacagtctccgtggctcgcgagccggcgcgcgcgtgggcagcggctggcgcggagggaagggcgcggagagggaaggaggctgaggtggaggacgagaaggaagcggggaggcggcggaaggaggaggtgaaccggaagatcgcgtcccggaaagcgctgtccgtcatcctccggcgcgaggccaccaaagcggttctcgacaagcgtaagcccggcaagggcacgcgccgcctcctccccggcaccgtcctcgaggccctgcacgaccgcgtcgcggccctcagatgggactccgccctcaaggtgttcgagctaatgcgggaccaggtgtggtacaagcctcacataggcatatacatcaagctcataaccatgctcggcaagtgcaagcagccggagaaggcgcaccagctcttccaggcgatgattgacgagggttgcgcgcccaacctccagtcctacaccgccctagtctccacgtatagcaggagcggccgcttccgtgaagcattcgacctgcttgaccggatgaaggacactccaggtttgctgagatggaatcaactcttctgaagatgttgtcacaaaattgcaagcctgatgtgtggacaatgaattctactctcagagcttttggcagtagtggtcagattgagacaatggaaagctgctacgagaagttccaggcctctggtattgtcccaaacattaagacctacaatatcttactcgattcctatggcaaagccaaaatgtatgagaagatgggagctgtgatggaatacatgcagaagtactactattcttggacaatagtcacatacaatgtagtgattgatgcatttggaagggccggagacctcgagcagatggaatatatatttaggctaatgaaatctgagcgtataaagcccaattgtgttacactctgttcagtggttagagcatatggaagagctggggaagttaagaaaataaagacagcgttgagaatcattgagaattctgacataacattggatattgtgttcttcaactgtttggtggatgcatatgggagggtggggtgcttggcagagatgtgggatattcttgatttgatgaaggagcatagatgcaaaccagacaaggtaacctgcactaccatgatcaaatggtttctcatcaaaggaatcgacgatcatcgtgttcagtacctacgtgatcttaaagatgggcgagcaaaagatgatacataggagtgaaaacaagaaaaactcttggagcagtgactttcgtatatatttttttaaaggaacgaatggatctttcggagcctcggtttacaattacatacatgcatcgatctcactgacttactactgaatcaaacattactcagataccatgagtcacactgctcactgacttatgtgctgcaagagctatatagggacatcttaaaaaaaagctactaatggttgataaggttgaagcaaattttggtgagtggccaataatgaacaatactggaatataaagatgatactgggaaaagggacacgttttagacgcagaagagacaagacatgctggtgaaattgatcagattctgctatctgttctgacttgatgtatcgacacagctgaacatgacttgtactgttgactagtgcaaaggctttacagcctgtttggtatcgacaccccctcactctttactttttgtatgatttgtggaatggaataagttgttccatcactatctgtaacgcataaaattctattttgggatctgtaagagtttctctaaaaagattaagatgactcttaatatggattcctcacttttgaagttactaggtgagtgtccgtgcgcaggggtggatattggggctgggccacctgtgccatggcccaggtcatagcctaaaaatatagtagagattttagcccaaatgaaaccctaacatctagttctccagcggctgccgcctgctgctgctgcgtgcgtgcctgcctccctccctggcccctgcggtcctgctggctgctcgggcgtcctgtggctcctgcgaggctgcgacctgctggctgctggcagaccgtcgtcctctgtctcctctcctccgcggccacgggtgcacggagccgggcagctggccgcgaggacaaaggaggccggactgccggagtccggacagccagacggccagagcgtggagcgcgactgcacgagggatctgggcgggcgatttgtccagcactccagcctctagtcaatcctagttactgtaactctattgacctcaaaacaagagaatgaagaggacaaaaacattgagatcattttatttttcggctcctacgcctttgatacgaaagatggatgatacaattactgtccgaggtcgctcaaggggatgtggaggtcagttagtgacttactaattactatcatcatttcaaaaatgagatctttattgttgtgtataattaagttattgtggaattaaacaattatttcactgaaagatctactcaattattgagatgcatttcttgtctagatctaagaaattcatttgtcagttatgacaaagctcatgttgtatctctcattttatacaaatatttaacttgcaatgtatagattcaaattcacgtgctaacgtggatgaagttattagaggcggagaaggaccaaatcgtctctaattaggtacttttatatttttaatcaagtttattatatttttagatgttgaattgaagtaaatactatcttagtctatgtttgttgtatatattgttttagcggtatatttagccgcacaatatattaggggctgtttaaagtaaccttcaaattttatagagtggcccggggcgttaattttatagagctctgccactgcccgtgcgtagctatgagaacatataataccacgataactatatacaaatgtgtattatgctgaaatgtgtgttatactgttaagagaaaaag

SEQ ID NO: 58978 - DNA, 3266 bp, Zea Mays
ctcatccagtcccttcggccactccgccggcaggtcaagacaaaaatctcatcactgtgtactgtagttcagcggcagcaaagctcgctctgatttcgagctcgccaatggccgatgggccagtgaccgcgacctcctccatggcggtcccctccgcgcgccgtaaccgggcgctcctaccgacagtctccgtggctcgcgagccggcgcgcgcgtgggcagcggctggcgcggagggaagggcgcggagagggaaggaggctgaggtggaggacgagaaggaagcggggaggcggcggaaggaggaggtgaaccggaagatcgcgtcccggaaagcgctgtccgtcatcctccggcgcgaggccaccaaagcggttctcgacaagcgtaagcccggcaagggcacgcgccgcctcctccccggcaccgtcctcgaggccctgcacgaccgcgtcgcggccctcagatgggactccgccctcaaggtgttcgagctaatgcgggaccaggtgtggtacaagcctcacataggcatatacatcaagctcataaccatgctcggcaagtgcaagcagccggagaaggcgcaccagctcttccaggcgatgattgacgagggttgcgcgcccaacctccagtcctacaccgccctagtctccacgtatagcaggagcggccgcttccgtgaagcattcgacctgcttgaccggatgaaggacactccaggtgaagagtttgctggctgatatggcacgagcgggcattccgcctaacaccgtcacctataatacattgatcgatgcctatgggaaagcaggaaggtttgctgagatggaatcaactcttctgaagatgttgtcacaaaattgcaagcctgatgtgtggacaatgaattctactctcagagcttttggcagtagtggtcagattgagacaatggaaagctgctacgagaagttccaggcctctggtattgtcccaaacattaagacctacaatatcttactcgattcctatggcaaagccaaaatgtatgagaagatgggagctgtgatggaatacatgcagaagtactactattcttggacaatagtcacatacaatgtagtgattgatgcatttggaagggccggagacctcgagcagatggaatatatatttaggctaatgaaatctgagcgtataaagcccaattgtgttacactctgttcagtggttagagcatatggaagagctggggaagttaagaaaataaagacagcgttgagaatcattgagaattctgacataacattggatattgtgttcttcaactgtttggtggatgcatatgggagggtggggtgcttggcagagatgtgggatattcttgatttgatgaaggagcatagatgcaaaccagacaaggtaacctgcactaccatgatcaaatggtttctcatcaaaggaatcgacgatcatcgtgttcagtacctacgtgatcttaaagatgggcgagcaaaagatgatacataggagtgaaaacaagaaaaactcttggagcagtgactttcgtatatatttttttaaaggaacgaatggatctttcggagcctcggtttacaattacatacatgcatcgatctcactgacttactactgaatcaaacattactcagataccatgagtcacactgctcactgacttatgtgctgcaagagctatatagggacatcttaaaaaaaagctactaatggttgataaggttgaagcaaattttggtgagtggccaataatgaacaatactggaatataaagatgatactgggaaaagggacacgttttagacgcagaagagacaagacatgctggtgaaattgatcagattctgctatctgttctgacttgatgtatcgacacagctgaacatgacttgtactgttgactagtgcaaaggctttacagcctgtttggtatcgacaccccctcactctttactttttgtatgatttgtggaatggaataagttgttccatcactatctgtaacgcataaaattctattttgggatctgtaagagtttctctaaaaagattaagatgactcttaatatggattcctcacttttgaagttactaggtgagtgtccgtgcgcaggggtggatattggggctgggccacctgtgccatggcccaggtcatagcctaaaaatatagtagagattttagcccaaatgaaaccctaacatctagttctccagcggctgccgcctgctgctgctgcgtgcgtgcctgcctccctccctggcccctgcggtcctgctggctgctcgggcgtcctgtggctcctgcgaggctgcgacctgctggctgctggcagaccgtcgtcctctgtctcctctcctccgcggccacgggtgcacggagccgggcagctggccgcgaggacaaaggaggccggactgccggagtccggacagccagacggccagagcgtggagcgcgactgcacgagggatctgggcgggcgatttgtccagcactccagcctctagtcaatcctagttactgtaactctattgacctcaaaacaagagaatgaagaggacaaaaacattgagatcattttatttttcggctcctacgcctttgatacgaaagatggatgatacaattactgtccgaggtcgctcaaggggatgtggaggtcagttagtgacttactaattactatcatcatttcaaaaatgagatctttattgttgtgtataattaagttattgtggaattaaacaattatttcactgaaagatctactcaattattgagatgcatttcttgtctagatctaagaaattcatttgtcagttatgacaaagctcatgttgtatctctcattttatacaaatatttaacttgcaatgtatagattcaaattcacgtgctaacgtggatgaagttattagaggcggagaaggaccaaatcgtctctaattaggtacttttatatttttaatcaagtttattatatttttagatgttgaattgaagtaaatactatcttagtctatgtttgttgtatatattgttttagcggtatatttagccgcacaatatattaggggctgtttaaagtaaccttcaaattttatagagtggcccggggcgttaattttatagagctctgccactgcccgtgcgtagctatgagaacatataataccacgataactatatacaaatgtgtattatgctgaaatgtgtgttatactgttaagagaaaaag

SEQ ID NO: 58979 - DNA, 2651 bp, Zea Mays
caaaaatctcatcactgtgtactgtagttcagcggcagcaaagctcgctctgatttcgagctcgccaatggccgatgggccagtgaccgcgacctcctccatggcggtcccctccgcgcgccgtaaccgggcgctcctaccgacagtctccgtggctcgcgagccggcgcgcgcgtgggcagcggctggcgcggagggaagggcgcggagagggaaggaggctgaggtggaggacgagaaggaagcggggaggcggcggaaggaggaggtgaaccggaagatcgcgtcccggaaagcgctgtccgtcatcctccggcgcgaggccaccaaagcggttctcgacaagcgtaagcccggcaagggcacgcgccgcctcctccccggcaccgtcctcgaggccctgcacgaccgcgtcgcggccctcagatgggactccgccctcaaggtgttcgagctaatgcgggaccaggtgtggtacaagcctcacataggcatatacatcaagctcataaccatgctcggcaagtgcaagcagccggagaaggcgcaccagctcttccaggcgatgattgacgagggttgcgcgcccaacctccagtcctacaccgccctagtctccacgtatagcaggagcggccgcttccgtgaagcattcgacctgcttgaccggatgaaggacactccaggttgccagcctgatgtgcagacatactcgattctcattaagtcatgcttacatgcttatgattttgagaaggtgaagagtttgctggctgatatggcacgagcgggcattccgcctaacaccgtcacctataatacattgatcgatgcctatgggaaagcaggaaggtagctgaccgcaagagcctatgcttatgtagtccaaatatgtaatgattgatcatatatatggtgaaattttactagctctaaagggatgcaccgtgtttacctgaagcctagttaccaaataaccgtctcagagtctgaagtagtttgccattcattgaattttgtcacccaaatctttagttattcaagattaggttccatggaatatagttcattttctttttaccaaagcattctgaaaattttcttgtactctgttcttgataatgagtctgattattgttaaaataaaagaaaatctagtttagtaagaagttactgcagtttctccgtcctagtagatgcactgataataccgctgaaccttgaattttgaaaagtgcccttggctgcatttgtttagcctttcaaatctatcattatatccagttattcctgaattggattctatgaaatagagctcggctaatgatattttattttgaaggtttgctgagatggaatcaactcttctgaagatgttgtcacaaaattgcaagcctgatgtgtggacaatgaattctactctcagagcttttggcagtagtggtcagattgagacaatggaaagctgctacgagaagttccaggcctctggtattgtcccaaacattaagacctacaatatcttactcgattcctatggcaaagccaaaatgtatgagaagatgggagctgtgatggaatacatgcagaagtactactattcttggacaatagtcacatacaatgtagtgattgatgcatttggaagggccggagacctcgagcagatggaatatatatttaggctaatgaaatctgagcgtataaagcccaattgtgttacactctgttcagtggttagagcatatggaagagctggggaagttaagaaaataaagacagcgttgagaatcattgagaattctgacataacattggatattgtgttcttcaactgtttggtggatgcatatgggagggtggggtgcttggcagagatgtgggatattcttgatttgatgaaggagcatagatgcaaaccagacaaggtaacctgcactaccatgatcaaatggtttctcatcaaaggaatcgacgatcatcgtgttcagtacctacgtgatcttaaagatgggcgagcaaaagatgatacataggagtgaaaacaagaaaaactcttggagcagtgactttcgtatatatttttttaaaggaacgaatggatctttcggagcctcggtttacaattacatacatgcatcgatctcactgacttactactgaatcaaacattactcagataccatgagtcacactgctcactgacttatgtgctgcaagagctatatagggacatcttaaaaaaaagctactaatggttgataaggttgaagcaaattttggtgagtggccaataatgaacaatactggaatataaagatgatactgggaaaagggacacgttttagacgcagaagagacaagacatgctggtgaaattgatcagattctgctatctgttctgacttgatgtatcgacacagctgaacatgacttgtactgttgactagtgcaaaggctttacagcctgtttggtatcgacaccccctcactctttactttttgtatgatttgtggaatggaataagttgttccatcactatctgtaacgcataaaattctattttgggatctgtaagagtttctctaaaaagattaagatgactcttaatatggattcctcacttttgaagttactaggtgagtgtccg

SEQ ID NO: 58980 - DNA, 1396 bp, Zea Mays
aaccctgacatcaaccaccacagcctacgatcttggaaatgaaccctgaggatgaagctgaggaggatggtgctaacattgatttagactcacaaaggaaaggaaaatgtgttgttctgaagacctccacaagacaaactatattccttcctgttgttgggctagtggaccctgacaagctaaagcctggtgatctggttggagtcaataaagatagctaccttatactagatacattgccatcagagtacgattcacgagtgaaggcaatggaagtggatgaaaagcccactgaagattataatgacattgggggtcttgaaaagcagattcaagagcttgtagaggcaattgtactgcccatgacacataaagaccggttccagaagttgggtattcgtcctccaaaaggggttcttttgtacggaccaccaggaactggcaagacactcatggctcgtgcatgtgctgcacagacgaatgcaacgtttcttaaattagctggtccacaacttgtgcagatgtttattggtgatggagcaaagcttgtccgggatgcattccagcttgccaaagagaaagctccttgtattatatttattgatgagatagatgccattggcaccaaacgttttgatagtgaagttagcggtgatagagaagttcagcggacaatgttggaattattgaatcaactggatggattcagcagcgatgagagaataaaggtcatagctgcaactaaccgtgctgacatccttgaccctgctctgatgcgatctggacggttggaccgaaagattgagttccctcacccatccgaagaagcaagagctagaatcttgcaaatccattcaaggaaaatgaatgtaaatcctgatgtcaactttgaagaattggctcgctcaactgatgacttcaacggagcacagctaaaggcagtttgtgtagaagctggtatgcttgccctacggcgggatgctacagaggtaactcacgaggatttcaatgaagggatcgtacaggtccaggcgaagaaaaagtcaagcttgaactactatgcttaagctgtttgtcaaaacatatggaccataaggtgtttgtaacactactgtatgaataatcgaagctatgtttttaatgcaagatttttacagcatataagaccccacgccagcacacctgatttttttttgtattttagctcttttcttgaaaagtattcacgtttagaccgttggatgatttaatctcatttttgtaccctttgctcggcgtcacagcctgtggcgccgaggtaacatagtttagcgccacagattttgatgtcgaggtgcatgctccactggcgacgaggggctgacatggcgtcggtgccatgatttatgggccaagc

SEQ ID NO: 58981 - DNA, 1635 bp, Zea Mays
cgtttctgttagtagcatccttttctgttctatttcactctagaagtctagaaccatagcatccttttctattctatttcactccagaagtctagaaccaaacacaaaatagagccatttcgttgtagaaaaaaaaatatagagtggctgctgttctccgtccaactagcaggtctcaacctcgaggcactctcacgcccaacggccacaccaccgtcctctccgcgtgcccccgaaaccaccacacgcggccacgccacgccgcccactacgggcgggcctccttgcgcttggagtattggtcgacgtgctcctctcaccgcaccctctactgatactgggttggcgcgagaacggcgagcccacctgaacgcgggattcagtgattttggatggtgaaggtacagagtaaagagtctgcaacctttggtggtgcagtttttatgtgcaaccatctgaccaggaaggagtgctttgacaagaaaatatttggcctctctgatttctgtgctgattttgtagagaaagttaaagctggcacaactttattcttatatgatgttgatcagtgtaagctccatggtgttttcgaagcaacttcagatggggctgtgaacattattcctgatgcatatgtcgcatcaggaaagggatacgtttcaagaggatttggttttgcaagcctttgacgcttactgaatttcaagatgctgtccacaattattctgttaaaaacaagtttagttatggtttgtcacaccaacaggttgcaaagcttctccatttgttttcttcacggaacaggttgcagcttcctcaaaacccaatattacaagatgatgtcccaggggaccttgagacttcttcttctctggctagagtaactgacgtgcagtgcagtccatgtggttcattcaggagcacctgtcaaacatgttcctccacctctcttggggaacatatggcaccgatgggtgcaaaattaatcgatcccggggcattaatgcacagaggtctacaatcagacatctcaaaatctcccctgcaatctggagcggagatggccactatcaccatacctggcaaccaagaagcaatgcatgaccaacctactgatgactatatacctcttctccaggaggaaaatacttttgaaggtgttgatggtctatttgcgttgctaaaagatgtgtgccactcttctgaattatctaaacgtagcagtgactctgaaaaccataatacattccaccaagtttgtattaggaaggaagatgaatgctgcccacccatcttaggtcgttccaaactccgtgctgacagtgaagggcgaacaagtgtgttttctcggttagtgagaaagcacgatcgtggtcgtggggaggcaatgaaacagctgtgatgctgtgctcatcaccggatgcacaacctgcaaggacacactatccttgagctgccctcggtttgtgtttgagtgcctttcgttcgtttgttgttagggtaagaacggagtacgtgtcgtgaacctggatgtgttgtagttgcatgttgtattactatttcgggcctatgtttgctgtgtagacgagttatcacgtaattgctacatgtgtgtctgttgttcttgtgcttgtt

SEQ ID NO: 58982 - DNA, 982 bp, Zea Mays
ggacccattacaagtagtttttcgagttaattctacaaatttaactaataaatcccgcaaaaaaactcggaatcttaaataattctgcgcacgcgcgaaccgtctgcgccaccaccgtggattgctcggcctactatggcggaccgtccgcttcccaagtgggctcaacacaaagtataacatttttgtctgttctactgtaaattgagccgtgtccaacaagcgagcaccattcgttgcagttggcccaaaaatacttgcccggcccaatcgaatctctgaccgatataccgaaccctagcccagttgttccgccgagcgaacgatccagaagcagaagccaccgatcggcgtgccgcgtgcgtgaggcgatcggagcatcccgtcccgaggaggaagacaaccggcgacgcggggggaacatggggaagacgccggtgcggatgaaggcggtcgtgtacgcgctgtcgcccttccagcagaaggtaatgccggggctgtggaaggacatcaccaccaagatccaccacaaggtcaccgagaactggatctccgccacgctcctcctcacccccgtcgtcggcacctaccaatacgccatgtggtacaaggagcaggagaagctttcccacagatattaaatgcgctgcccttcacagacagcacttggatttaacatttgtttgatcaatttcagttcaacgccttttcatcgttccatatgcatgtatggtatccgtgtctggcaaacttattttgaggcttgttaaatatgtaccttttgtctctcaagatgttaaataaagcaaattaacttccagtttctcgtgtttgtgtttaagaattggtaactgggtttatttgttagttgtctcattttttgcaccaatgagatcagcacaatagaacgtctcttgagatccgtttccaacatcaagacggtccgaggacactggtcctaattgtgtaacgaaaaataaaa

SEQ ID NO: 58983 - DNA, 2133 bp, Zea Mays
atgaagaacgtgtatggggaggggttagggagaagaaatccggggattgagggtggcaccagtcaccgtggagaagacgatactgacatcaccgaggccattgatggcaaggggattgagggtggcaccagtcaccgtggagaagacggtactgacatcaccgaggccattgatggcaaggggattgagggtggcaccagtcaccgtggagaagacggtactgacatcaccgaggccattgatggcaaggtgccggggattgagggtggcaccagtcaccgtggagaagacggtactgacatcaccgaggccattgatggcaaggggattgagggtggcaccagtcaccgtggagaagacggtacttacatcaccgaggccattgatggcaaggggattgagggtggcaccagtcaccgtggagaagacggtactgacatcaccggggccatcgattgcaagtgcagggaactgggaaagcgtcgcgtgggttctggaataatcaagaacgaagtcggtcgtccgctgatggaaggaaacaccaaacgtgatgtcatcggtatctgatcggacggttgagaaaaaaagaactacgcgaatgctgtctctgtggccgttttgaacagcctttcatacataggaaatatcccctcgatctggtttgcagaggtctcgatcgccgctctataaattagcagtcctatataaactggttcgcagacagcgaaggcccagtcaaacaaattgtttactagcctaagtgtaagagcagcacgatggtgcatcaggctcagggacagatggtgcaggaggtggccgccgccggcctccccgcgctgccgagccggtacgtgctgagggaggaggaccgcccaactggtgacgtcgcggcacccgagttggccttccccaccgtggacgtcaatgtcttgccgaccccggtgacgtggaggaggccagcaagctccggtcggcgctcgaatcctggggcctcttcaaggtgaccggccacggcatgccggtatccctgctggacggcatccgggacgccgggctggagttcttccacctgccagcggcggagaagctgaagcacgccaaccgggacgacgccggcgagttccagcccgagggttacggcatcgaccgcgtggacaccgacggtcaggtgctggactggtgcgaccggctgtacctgacggtgcagccggaggaggagcggcggatgcagttctggcccgcgcggccggcgtcgctcgtggggctcctgcacgagtacgccctgggcagcgagcaggtggccaggcgcgtgctccgggccatggcgcgggtgctggggttcggcgaggggttcttcctcgggcacgtgggcgagaagggcggcacgtacgcgcggttcacctactaccctccctgcccgcgcccggacctcgtgtacgggctgaagccccacacggacaactccgtcgtcaccgtgctcctcctcgaccgcgacgtcggcggcctccaggtgctgctcagggggcctggccccggccggtgggtggacgtgcccgtgctcgcccgcgacgagctgctcgtcgtcgtcggcgaggagatggagatcatgagcaacgcggtgttcagggcgcccacgcaccgcgtggtcaccagcggcagggagaggatgtcgctcgtgctcttctaccagccggagccgcacaaggacctgcagcccgcggaggagctggtgagcgaggaccggcccgcgatttacaggaggctcaaggccaagaccttcggcgacgggttctgggatgcgttcgcgctcggcgagcgcaccatcgacttcctcaacatcaaggtcgacgacaaggagcatggaggcggattagtaacctcagcgccagcttgacgccatgcatgtgaacgaactactgtacacgatgtatcactggtagtgtaatgtaataagagacatggagcggttttccatgcaatataatctagtttatcacaggatctggttggtgttgatgtgcaaaccgtaaggagccgttctgttgtgtagaaatggtgacctgaaactattccaaaacgaattactttttaaatttatataagttttgaacaacatgaaaaaatctggagcta

SEQ ID NO: 58984 - DNA, 852 bp, Zea Mays
atgaaacctctgccccggggctagggtttcctcccagccgtcatcgcttcacgtccgctacagaccggcgaggagacgaaaggagggagttttgagaagctcaaatggctcctaaagccgctcctgccaagaagggtgatgccaaggcccaggccttgaaggtggccaaggctgtgaagtctggggcaggcaagaagaagaccaagaagattcgcacatctgtaacatttcaccagcccaagaccctgaagaaggccagggacccgaagtacccaagaatcagcactactggaagaaacaagcttgatcagtaccaaattctcaagcagacaagaaaaagatcaaggctgcggtcaagaagatgtatgacattcaagcaaagaaggtcaacaccctgatcaggcctgatgggaagaagaaggcttatgtgaaactgacacccgactacgatgcccttgatgtggccaacaaaattggcatcatctaagttaataggcaactggattcgacatctgtgtcctactagttctgagcataccaacagatttttctatgttactagtaattttgtttgtcatatttggtttttttgcaactaagtcttgttcgcagttgcagactacatatgcctgtattgagatcctggttgccaaattaaccatcttgaactggcattattccactttacgtataatggctgaatctgttgtggcgttgtgcgaacatgattgatcaccctgcatagtttagtggactattgctaaatacaatatctctgtttatttgctatcagtaaccaacctgtatagattgtagctgaattttgtcgaaatttgcagtcaaccttgatct

SEQ ID NO: 58985 - DNA, 2537 bp, Zea Mays
gggggctgccaattggtgtacccccttcaaaagagcaacatcgtttcttttcactgagtaccaatatgttggtatcttcatgtccatctttgctgttgtgatcttcctcttccttggttcggttgagggattcagcacgaagagccagccctgcacctatagcaaggacaagtactgcaagcctgcactgttcactgcactctttagcactgtgtccttcttgcttggagccatcacctctctggtctccggtttccttggcatgaagattgccacatatgcgaatgccagaactaccctggaagctaggaagggtgttggcaaggcttttatcaccgcttttcgctctggtgctgttatgggcttcctgcttgcatcaagtgggcttgtggttctgtacatcaccattaatgtatttaagttgtattacggtgatgactgggagggtctttttgagtctatcactggctatggccttggtgggtcgtccatggctctctttggaagagttggtggaggcatctacacaaaggctgctgacgttggtgctgatcttgttggaaaggtcgagaggaacattcctgaggatgatcctaggaacccagctgtgattgctgataatgtcggtgacaatgttggtgacattgctggaatgggatctgatctctttgggtcatatgcagagtcttcctgtgctgcccttgttgttgcgtctatttcatctttcggaatcaaccatgatttcactgggatgtgctacccactccttgttagctctgttggtatcattgtctgcttgatcaccaccctttttttgctactgattttctttgaagtcaaggctgtgaaagaaattgagcctgcacttaagaagcagctcatcatctccactgtcctgatgactgttggtattgctgtaatcagctggttggcccttccagctaagtttaccatcttcaactttggtactcagaaggatgtctccaactggggcttgttcttctgtgttgcaattggtctgtgggctggtctgattattggttttgtcacagaatactacactagcaatgcatacagtcctgtgcaagacgttgcagattcttgcagaactggtgctgccactaatgtcatttttggtcttgctcttggatacaagtcagttatcatcccgattttcgctatcgctgttagcatctatgtcagtttctccattgctgcaatgtacggcatcgcagttgccgctcttggtatgctgagcacaattgcaactggtcttgctattgatgcttatggtcccatcagtgacaatgctggtggtattgctgagatggctggaatgagtcacagaatccgtgagagaactgatgctcttgatgctgctggcaacaccactgccgctattggaaagggatttgccattggttcagctgctcttgtgtctctggcgctttttggtgccttcgtcagcagagctggagtgaaggttgtcgatgtcctctcccccaaggttttcattggtttgattgttggagccatgcttccctattggttctctgccatgaccatgaagagtgttggaagtgccgccctaaagatggtggaggaggtccgcagacagttcaacaccattcctgggttgatggagggaactgccaagcctgactatgcaacctgtgtgaagatctccactgatgcttccatcaaggagatgattcctcctggtgctctggtcatgctcactcccctcattgttggaaccctcttcggtgttgagactctctctggtgttcttgccggtgccctggtttctggagtgcagattgccatctctgcttccaacaccggtggtgcatgggacaatgctaagaagtacattgaggctggtgccagcgagcatgccaggaccctcggccccaagggatctgactgccacaaggctgctgtgataggtgacaccattggtgaccccctgaagggacacctcgggcccgtccctcaacatcctgatcaagctcatggcggtggagtcccttgtgtttgcccccttcttcgccacccacggtggcctgctgttcaagtacctgtaagggccacaccaatcatcacagcagaaatatacgaccgaccgaccgtggacatctcgaataactcctgccaaatcgccagttcatgtgtattgtgcgctagccgcctagctgcactgctgtttttttggtctcattgttcgtattttctccttggcccctccccctagaggcgttactgttagccttactcttactccctgtagctgcacgtagaagagaactgttgtcctgcaggtctggcaaattttcccagtctcttgatgatggcgatgatgttgaaatctttgaacaatgatacatgattgttgcattttactggtggtatggtatctcgtacatcgtattggactgcagatgcctcattcgtatcatctaatgttaatacgtaatgatgtgtctgctgccgacacgttctatagttgagtaaaatatattttaggtacttaaacc

SEQ ID NO: 58986 - DNA, 2601 bp, Zea Mays
cagatcaccatttggctgacataagctaccattactcaatacaagggctccaatgtctctagtgcactaggtagatctagacctggaagttcctgggagcaacatcgtttcttttcactgagtaccaatatgttggtatcttcatgtccatctttgctgttgtgatcttcctcttccttggttcggttgagggattcagcacgaagagccagccctgcacctatagcaaggacaagtactgcaagcctgcactgttcactgcactctttagcactgtgtccttcttgcttggagccatcacctctctggtctccggtttccttggcatgaagattgccacatatgcgaatgccagaactaccctggaagctaggaagggtgttggcaaggcttttatcaccgcttttcgctctggtgctgttatgggcttcctgcttgcatcaagtgggcttgtggttctgtacatcaccattaatgtatttaagttgtattacggtgatgactgggagggtctttttgagtctatcactggctatggccttggtgggtcgtccatggctctctttggaagagttggtggaggcatctacacaaaggctgctgacgttggtgctgatcttgttggaaaggtcgagaggaacattcctgaggatgatcctaggaacccagctgtgattgctgataatgtcggtgacaatgttggtgacattgctggaatgggatctgatctctttgggtcatatgcagagtcttcctgtgctgcccttgttgttgcgtctatttcatctttcggaatcaaccatgatttcactgggatgtgctacccactccttgttagctctgttggtatcattgtctgcttgatcaccaccctttttttgctactgattttctttgaagtcaaggctgtgaaagaaattgagcctgcacttaagaagcagctcatcatctccactgtcctgatgactgttggtattgctgtaatcagctggttggcccttccagctaagtttaccatcttcaactttggtactcagaaggatgtctccaactggggcttgttcttctgtgttgcaattggtctgtgggctggtctgattattggttttgtcacagaatactacactagcaatgcatacagtcctgtgcaagacgttgcagattcttgcagaactggtgctgccactaatgtcatttttggtcttgctcttggatacaagtcagttatcatcccgattttcgctatcgctgttagcatctatgtcagtttctccattgctgcaatgtacggcatcgcagttgccgctcttggtatgctgagcacaattgcaactggtcttgctattgatgcttatggtcccatcagtgacaatgctggtggtattgctgagatggctggaatgagtcacagaatccgtgagagaactgatgctcttgatgctgctggcaacaccactgccgctattggaaagggatttgccattggttcagctgctcttgtgtctctggcgctttttggtgccttcgtcagcagagctggagtgaaggttgtcgatgtcctctcccccaaggttttcattggtttgattgttggagccatgcttccctattggttctctgccatgaccatgaagagtgttggaagtgccgccctaaagatggtggaggaggtccgcagacagttcaacaccattcctgggttgatggagggaactgccaagcctgactatgcaacctgtgtgaagatctccactgatgcttccatcaaggagatgattcctcctggtgctctggtcatgctcactcccctcattgttggaaccctcttcggtgttgagactctctctggtgttcttgccggtgccctggtttctggagtgcagattgccatctctgcttccaacaccggtggtgcatgggacaatgctaagaagtacattgaggctggtgccagcgagcatgccaggaccctcggccccaagggatctgactgccacaaggctgctgtgataggtgacaccattggtgaccccctgaagggacacctcgggcccgtccctcaacatcctgatcaagctcatggcggtggagtcccttgtgtttgcccccttcttcgccacccacggtggcctgctgttcaagtacctgtaagggccacaccaatcatcacagcagaaatatacgaccgaccgaccgtggacatctcgaataactcctgccaaatcgccagttcatgtgtattgtgcgctagccgcctagctgcactgctgtttttttggtctcattgttcgtattttctccttggcccctccccctagaggcgttactgttagccttactcttactccctgtagctgcacgtagaagagaactgttgtcctgcaggtctggcaaattttcccagtctcttgatgatggcgatgatgttgaaatctttgaacaatgatacatgattgttgcattttactggtggtatggtatctcgtacatcgtattggactgcagatgcctcattcgtatcatctaatgttaatacgtaatgatgtgtctgctgccgacacgttctatagttgagtaaaatatattttaggtacttaaacc

SEQ ID NO: 58987 - DNA, 3551 bp, Zea Mays
aaagttgcacgctgcagacttgaatgcaaagcaagggcgactgatgtgagctcgttcggtggtgccgtggtggagcccccgttctgtctcgctgttgcctttctcctccctcttcctctgcgcactgcagcagctgcagcgcagtgaagtgttgtgttgctcgaccacgagcataccagctgcttgctcacctttccctttctcgggtagttcgccatttttttaaaataatcagcagtaagcaagagctcggcgagctgagccgagcagcactgcggcaaagaactcccacttccattgcctgcttgcttctgctctgctgcacctgcgaccgttccagcggccgccgccggcccggccgacttggcggcgactggcgaccatgaagggcgtcgacgatgggttcctcggcgctggcgacaagccagggctggatatttggtgcatctttgggagcagtgtggtcccagttgcaaaatctcagcacggaaagttctacaccggcagcacctacatcatactaaacacaactcagctgaaatccggggttcgcagacacgatgtgcattactgggttggggaggaggctaaagaggaagattgtttcatggcctcggacaaggctgttgagttggacgcagcactgggctccagcacggtccagtacagggaaacacagggtgaagaatctgacaagttcttgtcatacttcaaaccgtgtgtcatcccaatacaaggccgcttcttttcacacctgaaaggatctggtgatagatccagcgcgaccacgatgtttaggtgccaaggagagcacgttgctcgtgtcacacaagttccgttttcacggtcctctctggatcacaaatcggtttttatagtggacacgccgtcaaagcttttccttttcagtggctgtaattctcgtatgcaaacaagggctaaagcgttggatgttgttaagcatctgaaggagaatcgacacttgggaagatgtgagatcgcgacaatagaggatggaaagcttgttggtgattctgatgctggagagttctggaacttgtttggaggctatgcgcctattcctcgtgatctacctgacgcaatcaaggaagagccactaactgcaccatctaagaaacttttttggatcaataagaaaaaccttgttccactcgaggcacacccgttggatagagaaatgctgaactcagacagaagttacatgctggactgcagcactgaaatattcttatggatggggatgacaacactggtttcagagaggaagtcatctgttgctgtcttggaagattatgtgcactcccaaggcaggtcattcaacgttcacacatttataatgacagaaggccatgaaactgttgactttaagctgcactttcaacactggtccaggaatgttgagctaaagttatatgaggctggccgagagaaagtggcagctattttcaagcatcagggctatgatgtcacagaaattcctgaggataaacctcagcagttcatcaattgtaatggcagtctgaaggtttggttggtggaccatggttgtacaaaccttcttagtactgaggaccaggaaaaattgtacactggagactgttatatcatacggtatagctattttgaaaatggaaaaaattaccatctgttctttgcatggtctggtaagaatagtgtaaaggtacgttctttgtaactccatccatgtaacctattgatatttcagagaaaaggctgttaaaacatggcctacaactattaggatccagatgtattgcttgcctctgtttgcacatacatgttgtgcaattgttcaacgttttgcatgttacataacttgtgcgtttacctgcaggatgatagaatggcggcaacatcgttaatgtctagcatggttgattcagtcaaagggcatccagttgtggcacaagtttttgagggcggagaaccagaattatttctctcggtgttcaagtcactaatcatattcaaggggggcaggagtgctgcatataagagttctgttctacagaaaagtccgagaaatggatgtcatgagagtgaaggagtcgccctattccgtgttcaagggcttaaacattattgtgtgcaggccattcaagttgatctggttgcaagttcacttaattcctcgcactgttatattttgcaagacaacggtttgttccttacttggttaggaggcctgtcttcaccaagcgatcataatatacttgacatgatcatgagcaagttgtgtccaatggaacagtccttgctagtcagagaaggctctgaaccagatcacttctggaaagctttgggaggacgatcggagtactcgaaagaaaagcgtgtgaaaggttggcctgcagatccacatctgtatgcttgtagatttgaacaaggtttactcaaggtcaaggaggtattcagcttctgtaaggatgacctggcaactgaagagacgttgattctggactgcaatgaagaaatctacgtctgggttggcctacactcagatattacatccaaggagcaagctctcaatgttggcaagatgttccttaaggatgctgttcacggtggaaggtcaatggaaacgacagtgtatgctgtcacagaaggggacgagcctggatttttcaccagcttcttcgactgggacaattcgaagcaatcatatatggttggcaactcatttgagaggaagctcgccgtcctgaaaggggtctccccaaaactagaggtttttgacgtttttttttgaatgctgctaatttatccaatctcatatatatcctacataaaactccttaggcctatactagagtagcaagacatgtggattagggtcaataatagagtaccgaaacaaaaccttacgttgtaaactgatagacagcctagctatccttgatgctctgtttgactagattcctctataaatccctacattgttgtcatggtattgagagttgagactgactgcctcggcttcctgtgatacagacaccggacagaagcctgcgcaggccgtctaggaggcccggggtatcgtcggagccgaccacgccggagcaccagcaaccgaccgcgagaagggccttcggctccacgtctgccgggcggtttgccagggagcgctctccggctgttgcaccgccaacgttgtcgccatctcccaaaagccgctcgtcgtcgtcgacgcccaccacggtggcacgacggctctttcctgcctcggtgcacgcatcggaggctgtgcacgtggtctccacggcgacagctcgacgacggtgagaggagaggtggctgtgtatgcatgcgtaatcgtgcacgattgaaatcatgtagagttgtactagacgatggatttatatgtccggcctacgtacgtgtctgtatacagaatttacctctcaaactgtcaaaccccgaaagtttcttgttttggagaacttgggagtgtgaatagtcgctactcgctactaataaatacgactgtcgttcaaaaacaaaagagtaaa

SEQ ID NO: 58988 - DNA, 3110 bp, Zea Mays
aaagttgcacgctgcagacttgaatgcaaagcaagggcgactgatgtgagctcgttcggtggtgccgtggtggagcccccgttctgtctcgctgttgcctttctcctccctcttcctctgcgcactgcagcagctgcagcgcagtgaagtgttgtgttgctcgaccacgagcataccagctgcttgctcacctttccctttctcgggtagttcgccatttttttaaaataatcagcagtaagcaagagctcggcgagctgagccgagcagcactgcggcaaagaactcccacttccattgcctgcttgcttctgctctgctgcacctgcgaccgttccagcggccgccgccggcccggccgacttggcggcgactggcgaccatgaagggcgtcgacgatgggttcctcggcgctggcgacaagccagggctggatatttggtgcatctttgggagcagtgtggtcccagttgcaaaatctcagcacggaaagttctacaccggcagcacctacatcatactaaacacaactcagctgaaatccggggttcgcagacacgatgtgcattactgggttggggaggaggctaaagaggaagattgtttcatggcctcggacaaggctgttgagttggacgcagcactgggctccagcacggtccagtacagggaaacacagggtgaagaatctgacaagttcttgtcatacttcaaaccgtgtgtcatcccaatacaaggccgcttcttttcacacctgaaaggatctggtgatagatccagcgcgaccacgatgtttaggtgccaaggagagcacgttgctcgtgtcacacaagttccgttttcacggtcctctctggatcacaaatcggtttttatagtggacacgccgtcaaagcttttccttttcagtggctgtaattctcgtatgcaaacaagggctaaagcgttggatgttgttaagcatctgaaggagaatcgacacttgggaagatgtgagatcgcgacaatagaggatggaaagcttgttggtgattctgatgctggagagttctggaacttgtttggaggctatgcgcctattcctcgtgatctacctgacgcaatcaaggaagagccactaactgcaccatctaagaaacttttttggatcaataagaaaaaccttgttccactcgaggcacacccgttggatagagaaatgctgaactcagacagaagttacatgctggactgcagcactgaaatattcttatggatggggatgacaacactggtttcagagaggaagtcatctgttgctgtcttggaagattatgtgcactcccaaggcaggtcattcaacgttcacacatttataatgacagaaggccatgaaactgttgactttaagctgcactttcaacactggtccaggaatgttgagctaaagttatatgaggctggccgagagaaagtggcagctattttcaagcatcagggctatgatgtcacagaaattcctgaggataaacctcagcagttcatcaattgtaatggcagtctgaaggtttggttggtggaccatggttgtacaaaccttcttagtactgaggaccaggaaaaattgtacactggagactgttatatcatacggtatagctattttgaaaatggaaaaaattaccatctgttctttgcatggtctggtaagaatagtgtaaaggatgatagaatggcggcaacatcgttaatgtctagcatggttgattcagtcaaagggcatccagttgtggcacaagtttttgagggcggagaaccagaattatttctctcggtgttcaagtcactaatcatattcaaggggggcaggagtgctgcatataagagttctgttctacagaaaagtccgagaaatggatgtcatgagagtgaaggagtcgccctattccgtgttcaagggcttaaacattattgtgtgcaggccattcaagttgatctggttgcaagttcacttaattcctcgcactgttatattttgcaagacaacggtttgttccttacttggttaggaggcctgtcttcaccaagcgatcataatatacttgacatgatcatgagcaagttccaatggaacagtccttgctagtcagagaaggctctgaaccagatcacttctggaaagctttgggaggacgatcggagtactcgaaagaaaagcgtgtgaaaggttggcctgcagatccacatctgtatgcttgtagatttgaacaaggtttactcaaggtcaaggaggtattcagcttctgtaaggatgacctggcaactgaagagacgttgattctggactgcaatgaagaaatctacgtctgggttggcctacactcagatattacatccaaggagcaagctctcaatgttggcaagatgttccttaaggatgctgttcacggtggaaggtcaatggaaacgacagtgtatgctgtcacagaaggggacgagcctggatttttcaccagcttcttcgactgggacaattcgaagcaatcatatatggttggcaactcatttgagaggaagctcgccgtcctgaaaggggtctccccaaaactagagacaccggacagaagcctgcgcaggccgtctaggaggcccggggtatcgtcggagccgaccacgccggagcaccagcaaccgaccgcgagaagggccttcggctccacgtctgccgggcggtttgccagggagcgctctccggctgttgcaccgccaacgttgtcgccatctcccaaaagccgctcgtcgtcgtcgacgcccaccacggtggcacgacggctctttcctgcctcggtgcacgcatcggaggctgtgcacgtggtctccacggcgacagctcgacgacggtgagaggagaggtggctgtgtatgcatgcgtaatcgtgcacgattgaaatcatgtagagttgtactagacgatggatttatatgtccggcctacgtacgtgtctgtatacagaatttacctctcaaactgtcaaaccccgaaagtttcttgttttggagaacttgggagtgtgaatagtcgctactcgctactaataaatacgactgtcgttcaaaaacaaaagagtaaa

SEQ ID NO: 58989 - DNA, 3110 bp, Zea Mays
aaagttgcacgctgcagacttgaatgcaaagcaagggcgactgatgtgagctcgttcggtggtgccgtggtggagcccccgttctgtctcgctgttgcctttctcctccctcttcctctgcgcactgcagcagctgcagcgcagtgaagtgttgtgttgctcgaccacgagcataccagctgcttgctcacctttccctttctcgggtagttcgccatttttttaaaataatcagcagtaagcaagagctcggcgagctgagccgagcagcactgcggcaaagaactcccacttccattgcctgcttgcttctgctctgctgcacctgcgaccgttccagcggccgccgccggcccggccgacttggcggcgactggcgaccatgaagggcgtcgacgatgggttcctcggcgctggcgacaagccagggctggatatttggtgcatctttgggagcagtgtggtcccagttgcaaaatctcagcacggaaagttctacaccggcagcacctacatcatactaaacacaactcagctgaaatccggggttcgcagacacgatgtgcattactgggttggggaggaggctaaagagattgtttcatggcctcggacaaggctgttgagttggacgcagcactgggctccagcacggtccagtacagggaaacacagggtgaagaatctgacaagttcttgtcatacttcaaaccgtgtgtcatcccaatacaaggccgcttcttttcacacctgaaaggatctggtgatagatccagcgcgaccacgatgtttaggtgccaaggagagcacgttgctcgtgtcacacaagttccgttttcacggtcctctctggatcacaaatcggtttttatagtggacacgccgtcaaagcttttccttttcagtggctgtaattctcgtatgcaaacaagggctaaagcgttggatgttgttaagcatctgaaggagaatcgacacttgggaagatgtgagatcgcgacaatagaggatggaaagcttgttggtgattctgatgctggagagttctggaacttgtttggaggctatgcgcctattcctcgtgatctacctgacgcaatcaaggaagagccactaactgcaccatctaagaaacttttttggatcaataagaaaaaccttgttccactcgaggcacacccgttggatagagaaatgctgaactcagacagaagttacatgctggactgcagcactgaaatattcttatggatggggatgacaacactggtttcagagaggaagtcatctgttgctgtcttggaagattatgtgcactcccaaggcaggtcattcaacgttcacacatttataatgacagaaggccatgaaactgttgactttaagctgcactttcaacactggtccaggaatgttgagctaaagttatatgaggctggccgagagaaagtggcagctattttcaagcatcagggctatgatgtcacagaaattcctgaggataaacctcagcagttcatcaattgtaatggcagtctgaaggtttggttggtggaccatggttgtacaaaccttcttagtactgaggaccaggaaaaattgtacactggagactgttatatcatacggtatagctattttgaaaatggaaaaaattaccatctgttctttgcatggtctggtaagaatagtgtaaaggatgatagaatggcggcaacatcgttaatgtctagcatggttgattcagtcaaagggcatccagttgtggcacaagtttttgagggcggagaaccagaattatttctctcggtgttcaagtcactaatcatattcaaggggggcaggagtgctgcatataagagttctgttctacagaaaagtccgagaaatggatgtcatgagagtgaaggagtcgccctattccgtgttcaagggcttaaacattattgtgtgcaggccattcaagttgatctggttgcaagttcacttaattcctcgcactgttatattttgcaagacaacggtttgttccttacttggttaggaggcctgtcttcaccaagcgatcataatatacttgacatgatcatgagcaagttgtgtccaatggaacagtccttgctagtcagagaaggctctgaaccagatcacttctggaaagctttgggaggacgatcggagtactcgaaagaaaagcgtgtgaaaggttggcctgcagatccacatctgtatgcttgtagatttgaacaaggtttactcaaggtcaaggaggtattcagcttctgtaaggatgacctggcaactgaagagacgttgattctggactgcaatgaagaaatctacgtctgggttggcctacactcagatattacatccaaggagcaagctctcaatgttggcaagatgttccttaaggatgctgttcacggtggaaggtcaatggaaacgacagtgtatgctgtcacagaaggggacgagcctggatttttcaccagcttcttcgactgggacaattcgaagcaatcatatatggttggcaactcatttgagaggaagctcgccgtcctgaaaggggtctccccaaaactagagacaccggacagaagcctgcgcaggccgtctaggaggcccggggtatcgtcggagccgaccacgccggagcaccagcaaccgaccgcgagaagggccttcggctccacgtctgccgggcggtttgccagggagcgctctccggctgttgcaccgccaacgttgtcgccatctcccaaaagccgctcgtcgtcgtcgacgcccaccacggtggcacgacggctctttcctgcctcggtgcacgcatcggaggctgtgcacgtggtctccacggcgacagctcgacgacggtgagaggagaggtggctgtgtatgcatgcgtaatcgtgcacgattgaaatcatgtagagttgtactagacgatggatttatatgtccggcctacgtacgtgtctgtatacagaatttacctctcaaactgtcaaaccccgaaagtttcttgttttggagaacttgggagtgtgaatagtcgctactcgctactaataaatacgactgtcgttcaaaaacaaaagagtaaa

SEQ ID NO: 58990 - DNA, 3139 bp, Zea Mays
aaagttgcacgctgcagacttgaatgcaaagcaagggcgactgatgtgagctcgttcggtggtgccgtggtggagcccccgttctgtctcgctgttgcctttctcctccctcttcctctgcgcactgcagcagctgcagcgcagtgaagtgttgtgttgctcgaccacgagcataccagctgcttgctcacctttccctttctcgggtagttcgccatttttttaaaataatcagcagtaagcaagagctcggcgagctgagccgagcagcactgcggcaaagaactcccacttccattgcctgcttgcttctgctctgctgcacctgcgaccgttccagcggccgccgccggcccggccgacttggcggcgactggcgaccatgaagggcgtcgacgatgggttcctcggcgctggcgacaagccagggctggatatttggtgcatctttgggagcagtgtggtcccagttgcaaaatctcagcacggaaagttctacaccggcagcacctacatcatactaaacacaactcagctgaaatccggggttcgcagacacgatgtgcattactgggttggggaggaggctaaagagattgtttcatggcctcggacaaggctgttgagttggacgcagcactgggctccagcacggtccagtacagggaaacacagggtgaagaatctgacaagttcttgtcatacttcaaaccgtgtgtcatcccaatacaaggccgcttcttttcacacctgaaaggatctggtgatagatccagcgcgaccacgatgtttaggtgccaaggagagcacgttgctcgtgtcacacaagttccgttttcacggtcctctctggatcacaaatcggtttttatagtggacacgccgtcaaagcttttccttttcagtggctgtaattctcgtatgcaaacaagggctaaagcgttggatgttgttaagcatctgaaggagaatcgacacttgggaagatgtgagatcgcgacaatagaggatggaaagcttgttggtgattctgatgctggagagttctggaacttgtttggaggctatgcgcctattcctcgtgatctacctgacgcaatcaaggaagagccactaactgcaccatctaagaaacttttttggatcaataagaaaaaccttgttccactcgaggcacacccgttggatagagaaatgctgaactcagacagaagttacatgctggactgcagcactgaaatattcttatggatggggatgacaacactggtttcagagaggaagtcatctgttgctgtcttggaagattatgtgcactcccaaggcaggtcattcaacgttcacacatttataatgacagaaggccatgaaactgttgactttaagctgcactttcaacactggtccaggaatgttgagctaaagttatatgaggctggccgagagaaagtggcagctattttcaagcatcagggctatgatgtcacagaaattcctgaggataaacctcagcagttcatcaattgtaatggcagtctgaaggtttggttggtggaccatggttgtacaaaccttcttagtactgaggaccaggaaaaattgtacactggagactgttatatcatacggatgatagaatggcggcaacatcgttaatgtctagcatggttgattcagtcaaagggcatccagttgtggcacaagtttttgagggcggagaaccagaattatttctctcggtgttcaagtcactaatcatattcaaggggggcaggagtgctgcatataagagttctgttctacagaaaagtccgagaaatggatgtcatgagagtgaaggagtcgccctattccgtgttcaagggcttaaacattattgtgtgcaggccattcaagttgatctggttgcaagttcacttaattcctcgcactgttatattttgcaagacaacggtttgttccttacttggttaggaggcctgtcttcaccaagcgatcataatatacttgacatgatcatgagcaagttgtgtccaatggaacagtccttgctagtcagagaaggctctgaaccagatcacttctggaaagctttgggaggacgatcggagtactcgaaagaaaagcgtgtgaaaggttggcctgcagatccacatctgtatgcttgtagatttgaacaaggtttactcaaggtgagtgctaccttactccttccaatgaccagctaactagtaggttgcaggatctgaagaaaaatgccacataaaccctgtctggttcatatatttaaggtcaaggaggtattcagcttctgtaaggatgacctggcaactgaagagacgttgattctggactgcaatgaagaaatctacgtctgggttggcctacactcagatattacatccaaggagcaagctctcaatgttggcaagatgttccttaaggatgctgttcacggtggaaggtcaatggaaacgacagtgtatgctgtcacagaaggggacgagcctggatttttcaccagcttcttcgactgggacaattcgaagcaatcatatatggttggcaactcatttgagaggaagctcgccgtcctgaaaggggtctccccaaaactagagacaccggacagaagcctgcgcaggccgtctaggaggcccggggtatcgtcggagccgaccacgccggagcaccagcaaccgaccgcgagaagggccttcggctccacgtctgccgggcggtttgccagggagcgctctccggctgttgcaccgccaacgttgtcgccatctcccaaaagccgctcgtcgtcgtcgacgcccaccacggtggcacgacggctctttcctgcctcggtgcacgcatcggaggctgtgcacgtggtctccacggcgacagctcgacgacggtgagaggagaggtggctgtgtatgcatgcgtaatcgtgcacgattgaaatcatgtagagttgtactagacgatggatttatatgtccggcctacgtacgtgtctgtatacagaatttacctctcaaactgtcaaaccccgaaagtttcttgttttggagaacttgggagtgtgaatagtcgctactcgctactaataaatacgactgtcgttcaaaaacaaaagagtaaa

SEQ ID NO: 58991 - DNA, 877 bp, Zea Mays
attttagaagatgaaatggtcctgaggcgaaggcattattcacgtggacccggagtccaacctgcagaaaatccacaagcgaaattggctgccagctttaattctgtgtctggaacttcgtttccttcctaaacagaaagaggcgtaaagaaaacgaaagcaaatttcgcaggtggaaagaagaggaagcgaacgagaggcaacggtggccggtcgcgggacgggtggggccacgcctggcctgacgcgggaagccggccggaaccatccaactccgccgcgtcgtcgtcgccttcgtctcgcgtgctcaccaagagaacaaaacgcgagcagccaagaattcaacgtccacgatccctacccgtggcgttggtcgtgaattggcgccgtctccccctgccagccggattccctgctttgttctcaggacttcagctcttcatgggacatccgtgcaaccccgacattcttcttcctcaagaacgggcagcagatcgacaagctcgtgggcgcgaacaaacctgagctcgagaagaaagtgctagcagccgctgatgccagtacgtcctagtgacacaagtggaagtgggcaaacgatctgtgatggcttcccggtgtatagtttccatggttcatttgtgtgcttgtcccatgtttgcctggggacgatgacgttttacaattttggcccccatcgcgcgcactcgtctgtttctctcatggaagccgtgtgaacctgtgcgtgtgtgtgacgaatgaacggaactttatatggaccagtgcttaagagtcttcgcaacataattatgaaggtttgtttgcatgttcttggttgtaacctctttagttgtgcgtggtctttctctttcagcctttt

SEQ ID NO: 58992 - DNA, 1027 bp, Zea Mays
cgatatcgtttcttacactgttccaatgtaattatccctcacacacgagctgacttcctggccccacatccatactcagcacttacatcggaccacttaggccttggtcggttattactatcacatgtgtattagatgtgattggaaaaaaatatgaaagattttgacttgtttgatatttaaacccacacaatctcactcaatccatatggattgagagcaaaacgaacaagccctacagacatagactttcacgcgtccaagtctattgcctatacccgttgagcatcatttgccgacggttctagaatcggcttgtccccaagccggagcgtccggaaaacaagccttcacagcacagtcctcccatgtcgccgcattagtgggcagtgaacaccacttgataagcacctgaggaacgacaacattgcctttcttgatcagacaacgttgaaggatagactctggaatcacctgttgtttgtccaagtcaggtctagaacctgaggaagatcagtgtttacagctgtataatcaggagtaaatggtttcagttcggagacgtggaacaccgaatgtatgagggacgatggtggcaattccaggcgatatgttgcaacaccgatacgggccaacactttatatggcccacagaacttgattgagatcttggaacaagggtagcagccctaggcgcttgagagtcattgcaagagagagagagattggtttgataatatattccttgtttctttgtctcctgcgtacaggcctatatataggccaccggttgaccaactaggcaaccactaattaggcaagtgactaattgaaattatctcccctacaatttaggtctatcaatttagccaccaaatcagtcactttcctttgccatgcctttcttgcgcgcgctttcctttgccatgccttccttacgcgcgctgctgccagcgctcgtgccttccttgcgcgcgctgctgccagcgccccctgcggcctctcgcttttggcgcgcataggtgcg

SEQ ID NO: 58993 - DNA, 677 bp, Zea Mays
atccattttacctaggctgttggagttgctcttatgcattacatggtgtttaattctatcattatgcattgtgtgtgctatgctatggagctaaaaagttcaaggttgttgcaaatttcagcgcttcctggtgtgggccatgccgtgtcattgctcctgtctatgctgaaatgtcaaagacttatcctcaactcatgttcttgacaatagacgttgatgacctgatggacttcagctcttcatgggacatccgtgcaaccccgacattcttcttcctcaagaacgggcagcagatcgacaagctcgtgggcgcgaacaaacctgagctcgagaagaaagtgctagcagccgctgatgccagtacgtcctagtgacacaagtggaagtgggcaaacgatctgtgatggcttcccggtgtatagtttccatggttcatttgtgtgcttgtcccatgtttgcctggggacgatgacgttttacaattttggcccccatcgcgcgcactcgtctgtttctctcatggaagccgtgtgaacctgtgcgtgtgtgtgacgaatgaacggaactttatatggaccagtgcttaagagtcttcgcaacataattatgaaggtttgtttgcatgttcttggttgtaacctctttagttgtgcgtggtctttctctttcagcctttt

SEQ ID NO: 58994 - DNA, 474 bp, Zea Mays
atgacactttactcaaatcaaatggacttcagctcttcatgggacatccgtgcaaccccgacattcttcttcctcaagaacgggcagcagatcgacaagctcgtgggcgcgaacaaacctgagctcgagaagaaagtgctagcagccgctgatgccagtacgtcctagtgacacaagtggaagtgggcaaacgatctgtgatggcttcccggtgtatagtttccatggttcatttgtgtgcttgtcccatgtttgcctggggacgatgacgttttacaattttggcccccatcgcgcgcactcgtctgtttctctcatggaagccgtgtgaacctgtgcgtgtgtgtgacgaatgaacggaactttatatggaccagtgcttaagagtcttcgcaacataattatgaaggtttgtttgcatgttcttggttgtaacctctttagttgtgcgtggtctttctctttcagcctttt

SEQ ID NO: 58995 - DNA, 2669 bp, Zea Mays
ccggctctcatatggcggagccggagcaccctcccctctcccgctcaaaattagcgccaagcggccaagccatttgcttcccgctgggtattatagctaactgaaaataaaataaaatgccttcagctcgtgagacgccaggggcattacggtaactgcgcactaacgctcacccgcgcctccgggttctgggctttagcgctcgctcgccggtcggccccaccattccgcgcagttccgcgtgcgaggaacaggaaccgctgctgctctctgcctccgctccgatcctgcttgcgctcgagaaccgcgacgccgacgcccttccttgacgcgttgttgatctgcgagctcaggcaagagtgcaagaccaactctgttggctagagtattgcatttatacagatctgcatattagagaagatttttcgtatattttggtgaacatgaagagaaaggcgcagtcaggaaaatctcgctcatggtggtgggacaatcatattagtccacaaaattctaagtggctctctaaaaatctagaagaaatggagaagcaggtgaaacaaatgttggggctcattggcgaaggagagttttctgcagaaaaagcggaggtgttctatgagaagcggcctttacttattactcatgtggagaacttctattgcatgtatcgtgctcttgctgcccgatatgacgatgtaactggacaactacgcaaaaacattccatcatctcttcaatcatatggctcggttggtgtctctgaatcagattctgagacacaatgtttcacatctccagagtttgatatgccacagcaaaagcaaaagcctggaccagatttccttgatttttccattggctctggtgttagctctgatgtatcaaagaagggtagtgaaaggtcttcatcatcttcagattctgattcagagcttgatgaggccaaagaggaaaatggcagtatgttttatgccttgagccaaaaaaatattgagctagaagatgagcttcaagaagtaaggggaaaacttgatgctttagaggaaaaacatgctcattgccaaagagatttgagtaccaactcaaaagatactgaacatgaagaaaacctgcacacttcagatgtggaatccaacacccttcagaaggatgcagaagaaacagattttgctttagagagctcaacagaagtcaacagcgaaaaggaagcattggaagctgtgctgtttgagcggaaaaatgagattgaaatgctgaaaggtgcaatggcctcagctgctaagcagtttgaagttgaattggcacatcgtgatcttgaaattggtaagtgcaagcatgaacttggagtactctcggagaagtatttgcatgataagtctactctcgaggatgagcttagaaggctccatggaataatcaagaatatggaaggtgacttagaaaaaatttcacaggagagattgcagctcaggtctcggattaaagagctcgagcaggcagctcacagcttagactattcagcttccgagatagttgagctacaagaagtaataaggaatacacaagcagaattagaaaaggtcacaaaggagaaagaagtgctcaaagaacacgctaacgaatttgagcaacttttaaagggccttgaggtctcaggtacagaggttgcaaagctaccagaaactatcaagaacctggaagcccagctagaaagatccttcgaagagaaatcagtactccaagaccagatcaagcagctggagcaggttatgtctgaatcttcggagaaacattcacatgagcagttctctcttactgcggatcttttgaagttatctgaagtgaacgcttctcttgaagacaaattgtccgatgtggcggcagagcttatccaagtttatgctgacaaggaagaagaatctctcgataatgagaagcaaatttctgtcctcagtaaagatattgctgatctcaggagaaagcttgaattgttgtcatctgagaaaaccacagttgatgatgagttggccaaactgctagctgatattatgattcgtgacgaaaagatgaagcaaatggatgaccacctaaatcagcttcagttagagcatgccaagctgatggcagaatttgacagtgcacacaggtccttgtcagagctgcatgcgcaggtttctgagctggaagacgaggtagagaagcagaagcttgtgatatccgagagtgcagagggaaagcgggaggccatcaggcagctgtgcttctccattgaacactaccgcagcgggtatcagcagctgaggcagctgctgcaaggccacaggaggccgttggtgatggcaacctgataaatgaacaaagtccgtttgccaacaaattgcgcagttgcttgtctctgggcgtgttctatttgtagctctgttctttcacaacttgtgccgtgtagtttatgttataaagaattctgtgtggtatgtgtgtagaatgtaatgggatgggatatttatgttgttccttcatactcctgtggctgttttctttttccttgctgtccgctgatgaatgttatgatatgcttgaaccttcgtcttttcagtcacgactttatgtggtcaataactgaactgcacaatggaactcccttttcaatctaagacgtgtttggc

SEQ ID NO: 58996 - DNA, 2673 bp, Zea Mays
cggctctcatatggcggagccggagcaccctcccctctcccgctcaaaattagcgccaagcggccaagccatttgcttcccgctgggtattatagctaactgaaaataaaataaaatgccttcagctcgtgagacgccaggggcattacggtaactgcgcactaacgctcacccgcgcctccgggttctgggctttagcgctcgctcgccggtcggccccaccattccgcgcagttccgcgtgcgaggaacaggaaccgctgctgctctctgcctccgctccgatcctgcttgcgctcgagaaccgcgacgccgacgcccttccttgacgcgttgttgatctgcgagctcagtgcaggcaagagtgcaagaccaactctgttggctagagtattgcatttatacagatctgcatattagagaagatttttcgtatattttggtgaacatgaagagaaaggcgcagtcaggaaaatctcgctcatggtggtgggacaatcatattagtccacaaaattctaagtggctctctaaaaatctagaagaaatggagaagcaggtgaaacaaatgttggggctcattggcgaaggagagttttctgcagaaaaagcggaggtgttctatgagaagcggcctttacttattactcatgtggagaacttctattgcatgtatcgtgctcttgctgcccgatatgacgatgtaactggacaactacgcaaaaacattccatcatctcttcaatcatatggctcggttggtgtctctgaatcagattctgagacacaatgtttcacatctccagagtttgatatgccacagcaaaagcaaaagcctggaccagatttccttgatttttccattggctctggtgttagctctgatgtatcaaagaagggtagtgaaaggtcttcatcatcttcagattctgattcagagcttgatgaggccaaagaggaaaatggcagtatgttttatgccttgagccaaaaaaatattgagctagaagatgagcttcaagaagtaaggggaaaacttgatgctttagaggaaaaacatgctcattgccaaagagatttgagtaccaactcaaaagatactgaacatgaagaaaacctgcacacttcagatgtggaatccaacacccttcagaaggatgcagaagaaacagattttgctttagagagctcaacagaagtcaacagcgaaaaggaagcattggaagctgtgctgtttgagcggaaaaatgagattgaaatgctgaaaggtgcaatggcctcagctgctaagcagtttgaagttgaattggcacatcgtgatcttgaaattggtaagtgcaagcatgaacttggagtactctcggagaagtatttgcatgataagtctactctcgaggatgagcttagaaggctccatggaataatcaagaatatggaaggtgacttagaaaaaatttcacaggagagattgcagctcaggtctcggattaaagagctcgagcaggcagctcacagcttagactattcagcttccgagatagttgagctacaagaagtaataaggaatacacaagcagaattagaaaaggtcacaaaggagaaagaagtgctcaaagaacacgctaacgaatttgagcaacttttaaagggccttgaggtctcaggtacagaggttgcaaagctaccagaaactatcaagaacctggaagcccagctagaaagatccttcgaagagaaatcagtactccaagaccagatcaagcagctggagcaggttatgtctgaatcttcggagaaacattcacatgagcagttctctcttactgcggatcttttgaagttatctgaagtgaacgcttctcttgaagacaaattgtccgatgtggcggcagagcttatccaagtttatgctgacaaggaagaagaatctctcgataatgagaagcaaatttctgtcctcagtaaagatattgctgatctcaggagaaagcttgaattgttgtcatctgagaaaaccacagttgatgatgagttggccaaactgctagctgatattatgattcgtgacgaaaagatgaagcaaatggatgaccacctaaatcagcttcagttagagcatgccaagctgatggcagaatttgacagtgcacacaggtccttgtcagagctgcatgcgcaggtttctgagctggaagacgaggtagagaagcagaagcttgtgatatccgagagtgcagagggaaagcgggaggccatcaggcagctgtgcttctccattgaacactaccgcagcgggtatcagcagctgaggcagctgctgcaaggccacaggaggccgttggtgatggcaacctgataaatgaacaaagtccgtttgccaacaaattgcgcagttgcttgtctctgggcgtgttctatttgtagctctgttctttcacaacttgtgccgtgtagtttatgttataaagaattctgtgtggtatgtgtgtagaatgtaatgggatgggatatttatgttgttccttcatactcctgtggctgttttctttttccttgctgtccgctgatgaatgttatgatatgcttgaaccttcgtcttttcagtcacgactttatgtggtcaataactgaactgcacaatggaactcccttttcaatctaagacgtgtttggc

SEQ ID NO: 58997 - DNA, 2553 bp, Zea Mays
cactaacgctcacccgcgcctccgggttctgggctttagcgctcgctcgccggtcggccccaccattccgcgcagttccgcgtgcgaggaacaggaaccgctgctgctctctgcctccgctccgatcctgcttgcgctcgagaaccgcgacgccgacgcccttccttgacgcgttgttgatctgcgagctcaggtcccaaccctttcactaatgtaaagaattgatcatcatacaaggcaagagtgcaagaccaactctgttggctagagtattgcatttatacagatctgcatattagagaagatttttcgtatattttggtgaacatgaagagaaaggcgcagtcaggaaaatctcgctcatggtggtgggacaatcatattagtccacaaaattctaagtggctctctaaaaatctagaagaaatggagaagcaggtgaaacaaatgttggggctcattggcgaaggagagttttctgcagaaaaagcggaggtgttctatgagaagcggcctttacttattactcatgtggagaacttctattgcatgtatcgtgctcttgctgcccgatatgacgatgtaactggacaactacgcaaaaacattccatcatctcttcaatcatatggctcggttggtgtctctgaatcagattctgagacacaatgtttcacatctccagagtttgatatgccacagcaaaagcaaaagcctggaccagatttccttgatttttccattggctctggtgttagctctgatgtatcaaagaagggtagtgaaaggtcttcatcatcttcagattctgattcagagcttgatgaggccaaagaggaaaatggcagtatgttttatgccttgagccaaaaaaatattgagctagaagatgagcttcaagaagtaaggggaaaacttgatgctttagaggaaaaacatgctcattgccaaagagatttgagtaccaactcaaaagatactgaacatgaagaaaacctgcacacttcagatgtggaatccaacacccttcagaaggatgcagaagaaacagattttgctttagagagctcaacagaagtcaacagcgaaaaggaagcattggaagctgtgctgtttgagcggaaaaatgagattgaaatgctgaaaggtgcaatggcctcagctgctaagcagtttgaagttgaattggcacatcgtgatcttgaaattggtaagtgcaagcatgaacttggagtactctcggagaagtatttgcatgataagtctactctcgaggatgagcttagaaggctccatggaataatcaagaatatggaaggtgacttagaaaaaatttcacaggagagattgcagctcaggtctcggattaaagagctcgagcaggcagctcacagcttagactattcagcttccgagatagttgagctacaagaagtaataaggaatacacaagcagaattagaaaaggtcacaaaggagaaagaagtgctcaaagaacacgctaacgaatttgagcaacttttaaagggccttgaggtctcaggtacagaggttgcaaagctaccagaaactatcaagaacctggaagcccagctagaaagatccttcgaagagaaatcagtactccaagaccagatcaagcagctggagcaggttatgtctgaatcttcggagaaacattcacatgagcagttctctcttactgcggatcttttgaagttatctgaagtgaacgcttctcttgaagacaaattgtccgatgtggcggcagagcttatccaagtttatgctgacaaggaagaagaatctctcgataatgagaagcaaatttctgtcctcagtaaagatattgctgatctcaggagaaagcttgaattgttgtcatctgagaaaaccacagttgatgatgagttggccaaactgctagctgatattatgattcgtgacgaaaagatgaagcaaatggatgaccacctaaatcagcttcagttagagcatgccaagctgatggcagaatttgacagtgcacacaggtccttgtcagagctgcatgcgcaggtttctgagctggaagacgaggtagagaagcagaagcttgtgatatccgagagtgcagagggaaagcgggaggccatcaggcagctgtgcttctccattgaacactaccgcagcgggtatcagcagctgaggcagctgctgcaaggccacaggaggccgttggtgatggcaacctgataaatgaacaaagtccgtttgccaacaaattgcgcagttgcttgtctctgggcgtgttctatttgtagctctgttctttcacaacttgtgccgtgtagtttatgttataaagaattctgtgtggtatgtgtgtagaatgtaatgggatgggatatttatgttgttccttcatactcctgtggctgttttctttttccttgctgtccgctgatgaatgttatgatatgcttgaaccttcgtcttttcagtcacgactttatgtggtcaataactgaactgcacaatggaactcccttttcaatctaagacgtgtttggc

SEQ ID NO: 58998 - DNA, 2492 bp, Zea Mays
gggttctgggctttagcgctcgctcgccggtcggccccaccattccgcgcagttccgcgtgcgaggaacaggaaccgctgctgctctctgcctccgctccgatcctgcttgcgctcgagaaccgcgacgccgacgcccttccttgacgcgttgttgatctgcgagctcaggtgcaggcaagagtgcaagaccaactctgttggctagagtattgcatttatacagatctgcatattagagaagatttttcgtatattttggtgaacatgaagagaaaggcgcagtcaggaaaatctcgctcatggtggtgggacaatcatattagtccacaaaattctaagtggctctctaaaaatctagaagaaatggagaagcaggtgaaacaaatgttggggctcattggcgaaggagagttttctgcagaaaaagcggaggtgttctatgagaagcggcctttacttattactcatgtggagaacttctattgcatgtatcgtgctcttgctgcccgatatgacgatgtaactggacaactacgcaaaaacattccatcatctcttcaatcatatggctcggttggtgtctctgaatcagattctgagacacaatgtttcacatctccagagtttgatatgccacagcaaaagcaaaagcctggaccagatttccttgatttttccattggctctggtgttagctctgatgtatcaaagaagggtagtgaaaggtcttcatcatcttcagattctgattcagagcttgatgaggccaaagaggaaaatggcagtatgttttatgccttgagccaaaaaaatattgagctagaagatgagcttcaagaagtaaggggaaaacttgatgctttagaggaaaaacatgctcattgccaaagagatttgagtaccaactcaaaagatactgaacatgaagaaaacctgcacacttcagatgtggaatccaacacccttcagaaggatgcagaagaaacagattttgctttagagagctcaacagaagtcaacagcgaaaaggaagcattggaagctgtgctgtttgagcggaaaaatgagattgaaatgctgaaaggtgcaatggcctcagctgctaagcagtttgaagttgaattggcacatcgtgatcttgaaattggtaagtgcaagcatgaacttggagtactctcggagaagtatttgcatgataagtctactctcgaggatgagcttagaaggctccatggaataatcaagaatatggaaggtgacttagaaaaaatttcacaggagagattgcagctcaggtctcggattaaagagctcgagcaggcagctcacagcttagactattcagcttccgagatagttgagctacaagaagtaataaggaatacacaagcagaattagaaaaggtcacaaaggagaaagaagtgctcaaagaacacgctaacgaatttgagcaacttttaaagggccttgaggtctcaggtacagaggttgcaaagctaccagaaactatcaagaacctggaagcccagctagaaagatccttcgaagagaaatcagtactccaagaccagatcaagcagctggagcaggttatgtctgaatcttcggagaaacattcacatgagcagttctctcttactgcggatcttttgaagttatctgaagtgaacgcttctcttgaagacaaattgtccgatgtggcggcagagcttatccaagtttatgctgacaaggaagaagaatctctcgataatgagaagcaaatttctgtcctcagtaaagatattgctgatctcaggagaaagcttgaattgttgtcatctgagaaaaccacagttgatgatgagttggccaaactgctagctgatattatgattcgtgacgaaaagatgaagcaaatggatgaccacctaaatcagcttcagttagagcatgccaagctgatggcagaatttgacagtgcacacaggtccttgtcagagctgcatgcgcaggtttctgagctggaagacgaggtagagaagcagaagcttgtgatatccgagagtgcagagggaaagcgggaggccatcaggcagctgtgcttctccattgaacactaccgcagcgggtatcagcagctgaggcagctgctgcaaggccacaggaggccgttggtgatggcaacctgataaatgaacaaagtccgtttgccaacaaattgcgcagttgcttgtctctgggcgtgttctatttgtagctctgttctttcacaacttgtgccgtgtagtttatgttataaagaattctgtgtggtatgtgtgtagaatgtaatgggatgggatatttatgttgttccttcatactcctgtggctgttttctttttccttgctgtccgctgatgaatgttatgatatgcttgaaccttcgtcttttcagtcacgactttatgtggtcaataactgaactgcacaatggaactcccttttcaatctaagacgtgtttggc

SEQ ID NO: 58999 - DNA, 2312 bp, Zea Mays
tagtgcaagaccaactctgttggctagagtattgcatttatacagatctgcatattagagaagatttttcgtatattttggtgaacatgaagagaaaggcgcagtcaggaaaatctcgctcatggtggtgggacaatcatattagtccacaaaattctaagtggctctctaaaaatctagaagaaatggagaagcaggtgaaacaaatgttggggctcattggcgaaggagagttttctgcagaaaaagcggaggtgttctatgagaagcggcctttacttattactcatgtggagaacttctattgcatgtatcgtgctcttgctgcccgatatgacgatgtaactggacaactacgcaaaaacattccatcatctcttcaatcatatggctcggttggtgtctctgaatcagattctgagacacaatgtttcacatctccagagtttgatatgccacagcaaaagcaaaagcctggaccagatttccttgatttttccattggctctggtgttagctctgatgtatcaaagaagggtagtgaaaggtcttcatcatcttcagattctgattcagagcttgatgaggccaaagaggaaaatggcagtatgttttatgccttgagccaaaaaaatattgagctagaagatgagcttcaagaagtaaggggaaaacttgatgctttagaggaaaaacatgctcattgccaaagagatttgagtaccaactcaaaagatactgaacatgaagaaaacctgcacacttcagatgtggaatccaacacccttcagaaggatgcagaagaaacagattttgctttagagagctcaacagaagtcaacagcgaaaaggaagcattggaagctgtgctgtttgagcggaaaaatgagattgaaatgctgaaaggtgcaatggcctcagctgctaagcagtttgaagttgaattggcacatcgtgatcttgaaattggtaagtgcaagcatgaacttggagtactctcggagaagtatttgcatgataagtctactctcgaggatgagcttagaaggctccatggaataatcaagaatatggaaggtgacttagaaaaaatttcacaggagagattgcagctcaggtctcggattaaagagctcgagcaggcagctcacagcttagactattcagcttccgagatagttgagctacaagaagtaataaggaatacacaagcagaattagaaaaggtcacaaaggagaaagaagtgctcaaagaacacgctaacgaatttgagcaacttttaaagggccttgaggtctcaggtacagaggttgcaaagctaccagaaactatcaagaacctggaagcccagctagaaagatccttcgaagagaaatcagtactccaagaccagatcaagcagctggagcaggttatgtctgaatcttcggagaaacattcacatgagcagttctctcttactgcggatcttttgaagttatctgaagtgaacgcttctcttgaagacaaattgtccgatgtggcggcagagcttatccaagtttatgctgacaaggaagaagaatctctcgataatgagaagcaaatttctgtcctcagtaaagatattgctgatctcaggagaaagcttgaattgttgtcatctgagaaaaccacagttgatgatgagttggccaaactgctagctgatattatgattcgtgacgaaaagatgaagcaaatggatgaccacctaaatcagcttcagttagagcatgccaagctgatggcagaatttgacagtgcacacaggtccttgtcagagctgcatgcgcaggtttctgagctggaagacgaggtagagaagcagaagcttgtgatatccgagagtgcagagggaaagcgggaggccatcaggcagctgtgcttctccattgaacactaccgcagcgggtatcagcagctgaggcagctgctgcaaggccacaggaggccgttggtgatggcaacctgataaatgaacaaagtccgtttgccaacaaattgcgcagttgcttgtctctgggcgtgttctatttgtagctctgttctttcacaacttgtgccgtgtagtttatgttataaagaattctgtgtggtatgtgtgtagaatgtaatgggatgggatatttatgttgttccttcatactcctgtggctgttttctttttccttgctgtccgctgatgaatgttatgatatgcttgaaccttcgtcttttcagtcacgactttatgtggtcaataactgaactgcacaatggaactcccttttcaatctaagacgtgtttggc

SEQ ID NO: 59000 - DNA, 2386 bp, Zea Mays
cttcgtgcttgtcgcggtgtctgggaatttctcttttgtggactgctgtcgatctctgcttatcgatttggcaagagtgcaagaccaactctgttggctagagtattgcatttatacagatctgcatattagagaagatttttcgtatattttggtgaacatgaagagaaaggcgcagtcaggaaaatctcgctcatggtggtgggacaatcatattagtccacaaaattctaagtggctctctaaaaatctagaagaaatggagaagcaggtgaaacaaatgttggggctcattggcgaaggagagttttctgcagaaaaagcggaggtgttctatgagaagcggcctttacttattactcatgtggagaacttctattgcatgtatcgtgctcttgctgcccgatatgacgatgtaactggacaactacgcaaaaacattccatcatctcttcaatcatatggctcggttggtgtctctgaatcagattctgagacacaatgtttcacatctccagagtttgatatgccacagcaaaagcaaaagcctggaccagatttccttgatttttccattggctctggtgttagctctgatgtatcaaagaagggtagtgaaaggtcttcatcatcttcagattctgattcagagcttgatgaggccaaagaggaaaatggcagtatgttttatgccttgagccaaaaaaatattgagctagaagatgagcttcaagaagtaaggggaaaacttgatgctttagaggaaaaacatgctcattgccaaagagatttgagtaccaactcaaaagatactgaacatgaagaaaacctgcacacttcagatgtggaatccaacacccttcagaaggatgcagaagaaacagattttgctttagagagctcaacagaagtcaacagcgaaaaggaagcattggaagctgtgctgtttgagcggaaaaatgagattgaaatgctgaaaggtgcaatggcctcagctgctaagcagtttgaagttgaattggcacatcgtgatcttgaaattggtaagtgcaagcatgaacttggagtactctcggagaagtatttgcatgataagtctactctcgaggatgagcttagaaggctccatggaataatcaagaatatggaaggtgacttagaaaaaatttcacaggagagattgcagctcaggtctcggattaaagagctcgagcaggcagctcacagcttagactattcagcttccgagatagttgagctacaagaagtaataaggaatacacaagcagaattagaaaaggtcacaaaggagaaagaagtgctcaaagaacacgctaacgaatttgagcaacttttaaagggccttgaggtctcaggtacagaggttgcaaagctaccagaaactatcaagaacctggaagcccagctagaaagatccttcgaagagaaatcagtactccaagaccagatcaagcagctggagcaggttatgtctgaatcttcggagaaacattcacatgagcagttctctcttactgcggatcttttgaagttatctgaagtgaacgcttctcttgaagacaaattgtccgatgtggcggcagagcttatccaagtttatgctgacaaggaagaagaatctctcgataatgagaagcaaatttctgtcctcagtaaagatattgctgatctcaggagaaagcttgaattgttgtcatctgagaaaaccacagttgatgatgagttggccaaactgctagctgatattatgattcgtgacgaaaagatgaagcaaatggatgaccacctaaatcagcttcagttagagcatgccaagctgatggcagaatttgacagtgcacacaggtccttgtcagagctgcatgcgcaggtttctgagctggaagacgaggtagagaagcagaagcttgtgatatccgagagtgcagagggaaagcgggaggccatcaggcagctgtgcttctccattgaacactaccgcagcgggtatcagcagctgaggcagctgctgcaaggccacaggaggccgttggtgatggcaacctgataaatgaacaaagtccgtttgccaacaaattgcgcagttgcttgtctctgggcgtgttctatttgtagctctgttctttcacaacttgtgccgtgtagtttatgttataaagaattctgtgtggtatgtgtgtagaatgtaatgggatgggatatttatgttgttccttcatactcctgtggctgttttctttttccttgctgtccgctgatgaatgttatgatatgcttgaaccttcgtcttttcagtcacgactttatgtggtcaataactgaactgcacaatggaactcccttttcaatctaagacgtgtttggc

SEQ ID NO: 59001 - DNA, 2538 bp, Zea Mays
aatgatgccctctctctaatcagctttctcaccgacggcgaccgaccgaccagccatataataaagaagcgaagctaagcgagaccggaggggcacgagcgccaccgccttgatcccgcccgctcctccccagatctcctcgccattgccgccgccctgccaggattcgcgccctactcgcccagatccgaccgcggctctgattttccaactgacgcaggagcggtgggtctgaccgggcgcgacccgtcttctcatgggcgagacagcgtgatccctgcggctcgattgtaaattcgtgatctttcggggcattccttggtttgtctgtcggtgctggtggtgctgcgtttggagggccgcggagatgggcgtcggcggggagaagttccagctggggacggtgggggcgctgagcctctccgtggtgtcctctgtctccattgtcatctgcaacaaggcgctcatgagctccctcggctttaacttcgccactaccttgacgagctggcatctgctggttacattctgctcccttcatgtagcattatggatgaagttctttgagcataagccttttgattcaagaactgtcatgggatttggagtacttaacggaatctccattgggctcctcaacttgagtcttggcttcaactctgttgggttttaccagatgactaagctggcaatcatcccgtgcactgtcattttagagacacttttcttcaggaagaagttcagtcggagtatccagatgtccctttctgtgcttcttcttggtgttggtgttgcaactgtcactgatctgcaactcaatgctgtgggatccatactgtccttgctggcaattatcacgacttgcattgctcaaattatgacaaacactatccagaagaagttcaaggtctcatcaacccaactgctttaccagtcttgcccttaccaatcactgaccctgtttctcattggccccttccttgatggctttttgactaaccaaaatgtctttgcttttaattatacatctcaagttgtgtttttcatcgtcctgtcatgcttgatatctgtttcagtgaacttcagcactttccttgtgatcggaaagacatctcctgttacttaccaagtcctgggccatcttaaaacatgccttgttcttgcttttggttatgttttgcttcacgatccgtttagctggagaaacatacttggaatcctaattgctgtagttggaatggtcttgtattcatacttctgcacagtggagacccagcaaaaaaatgttgaagtctccccacaacaggtaactttctcatgcactacagcactagagaagttccagtgcgcaccattaaattctgttgccctttcagaattctgtcattggtagtgacccagtgtgtaagtatgatatactagtagccaatcctgaatgttgtgttatttgagcagcgaacattgagttttctgtgttcttttatttcatttttacaactttactacttggtcggtcctagtcatcctatttatatcaggactaatataccaaattgggttgcatttagggttgcaaattgggctgagaacatgagcccaagtggcctaagccatctaaaagcagctcatgtcttcagcttcccagtaattccattctgtttctggtcgttcactccctagttgtccaacttatcgtcattggtcgatgtctaatcggacatgattggtcaatgactaattggacaaccataaaactaatcgagtcggagcacctagttaagtccaggatactaactagggcaactaatcttgattaatcagatgacttggtaacactgtacttgtatatggaacaaactaggctctacgtttgtggtgtagtaagtggaattgaccttttttagcatattcagtttgtattaactagcattatagatttgtctcttcctgtctcttgtttgtaattcccggctgcgcttcttacattgcaggtgaaagaaagcgaggcaggccctttgatcgcagactctatgagcaaagttgaaaacgggggtggtggtgttgatgacgagcctttgaaggtacccatgtggagctcaaagtactcgcgggagtgaaaaggtcacgatggcatggcaccatacaggattcaatttagtaggcagatagtagggttggaagccaacccagagtgtaatgaacatttcagttacatttttgggcttctttagtgtcgcagtctactagcagttaaaggatctgtttcttggaaggatcctaccttcagggctctcagacctaccttgaaactagacagcaggtattgtatgattgtatctcgatatgctccacatcctcttactgtaacttccaactggtacatggcgtgcctatatccaaagatagacctcattctttttgtatcaagaagatccggataagaagacttgtgcaagatttgtagcgtttagtgaaatttgtgactgtcagtcatgttcgctttaaaaaagtttagtaatttaaaagtcaattaagaaa

SEQ ID NO: 59002 - DNA, 1432 bp, Zea Mays
agaagttcatgtacccatgcatcggatggggaagtcataacttccgtttttgttcttatttaaagataacccactaccttgacgagctggcatctgctggttacattctgctcccttcatgtagcattatggatgaagttctttgagcataagccttttgattcaagaactgtcatgggatttggagtacttaacggaatctccattgggctcctcaacttgagtcttggcttcaactctgttgggttttaccagatgactaagctggcaatcatcccgtgcactgtcattttagagacacttttcttcaggaagaagttcagtcggagtatccagatgtccctttctgtgcttcttcttggtgttggtgttgcaactgtcactgatctgcaactcaatgctgtgggatccatactgtccttgctggcaattatcacgacttgcattgctcaaattatgacaaacactatccagaagaagttcaaggtctcatcaacccaactgctttaccagtcttgcccttaccaatcactgaccctgtttctcattggccccttccttgatggctttttgactaaccaaaatgtctttgcttttaattatacatctcaagttgtgtttttcatcgtcctgtcatgcttgatatctgtttcagtgaacttcagcactttccttgtgatcggaaagacatctcctgttacttaccaagtcctgggccatcttaaaacatgccttgttcttgcttttggttatgttttgcttcacgatccgtttagctggagaaacatacttggaatcctaattgctgtagttggaatggtcttgtattcatacttctgcacagtggagacccagcaaaaaaatgttgaagtctccccacaacaggtgaaagaaagcgaggcaggccctttgatcgcagactctatgagcaaagttgaaaacgggggtggtggtgttgatgacgagcctttgaaggtacccatgtggagctcaaagtactcgcgggagtgaaaaggtcacgatggcatggcaccatacaggattcaatttagtaggcagatagtagggttggaagccaacccagagtgtaatgaacatttcagttacatttttgggcttctttagtgtcgcagtctactagcagttaaaggatctgtttcttggaaggatcctaccttcagggctctcagacctaccttgaaactagacagcaggtattgtatgattgtatctcgatatgctccacatcctcttactgtaacttccaactggtacatggcgtgcctatatccaaagatagacctcattctttttgtatcaagaagatccggataagaagacttgtgcaagatttgtagcgtttagtgaaatttgtgactgtcagtcatgttcgctttaaaaaagtttagtaatttaaaagtcaattaagaaa

SEQ ID NO: 59003 - DNA, 2189 bp, Zea Mays
ataatttggctaaggcttgtgctgcctatcgtgactttgtatcacaaaatgctataagagttaaaacttcttgttttttcttaaaaagttttggactagggtagtggggttttaaattttgctgagatacttctacctgcctccactaccttgacgagctggcatctgctggttacattctgctcccttcatgtagcattatggatgaagttctttgagcataagccttttgattcaagaactgtcatgggatttggagtacttaacggaatctccattgggctcctcaacttgagtcttggcttcaactctgttgggttttaccagatgactaagctggcaatcatcccgtgcactgtcattttagagacacttttcttcaggaagaagttcagtcggagtatccagatgtccctttctgtgcttcttcttggtgttggtgttgcaactgtcactgatctgcaactcaatgctgtgggatccatactgtccttgctggcaattatcacgacttgcattgctcaaattatgacaaacactatccagaagaagttcaaggtctcatcaacccaactgctttaccagtcttgcccttaccaatcactgaccctgtttctcattggccccttccttgatggctttttgactaaccaaaatgtctttgcttttaattatacatctcaagttgtgtttttcatcgtcctgtcatgcttgatatctgtttcagtgaacttcagcactttccttgtgatcggaaagacatctcctgttacttaccaagtcctgggccatcttaaaacatgccttgttcttgcttttggttatgttttgcttcacgatccgtttagctggagaaacatacttggaatcctaattgctgtagttggaatggtcttgtattcatacttctgcacagtggagacccagcaaaaaaatgttgaagtctccccacaacaggtaactttctcatgcactacagcactagagaagttccagtgcgcaccattaaattctgttgccctttcagaattctgtcattggtagtgacccagtgtgtaagtatgatatactagtagccaatcctgaatgttgtgttatttgagcagcgaacattgagttttctgtgttcttttatttcatttttacaactttactacttggtcggtcctagtcatcctatttatatcaggactaatataccaaattgggttgcatttagggttgcaaattgggctgagaacatgagcccaagtggcctaagccatctaaaagcagctcatgtcttcagcttcccagtaattccattctgtttctggtcgttcactccctagttgtccaacttatcgtcattggtcgatgtctaatcggacatgattggtcaatgactaattggacaaccataaaactaatcgagtcggagcacctagttaagtccaggatactaactagggcaactaatcttgattaatcagatgacttggtaacactgtacttgtatatggaacaaactaggctctacgtttgtggtgtagtaagtggaattgaccttttttagcatattcagtttgtattaactagcattatagatttgtctcttcctgtctcttgtttgtaattcccggctgcgcttcttacattgcaggtgaaagaaagcgaggcaggccctttgatcgcagactctatgagcaaagttgaaaacgggggtggtggtgttgatgacgagcctttgaaggtacccatgtggagctcaaagtactcgcgggagtgaaaaggtcacgatggcatggcaccatacaggattcaatttagtaggcagatagtagggttggaagccaacccagagtgtaatgaacatttcagttacatttttgggcttctttagtgtcgcagtctactagcagttaaaggatctgtttcttggaaggatcctaccttcagggctctcagacctaccttgaaactagacagcaggtattgtatgattgtatctcgatatgctccacatcctcttactgtaacttccaactggtacatggcgtgcctatatccaaagatagacctcattctttttgtatcaagaagatccggataagaagacttgtgcaagatttgtagcgtttagtgaaatttgtgactgtcagtcatgttcgctttaaaaaagtttagtaatttaaaagtcaattaagaaa

SEQ ID NO: 59004 - DNA, 1551 bp, Zea Mays
ataatttggctaaggcttgtgctgcctatcgtgactttgtatcacaaaatgctataagagttaaaacttcttgttttttcttaaaaagttttggactagggtagtggggttttaaattttgctgagatacttctacctgcctccactaccttgacgagctggcatctgctggttacattctgctcccttcatgtagcattatggatgaagttctttgagcataagccttttgattcaagaactgtcatgggatttggagtacttaacggaatctccattgggctcctcaacttgagtcttggcttcaactctgttgggttttaccagataataatcaatccacctaactgatgctgaaatgcctttaaatttagatgactaagctggcaatcatcccgtgcactgtcattttagagacacttttcttcaggaagaagttcagtcggagtatccagatgtccctttctgtgcttcttcttggtgttggtgttgcaactgtcactgatctgcaactcaatgctgtgggatccatactgtccttgctggcaattatcacgacttgcattgctcaaattatgacaaacactatccagaagaagttcaaggtctcatcaacccaactgctttaccagtcttgcccttaccaatcactgaccctgtttctcattggccccttccttgatggctttttgactaaccaaaatgtctttgcttttaattatacatctcaagttgtgtttttcatcgtcctgtcatgcttgatatctgtttcagtgaacttcagcactttccttgtgatcggaaagacatctcctgttacttaccaagtcctgggccatcttaaaacatgccttgttcttgcttttggttatgttttgcttcacgatccgtttagctggagaaacatacttggaatcctaattgctgtagttggaatggtcttgtattcatacttctgcacagtggagacccagcaaaaaaatgttgaagtctccccacaacaggtgaaagaaagcgaggcaggccctttgatcgcagactctatgagcaaagttgaaaacgggggtggtggtgttgatgacgagcctttgaaggtacccatgtggagctcaaagtactcgcgggagtgaaaaggtcacgatggcatggcaccatacaggattcaatttagtaggcagatagtagggttggaagccaacccagagtgtaatgaacatttcagttacatttttgggcttctttagtgtcgcagtctactagcagttaaaggatctgtttcttggaaggatcctaccttcagggctctcagacctaccttgaaactagacagcaggtattgtatgattgtatctcgatatgctccacatcctcttactgtaacttccaactggtacatggcgtgcctatatccaaagatagacctcattctttttgtatcaagaagatccggataagaagacttgtgcaagatttgtagcgtttagtgaaatttgtgactgtcagtcatgttcgctttaaaaaagtttagtaatttaaaagtcaattaagaaa

SEQ ID NO: 59005 - DNA, 1304 bp, Zea Mays
ggtcgccacctaaacctaggcgcgccactctccctggcagccgccgtttgttgtcgcgagcgcgttcctgccccgccacagccgaagctcccagcgtcctcctgcaggccgagctgaaggttcagcgcgccggtggagttcgacgacgaaactccgtcacgtcatacctctccgcctcccgtcttccagacgtctccaatcagggctcccagcgtctcggagaagaggagcagcacggcacggcggctgtggcgaggaaggctcctgtcccatcccaacccagttagcagccgcccaaggaggaggagattcaatcggcgtgcgggcgtccgcggtccatccatcgatccaattccaatctgcagggaaaggaatattgtagaacacgttaacaaaattgctccaaggttccaggagggaatcaaggccttctcaggcagcccaattgttggggagatacgcggtctgggactgatacttggaactgaatttgtcgacaacaaatctccaaatgatccatttccagctgaatggggttcattgttttattgatctcatgtccccttttcaaacatttcagaagtaatccaactttaaggcggcccaaaattgttctctgaagagttaacttaatgttatgaattagcgtagcatgtcgaggcaaaattcgtcactatccccagagttagaagaaaccttgccgagttgattaatggtgacagtatattgattttattacgactggtaactccaggtgttggttcgatatttggcacggagtgcgagaagcgtgggatgctcatcagggtggctggggacagcatcatgctgtcacccccgctgatcatgactcccaatgaagtcgaagaaatcataagcaaattcggcgatgctctaaaggctacagaggaacggattggagaactgaaatccaggaagaattagccgatgctgctggttgtaacgacgtgttgaagatggctttggtgaaggaaatgtcttgttagcatcaagtaagtggcgacatcacaacccctacaagcttgtgccttaaaacaagaggatacaagaagttggagtgcttttgtgaaggcttttgcgaatcacttaaagcgttagtacttttgtgaatgattttgtaaagtgtttgcaaatatgtgcaaaacataataacatgtgtaggttttgtgaatgattttgttgtggtgtctgttgatggtttatgtatgtggatctatcattgtgcaatactaattaaatttgtatatctatgtgattatgtgtataaaaattggtgatttgtg

SEQ ID NO: 59006 - DNA, 1559 bp, Zea Mays
ggtcgccacctaaacctaggcgcgccactctccctggcagccgccgtttgttgtcgcgagcgcgttcctgccccgccacagccgaagctcccagcgtcctcctgcaggccgagctgaaggttcagcgcgccggtggagttcgacgacgaaactccgtcacgtcatacctctccgcctcccgtcttccagacgtctccaatcagggctcccagcgtctcggagaagaggagcagcacggcacggcggctgtggcgaggaaggctcctgtcccatcccaacccagttagcagccgcccaaggaggaggagattcaatcggcgtgcgggcgtccgcggtccatccatcgatccaattccaatctgcaggtgagcagctcgttgagattcccaatcaacagctcgaatcgcctgctctcccatcctattgaatgaaactatggtatagtggtttgcctagttattatctcgaattaatttgtaaagatctccactttggttcgatttgattgtttcttcaactagtggcatattgttctgcttcttatgtgattccattaggtctctgcgtcacggcttgttcgtggaggagaggtcgagaatttactaagtcaacatcttgttttaggtcattactgcatttggaagactagggacaatgtttggatgtgatatgtataatattaaaccagatcttgtttccatagccaaggctctttcttctgcatatatgccaattggagcaattctcgttagcccagaaataacggatgtaatttattctcagagcaataaacttgggaaaggaatattgtagaacacgttaacaaaattgctccaaggttccaggagggaatcaaggccttctcaggcagcccaattgttggggagatacgcggtctgggactgatacttggaactgaatttgtcgacaacaaatctccaaatgatccatttccagctgaatggggtgttggttcgatatttggcacggagtgcgagaagcgtgggatgctcatcagggtggctggggacagcatcatgctgtcacccccgctgatcatgactcccaatgaagtcgaagaaatcataagcaaattcggcgatgctctaaaggctacagaggaacggattggagaactgaaatccaggaagaattagccgatgctgctggttgtaacgacgacatgcaattgaaaatgataattgatcttttttatgggcgaagtgttgaagatggctttggtgaaggaaatgtcttgttagcatcaagtaagtggcgacatcacaacccctacaagcttgtgccttaaaacaagaggatacaagaagttggagtgcttttgtgaaggcttttgcgaatcacttaaagcgttagtacttttgtgaatgattttgtaaagtgtttgcaaatatgtgcaaaacataataacatgtgtaggttttgtgaatgattttgttgtggtgtctgttgatggtttatgtatgtggatctatcattgtgcaatactaattaaatttgtatatctatgtgattatgtgtataaaaattggtgatttgtg

SEQ ID NO: 59007 - DNA, 1381 bp, Zea Mays
ggtcgccacctaaacctaggcgcgccactctccctggcagccgccgtttgttgtcgcgagcgcgttcctgccccgccacagccgaagctcccagcgtcctcctgcaggccgagctgaaggttcagcgcgccggtggagttcgacgacgaaactccgtcacgtcatacctctccgcctcccgtcttccagacgtctccaatcagggctcccagcgtctcggagaagaggagcagcacggcacggcggctgtggcgaggaaggctcctgtcccatcccaacccagttagcagccgcccaaggaggaggagattcaatcggcgtgcgggcgtccgcggtccatccatcgatccaattccaatctgcaggtcattactgcatttggaagactagggacaatgtttggatgtgatatgtataatattaaaccagatcttgtttccatagccaagaggctctttcttctgcatatatgccaattggagcaattctcgttagcccagaaataacggatgtaatttattctcagagcaataaacttggtaaatctaatcccatcatggtaaatctattctgcatatatgtgtctgattaatccttcatataatggccgttagggaaaggaatattgtagaacacgttaacaaaattgctccaaggttccaggagggaatcaaggccttctcaggcagcccaattgttggggagatacgcggtctgggactgatacttggaactgaatttgtcgacaacaaatctccaaatgatccatttccagctgaatggggttcattgttttattgatctcatgtccccttttcaaacatttcagaagtgttggttcgatatttggcacggagtgcgagaagcgtgggatgctcatcagggtggctggggacagcatcatgctgtcacccccgctgatcatgactcccaatgaagtcgaagaaatcataagcaaattcggcgatgctctaaaggctacagaggaacggattggagaactgaaatccaggaagaattagccgatgctgctggttgtaacgacgtgttgaagatggctttggtgaaggaaatgtcttgttagcatcaagtaagtggcgacatcacaacccctacaagcttgtgccttaaaacaagaggatacaagaagttggagtgcttttgtgaaggcttttgcgaatcacttaaagcgttagtacttttgtgaatgattttgtaaagtgtttgcaaatatgtgcaaaacataataacatgtgtaggttttgtgaatgattttgttgtggtgtctgttgatggtttatgtatgtggatctatcattgtgcaatactaattaaatttgtatatctatgtgattatgtgtataaaaattggtgatttgtg

SEQ ID NO: 59008 - DNA, 1128 bp, Zea Mays
ggtcgccacctaaacctaggcgcgccactctccctggcagccgccgtttgttgtcgcgagcgcgttcctgccccgccacagccgaagctcccagcgtcctcctgcaggccgagctgaaggttcagcgcgccggtggagttcgacgacgaaactccgtcacgtcatacctctccgcctcccgtcttccagacgtctccaatcagggctcccagcgtctcggagaagaggagcagcacggcacggcggctgtggcgaggaaggctcctgtcccatcccaacccagttagcagccgcccaaggaggaggagattcaatcggcgtgcgggcgtccgcggtccatccatcgatccaattccaatctgcagggaaaggaatattgtagaacacgttaacaaaattgctccaaggttccaggagggaatcaaggccttctcaggcagcccaattgttggggagatacgcggtctgggactgatacttggaactgaatttgtcgacaacaaatctccaaatgatccatttccagctgaatggggtgttggttcgatatttggcacggagtgcgagaagcgtgggatgctcatcagggtggctggggacagcatcatgctgtcacccccgctgatcatgactcccaatgaagtcgaagaaatcataagcaaattcggcgatgctctaaaggctacagaggaacggattggagaactgaaatccaggaagaattagccgatgctgctggttgtaacgacgacatgcaattgaaaatgataattgatcttttttatgggcgaagtgttgaagatggctttggtgaaggaaatgtcttgttagcatcaagtaagtggcgacatcacaacccctacaagcttgtgccttaaaacaagaggatacaagaagttggagtgcttttgtgaaggcttttgcgaatcacttaaagcgttagtacttttgtgaatgattttgtaaagtgtttgcaaatatgtgcaaaacataataacatgtgtaggttttgtgaatgattttgttgtggtgtctgttgatggtttatgtatgtggatctatcattgtgcaatactaattaaatttgtatatctatgtgattatgtgtataaaaattggtgatttgtg

SEQ ID NO: 59009 - DNA, 1414 bp, Zea Mays
ggtcgccacctaaacctaggcgcgccactctccctggcagccgccgtttgttgtcgcgagcgcgttcctgccccgccacagccgaagctcccagcgtcctcctgcaggccgagctgaaggttcagcgcgccggtggagttcgacgacgaaactccgtcacgtcatacctctccgcctcccgtcttccagacgtctccaatcagggctcccagcgtctcggagaagaggagcagcacggcacggcggctgtggcgaggaaggctcctgtcccatcccaacccagttagcagccgcccaaggaggaggagattcaatcggcgtgcgggcgtccgcggtccatccatcgatccaattccaatctgcaggtctctgcgtcacggcttgttcgtggaggagaggtcgagaatttactaagtcaacatcttgttttaggtcattactgcatttggaagactagggacaatgtttggatgtgatatgtataatattaaaccagatcttgtttccatagccaaggctctttcttctgcatatatgccaattggagcaattctcgttagcccagaaataacggatgtaatttattctcagagcaataaacttgggaaaggaatattgtagaacacgttaacaaaattgctccaaggttccaggagggaatcaaggccttctcaggcagcccaattgttggggagatacgcggtctgggactgatacttggaactgaatttgtcgacaacaaatctccaaatgatccatttccagctgaatggggttcattgttttattgatctcatgtccccttttcaaacatttcagaagtgttggttcgatatttggcacggagtgcgagaagcgtgggatgctcatcagggtggctggggacagcatcatgctgtcacccccgctgatcatgactcccaatgaagtcgaagaaatcataagcaaattcggcgatgctctaaaggctacagaggaacggattggagaactgaaatccaggaagaattagccgatgctgctggttgtaacgacgacatgcaattgaaaatgataattgatcttttttatgggcgaagtgttgaagatggctttggtgaaggaaatgtcttgttagcatcaagtaagtggcgacatcacaacccctacaagcttgtgccttaaaacaagaggatacaagaagttggagtgcttttgtgaaggcttttgcgaatcacttaaagcgttagtacttttgtgaatgattttgtaaagtgtttgcaaatatgtgcaaaacataataacatgtgtaggttttgtgaatgattttgttgtggtgtctgttgatggtttatgtatgtggatctatcattgtgcaatactaattaaatttgtatatctatgtgattatgtgtataaaaattggtgatttgtg

SEQ ID NO: 59010 - DNA, 1347 bp, Zea Mays
ggtcgccacctaaacctaggcgcgccactctccctggcagccgccgtttgttgtcgcgagcgcgttcctgccccgccacagccgaagctcccagcgtcctcctgcaggccgagctgaaggttcagcgcgccggtggagttcgacgacgaaactccgtcacgtcatacctctccgcctcccgtcttccagacgtctccaatcagggctcccagcgtctcggagaagaggagcagcacggcacggcggctgtggcgaggaaggctcctgtcccatcccaacccagttagcagccgcccaaggaggaggagattcaatcggcgtgcgggcgtccgcggtccatccatcgatccaattccaatctgcagggaaaggaatattgtagaacacgttaacaaaattgctccaaggttccaggagggaatcaaggccttctcaggcagcccaattgttggggagatacgcggtctgggactgatacttggaactgaatttgtcgacaacaaatctccaaatgatccatttccagctgaatggggttcattgttttattgatctcatgtccccttttcaaacatttcagaagtaatccaactttaaggcggcccaaaattgttctctgaagagttaacttaatgttatgaattagcgtagcatgtcgaggcaaaattcgtcactatccccagagttagaagaaaccttgccgagttgattaatggtgacagtatattgattttattacgactggtaactccaggtgttggttcgatatttggcacggagtgcgagaagcgtgggatgctcatcagggtggctggggacagcatcatgctgtcacccccgctgatcatgactcccaatgaagtcgaagaaatcataagcaaattcggcgatgctctaaaggctacagaggaacggattggagaactgaaatccaggaagaattagccgatgctgctggttgtaacgacgacatgcaattgaaaatgataattgatcttttttatgggcgaagtgttgaagatggctttggtgaaggaaatgtcttgttagcatcaagtaagtggcgacatcacaacccctacaagcttgtgccttaaaacaagaggatacaagaagttggagtgcttttgtgaaggcttttgcgaatcacttaaagcgttagtacttttgtgaatgattttgtaaagtgtttgcaaatatgtgcaaaacataataacatgtgtaggttttgtgaatgattttgttgtggtgtctgttgatggtttatgtatgtggatctatcattgtgcaatactaattaaatttgtatatctatgtgattatgtgtataaaaattggtgatttgtg

SEQ ID NO: 59011 - DNA, 1347 bp, Zea Mays
ggtcgccacctaaacctaggcgcgccactctccctggcagccgccgtttgttgtcgcgagcgcgttcctgccccgccacagccgaagctcccagcgtcctcctgcaggccgagctgaaggttcagcgcgccggtggagttcgacgacgaaactccgtcacgtcatacctctccgcctcccgtcttccagacgtctccaatcagggctcccagcgtctcggagaagaggagcagcacggcacggcggctgtggcgaggaaggctcctgtcccatcccaacccagttagcagccgcccaaggaggaggagattcaatcggcgtgcgggcgtccgcggtccatccatcgatccaattccaatctgcaggtcattactgcatttggaagactagggacaatgtttggatgtgatatgtataatattaaaccagatcttgtttccatagccaaggctctttcttctgcatatatgccaattggagcaattctcgttagcccagaaataacggatgtaatttattctcagagcaataaacttgggaaaggaatattgtagaacacgttaacaaaattgctccaaggttccaggagggaatcaaggccttctcaggcagcccaattgttggggagatacgcggtctgggactgatacttggaactgaatttgtcgacaacaaatctccaaatgatccatttccagctgaatggggttcattgttttattgatctcatgtccccttttcaaacatttcagaagtgttggttcgatatttggcacggagtgcgagaagcgtgggatgctcatcagggtggctggggacagcatcatgctgtcacccccgctgatcatgactcccaatgaagtcgaagaaatcataagcaaattcggcgatgctctaaaggctacagaggaacggattggagaactgaaatccaggaagaattagccgatgctgctggttgtaacgacgacatgcaattgaaaatgataattgatcttttttatgggcgaagtgttgaagatggctttggtgaaggaaatgtcttgttagcatcaagtaagtggcgacatcacaacccctacaagcttgtgccttaaaacaagaggatacaagaagttggagtgcttttgtgaaggcttttgcgaatcacttaaagcgttagtacttttgtgaatgattttgtaaagtgtttgcaaatatgtgcaaaacataataacatgtgtaggttttgtgaatgattttgttgtggtgtctgttgatggtttatgtatgtggatctatcattgtgcaatactaattaaatttgtatatctatgtgattatgtgtataaaaattggtgatttgtg

SEQ ID NO: 59012 - DNA, 1446 bp, Zea Mays
ggtcgccacctaaacctaggcgcgccactctccctggcagccgccgtttgttgtcgcgagcgcgttcctgccccgccacagccgaagctcccagcgtcctcctgcaggccgagctgaaggttcagcgcgccggtggagttcgacgacgaaactccgtcacgtcatacctctccgcctcccgtcttccagacgtctccaatcagggctcccagcgtctcggagaagaggagcagcacggcacggcggctgtggcgaggaaggctcctgtcccatcccaacccagttagcagccgcccaaggaggaggagattcaatcggcgtgcgggcgtccgcggtccatccatcgatccaattccaatctgcaggtctctgcgtcacggcttgttcgtggaggagaggtcgagaatttactaagtcaacatcttgttttaggtcattactgcatttggaagactagggacaatgtttggatgtgatatgtataatattaaaccagatcttgtttccatagccaaggctctttcttctgcatatatgccaattggagcaattctcgttagcccagaaataacggatgtaatttattctcagagcaataaacttggtaaatctaatcccatcatggtaaatctattctgcatatatgtgtctgattaatccttcatataatggccgttagggaaaggaatattgtagaacacgttaacaaaattgctccaaggttccaggagggaatcaaggccttctcaggcagcccaattgttggggagatacgcggtctgggactgatacttggaactgaatttgtcgacaacaaatctccaaatgatccatttccagctgaatggggttcattgttttattgatctcatgtccccttttcaaacatttcagaagtgttggttcgatatttggcacggagtgcgagaagcgtgggatgctcatcagggtggctggggacagcatcatgctgtcacccccgctgatcatgactcccaatgaagtcgaagaaatcataagcaaattcggcgatgctctaaaggctacagaggaacggattggagaactgaaatccaggaagaattagccgatgctgctggttgtaacgacgtgttgaagatggctttggtgaaggaaatgtcttgttagcatcaagtaagtggcgacatcacaacccctacaagcttgtgccttaaaacaagaggatacaagaagttggagtgcttttgtgaaggcttttgcgaatcacttaaagcgttagtacttttgtgaatgattttgtaaagtgtttgcaaatatgtgcaaaacataataacatgtgtaggttttgtgaatgattttgttgtggtgtctgttgatggtttatgtatgtggatctatcattgtgcaatactaattaaatttgtatatctatgtgattatgtgtataaaaattggtgatttgtg

SEQ ID NO: 59013 - DNA, 3052 bp, Zea Mays
cttcctgtgtgcgcgtggctactcctccctctatgccggctgcttctccctacacggcagctgctctaactgtacgcgcggcagctgctccctgtgcgcgcgcggctcctatgcgtgtggctcctcctcctccttgtgtgcgcggcagttccctgcatgcccctccctgcacggcgtcaggtcctccctggtttctgtgaacatcgtgcaacgagtaccctggttttaggtttctgtgcacatcgtgcagcgagtaccctagttttcaggtttctgtcaagactgtgtagcgagtagcgacaacacaatgtcttctctaaatgaagctccatcttctgtggctggtgagtaacccgaagaacgatccaaaccagaagccacggaagtctgctagttcagggtggaagtatggattttggtcagatcttcaaaacaaagataaggtggaatgcaccctatgtggtcaggttattagtggagggataaagaggttaaatcaacatttggcagaggcatatggagatgcaaagttatgtttgaggctagcagtggattaaggaaggagatgacaagttatttggaggcaaacaagaggaaaaataccaatgtttctagatgaagatgaagaagctgatgaagtggtggaggtgacagtagcagatggggagaatgatgcatctgttgtggagtctcaagcatccaaggtgcaggttaagcccagttctagtacaacagacaaaaagacaatcaatcttgcaattcaaggcaagtaataaagcacaaccaaagacatccaagtccatagttgatatgttgcggagaaaaccagaggatgtggtggatgagagactttcaggatcttatcagctcacagtcttggctagtacaaaaagtagggaggacaaacactatgtggacatgcaatgggctttattcttctatgactgtggtgtacctttcaatgctacagtagttagtcatttttagattgcaattgggaccaaaacatagtttggttcaggttataagcttccaacaccttaccaattatgcgagtcattgcttcaagagactatgaagtcaacaaatacaacgagggaggaacatgagcatgcatgaaaatactatggttgcacactcatgtccgatggatggtctgataggatggacaccatcttattaacttcttagtgaacagccctaagggcacttactttttagagtcaattgatgcattaagtgaagtacatgaatcatacatgcttgttgatttgctagagaaaaaagttgatgagattgggagagacaaggtggtacaagttgttactgataatggtgccaattacaaggttgtaggcaagcttctaatgaaatggattcctacattattttggagtctatgtgctgcacatttcttggatctaatgttggaggacatagaaaacttgaaggaattcaagaaaccaattgcacgtgcaaggcgtgtgacaactttcatgtatagacatgggagaatccttgctgccatgagaaaactggtggggctaatcttgtgaggcattatgccactcattttgctacttcctttctcacattgaatagcttgtacaagcacaaggatgctttgaagtctttatttggaagtactatttggactgataatagattggtaaagactagtgttggattgaatgtgtatatcattgtcttctccacacagttttggaattcagtagaagattgtcttagagcctcaggaccactacttattgtacttagggtggtagatggagatgagaggccagctatgccggaggtccaagcattgatgaaatgtgcaaatgaaaagatcaatcaaagttttgttgtccaaagcaaaaagagttttctcaagaaaatcatgactataattgaatggtgttgggagaaaacaaatggatcacccaatgtatggggcggtaatgtatttgaacccagaaaagttacatccactcataagaaatgatgatgatgctaccgttgggcagctaagagattactttcttgatgtgcttgcaagaatggtagatgatgaagaaacaagagacaagatcaattctctagcactgcattatgagtatcttagaggagtagctttttcaaataagatggccaaatataaccttcaaactatgacctctcataagtgttgttaactgctattgtaattcaagttggttgttgcattgatgcacattcctacaagttggctggctgttgttgtgttgctgtaattgtagtaagttggctgctgcagtgctgctataattctagcaagttggttggtgcagtgttactgtaattacagcaagttggttgttgcagtgctgctagtagtgttgttgttaattctagcaagtagttgcttctattggcttgttaatttgttattattgcagttgagtggtggcgttcttatggtggtcgtgctattgagttacaaagatttgctagacgtttggtgctttgtgcgtcatcattaggttgggaacgcgatcgaagtacctttgtatttgcactgaagttgggcgtaggtgtgaccttacataggacctcgtggataatgtcattggagcatcagaagcattttgtggccgaaactttccaagagaaggccacaatgtgttttcaagaagaaattctattgctgcacaaaatgtggtagaggttgaagagaaagatgaaaatgatccacatgataatgcaaaaatcatagattgtggagatgaacctggtgctatcaatgatagtgaagaatgggaggcacccaatatctcagaagagttcgatgatgatttgaaagatgggagagtagctattactagaatatattagcatatttgctacattagcagctagttactattaattatactattagaaactgtctatgtcagattagatattgtgttgctttatattttgtattattccattagagactactttatcgatattttagatccactattgtgttgatttatagtttatgagctgctggttgcctggtttt

SEQ ID NO: 59014 - DNA, 755 bp, Zea Mays
ctacacggcagctgctctaactgtacgcgcggcagctgctccctgtgcgcgcgcggctcctatgcgtgtggctcctcctcctccttgtgtgcgcggcagttccctgcatgcccctccctgcacggcgtcaggtcctccctgttgagtggtggcgttcttatggtggtcgtgctattgagttacaaagatttgctagacgtttggtgctttgtgcgtcatcattaggttgggaacgcgatcgaagtacctttgtatttgcactgaagttgggcgtaggtgtgaccttacataggacctcgtggataatgtcattggagcatcagaagcattttgtggccgaaactttccaagagaaggccacaatgtgttttcaagaagaaattctattgctgcacaaaatgtggtagaggttgaagagaaagatgaaaatgatccacatgataatgcaaaaatcatagattgtggagatgaacctggtgctatcaatgatagtgaagaatgggaggcacccaatatctcagaagagttcgatgatgatttgaaagatgggagagtagctattactagaatatattagcatatttgctacattagcagctagttactattaattatactattagaaactgtctatgtcagattagatattgtgttgctttatattttgtattattccattagagactactttatcgatattttagatccactattgtgttgatttatagtttatgagctgctggttgcctggtttt

SEQ ID NO: 59015 - DNA, 636 bp, Zea Mays
cacggcagctgctctaactgtacgcgcggcagctgctccctgtgcgcgcgcggctcctatgcgtgtggctcctcctcctccttgtgtgcgcggcagttccctgcatgcccctccctgcacggcgtcaggtcctccctggcactgaagttgggcgtaggtgtgaccttacataggacctcgtggataatgtcattggagcatcagaagcattttgtggccgaaactttccaagagaaggccacaatgtgttttcaagaagaaattctattgctgcacaaaatgtggtagaggttgaagagaaagatgaaaatgatccacatgataatgcaaaaatcatagattgtggagatgaacctggtgctatcaatgatagtgaagaatgggaggcacccaatatctcagaagagttcgatgatgatttgaaagatgggagagtagctattactagaatatattagcatatttgctacattagcagctagttactattaattatactattagaaactgtctatgtcagattagatattgtgttgctttatattttgtattattccattagagactactttatcgatattttagatccactattgtgttgatttatagtttatgagctgctggttgcctggtttt

SEQ ID NO: 59016 - DNA, 1446 bp, Zea Mays
gatttccccccctgtattccgacattttacggccacaaaaaatgtataaaataggaaatgggaaaaccccatcacagctccacgcctccactgctatccctctcttcctctctgctttccccttccaatggaatcctgtagcttccgtgccgcaaccgcgccttctccctttccctccgctccttcttcatcttcatccccgcgcgccccatgccccatactccgatttcccgccaagaaaagggaggcagattggggtgcggaggagggcgtccggatttgatgccttcgcgtctttcgccggcaaggtcttcgtggatgaggcgattggagcggaatatggggagggcttcgaaacatttcgaatggatggaccactcaaggttgatgtggattatctgaatgaaaaattgcaagagtgcttccttcaaaggataaggcatgctatgaagccggatgaggcgtttggtctaattttttcgtgggacaatgttattgctgatacagactcgctaaagttgaatgcttggagacaacttgctttggaggaaggtaaggatatcccaagtggtgctcatgtccggaagagcattattcatggtgctgctgaccatgttcttagaaaggttttgtactgggcaaaagaggaagataaaatggaaaaattgaaggcacgccttatagagttgtactacgagaacctgttcaaactcgatacacctgtagaaggattgagagaatggctggatgctgttcagacagcagggataccttgtgctgtcgcatcaccccttgacaggagatgcatgatcgaagctttggatcggatggcgctaagcaaatatttcaaggcgatcgtgactgacgaagatgatatggagtcgatagcaaatcgatttctgtcagctgctatgaagttggatcgtaaaccctcgaagtgtgtggtgttcgaggatgacccaaggggcgtcacagccgcccacaactgtacaatgatggcagtcgcattgattggtgctcatccagcgtatgagttggtacaggcagaccttgccattgcaaagtacagcgagctctcagtgatcaacctcagaaggctgtttgcgaacaagggaatcagcttcatggacttgcagaagcagataatcgagaagtcacctcccaagaggaggctgacagtagacaccattttctgatagatacacttttatttggtgtctgcctgttgttcttgagtagccaacaaccttcggcattatggcggtggcgttgtatataagatagtgctgatgttaggtgatccgctgtgtacctccttgtgaatgcaatgcggtagttccatcaaggtaccatgaggaagactgctgcaacaatgttgttgctgatgtaagctgatattattcaaatttattcatatttcatggtcgatatctagctcgtcgacat

SEQ ID NO: 59017 - DNA, 1578 bp, Zea Mays
acattttacggccacaaaaaatgtataaaataggaaatgggaaaaccccatcacagctccacgcctccactgctatccctctcttcctctctgctttccccttccaatggaatcctgtagcttccgtgccgcaaccgcgccttctccctttccctccgctccttcttcatcttcatccccgcgcgccccatgccccatactccgatttcccaggccaagaaaagggaggcagattggggtgcggaggagggcgtccggatttgatgccttcgcgtctttcgccggcaaggtcttcgtggatgagttatgctgtgactgtgtaaccggttagctgctggagggctcagagttgacagcgattggagcggaatatggggagggcttcgaaacatttcgaatggatggaccactcaaggttgatgtggattatctgaatgaaaaattgcaagagtgcttccttcaaaggataaggcatgctatgaagccggatgaggcgtttggtctaattttttcgtgggacaatgttattgctgatacagactcgctaaagttgaatgcttggagacaacttgctttggaggaaggtaaggatatcccaagtggtgctcatgtccggaagagcattattcatggtgctgctgaccatgttcttagaaaggttttgtactgggcaaaagaggaagataaaatggaaaaattgaaggcacgccttatagagttgtactacgagaacctgttcaaactcgatacacctgtagaaggattgagagaatggctggatgctgttcagacagcagggataccttgtgctgtcgcatcaccccttgacaggagatgcatgatcgaagctttggatcggatggcgctaagcaaatatttcaagttgttgactgcaggcgatcgtgactgacgaagatgatatggagtcgatagcaaatcgatttctgtcagctgctatgaaggcatgctcctgccccacttctaatcgttgtacatcatgttaatatatataggtcacacatttgcggtttttcttttcttcctggcagttggatcgtaaaccctcgaagtgtgtggtgttcgaggatgacccaaggggcgtcacagccgcccacaactgtacaatgatggcagtcgcattgattggtgctcatccagcgtatgagttggtacaggcagaccttgccattgcaaagtacagcgagctctcagtgatcaacctcagaaggctgtttgcgaacaagggaatcagcttcatggacttgcagaagcagataatcgagaagtcacctcccaagaggaggctgacagtagacaccattttctgatagatacacttttatttggtgtctgcctgttgttcttgagtagccaacaaccttcggcattatggcggtggcgttgtatataagatagtgctgatgttaggtgatccgctgtgtacctccttgtgaatgcaatgcggtagttccatcaaggtaccatgaggaagactgctgcaacaatgttgttgctgatgtaagctgatattattcaaatttattcatatttcatggtcgatatctagctcgtcgacat

SEQ ID NO: 59018 - DNA, 1565 bp, Zea Mays
acattttacggccacaaaaaatgtataaaataggaaatgggaaaaccccatcacagctccacgcctccactgctatccctctcttcctctctgctttccccttccaatggaatcctgtagcttccgtgccgcaaccgcgccttctccctttccctccgctccttcttcatcttcatccccgcgcgccccatgccccatactccgatttcccaggccaagaaaagggaggcagattggggtgcggaggagggcgtccggatttgatgccttcgcgtctttcgccggcaaggtcttcgtggatgagttatgctgtgactgtgtaaccggttagctgctggagggctcagagttgacagcgattggagcggaatatggggagggcttcgaaacatttcgaatggatggaccactcaaggttgatgtggattatctgaatgaaaaattgcaagagtgcttccttcaaaggataaggcatgctatgaagccggatgaggcgtttggtctaattttttcgtgggacaatgttattgctgatacagactcgctaaagttgaatgcttggagacaacttgctttggaggaaggtaaggatatcccaagtggtgctcatgtccggaagagcattattcatggtgctgctgaccatgttcttagaaaggttttgtactgggcaaaagaggaagataaaatggaaaaattgaaggcacgccttatagagttgtactacgagaacctgttcaaactcgatacacctgtagaaggattgagagaatggctggatgctgttcagacagcagggataccttgtgctgtcgcatcaccccttgacaggagatgcatgatcgaagctttggatcggatggcgctaagcaaatatttcaaggcgatcgtgactgacgaagatgatatggagtcgatagcaaatcgatttctgtcagctgctatgaaggcatgctcctgccccacttctaatcgttgtacatcatgttaatatatataggtcacacatttgcggtttttcttttcttcctggcagttggatcgtaaaccctcgaagtgtgtggtgttcgaggatgacccaaggggcgtcacagccgcccacaactgtacaatgatggcagtcgcattgattggtgctcatccagcgtatgagttggtacaggcagaccttgccattgcaaagtacagcgagctctcagtgatcaacctcagaaggctgtttgcgaacaagggaatcagcttcatggacttgcagaagcagataatcgagaagtcacctcccaagaggaggctgacagtagacaccattttctgatagatacacttttatttggtgtctgcctgttgttcttgagtagccaacaaccttcggcattatggcggtggcgttgtatataagatagtgctgatgttaggtgatccgctgtgtacctccttgtgaatgcaatgcggtagttccatcaaggtaccatgaggaagactgctgcaacaatgttgttgctgatgtaagctgatattattcaaatttattcatatttcatggtcgatatctagctcgtcgacat

SEQ ID NO: 59019 - DNA, 1231 bp, Zea Mays
cttcctcctccgcttaggccaagaaaagggaggcagattggggtgcggaggagggcgtccggatttgatgccttcgcgtctttcgccggcaaggtcttcgtggatgaggcgattggagcggaatatggggagggcttcgaaacatttcgaatggatggaccactcaaggttgatgtggattatctgaatgaaaaattgcaagagtgcttccttcaaaggataaggcatgctatgaagccggatgaggcgtttggtctaattttttcgtgggacaatgttattgctgatacagactcgctaaagttgaatgcttggagacaacttgctttggaggaaggtaaggatatcccaagtggtgctcatgtccggaagagcattattcatggtgctgctgaccatgttcttagaaaggttttgtactgggcaaaagaggaagataaaatggaaaaattgaaggcacgccttatagagttgtactacgagaacctgttcaaactcgatacacctgtagaaggattgagagaatggctggatgctgttcagacagcagggataccttgtgctgtcgcatcaccccttgacaggagatgcatgatcgaagctttggatcggatggcgctaagcaaatatttcaaggcgatcgtgactgacgaagatgatatggagtcgatagcaaatcgatttctgtcagctgctatgaagttggatcgtaaaccctcgaagtgtgtggtgttcgaggatgacccaaggggcgtcacagccgcccacaactgtacaatgatggcagtcgcattgattggtgctcatccagcgtatgagttggtacaggcagaccttgccattgcaaagtacagcgagctctcagtgatcaacctcagaaggctgtttgcgaacaagggaatcagcttcatggacttgcagaagcagataatcgagaagtcacctcccaagaggaggctgacagtagacaccattttctgatagatacacttttatttggtgtctgcctgttgttcttgagtagccaacaaccttcggcattatggcggtggcgttgtatataagatagtgctgatgttaggtgatccgctgtgtacctccttgtgaatgcaatgcggtagttccatcaaggtaccatgaggaagactgctgcaacaatgttgttgctgatgtaagctgatattattcaaatttattcatatttcatggtcgatatctagctcgtcgacat

SEQ ID NO: 59020 - DNA, 1500 bp, Zea Mays
ctcagcgtcgcctatcacagaacgtcgaaacactgataggtggggccctctcgtcagccactaaactgatcgccactatgcctcttcgtcgcggcgcaatcctctcgtgcggcccaacaaactcaccacactacacggactttgttacaaccaccaccgagtaccgtccgtccatgaatcctctaggcgtaggcccatctatatgcccatgcctagcccttgccatgccccaccgtattatgggagaggatcaccaccacgcgcaggaaagcgagtacagggccaccgcacgcaatcttcgactcgccatcgattcatcctggatgagcgcactgtggatgtcaccagggagccatggaagctagtgcagacatcactcgggaccggagatgccctgctcacggtggattgcacaccgacggaagtctcagccatgaatctgccccacaccgcgagtcgatctcttcgtgacatcaccactggagaagaaaaggtatcgccagaggagactactacgatgagatctaggtgtcgtctcctagtcaattgttggcgccgaggaaataattatcttagttcaatttatttattatcaattattttgtaagacattttcattgtgtaataaagattatgacatttgtctctatacactgagtcattgtatgtgtggacctttacttggtgcacatatgagacgcacccagtttgcccttaaatcctggtgtgacagaagtggtattaaaggaatgttgactgaaggacataacctagataaaactggacaaaacccttacctacttgtctttactccgattctttctaaactttccttgatcttgtctcatcttttgttgctttactcagactactcttatcttttctactctaaaagacaaaaaggatttcacaccttggaatcctatatctatgaattcccaaagagataggagacctaagacaaaaaaatattttatcgatatttaggcgcttgaaagtttgttcttattataactgcttgattcgcttcttcgattgattgaaatatttgtggggttatatccgcaataaaacctattataatgggtacatgctagcatgtaccaacatagaggtagtatagtaatgataggtaggtggcactctaatctactaagctattgtgacccaaaagatctcgacctaaaagtaaggtgccccatatttaatcatttgtcttatctgcatatctatcttaccttatgtccttaactcagatggtcaatactaggacaagaggaagtgttgatcaacctacacgcatccgccaaagaagggcagtaattaatttagaactggagatgaatccccccaaaatccttcacctgttgggtcggaagcctttttcaccgcccaaatccagctgctgcaacagatgtccaacaccatggccgacatgcaagcccatctcaacaataacagcaacacccacaccaaccaccacccagagataaacatagc

SEQ ID NO: 59021 - DNA, 4731 bp, Zea Mays
gggagttaatacagaagtggaacctaccttggaacatgatatacagaagggtcaaatgggtgatgccaagattcaagaaattagagacctgatggcagaagccaaaggtccagacttcacgaaagatgagcaaggcacaatttggttcaagaacaggatatgtgttcctgagatagacagtctccgagataccatattgaaagaagcccatgagtcagcctattctattcacccaggtagtactaagatgtaccaggacctgaaacaaaagtattggtggtatggaatgaagatagttgtagcctcgcatgtagatgtatgtgatgtttaccggagggtaaaagctgaacataaaagaccagtcagactacttcaactgttaaagatacctgaatggaagtgggaagagatcgatatggatttcatcgttggtctaccctgcactcctgctgggtatgactctatttgggtaattgtggataggccaaccaaagtagcccactttatcccaaggaagaccacttattcgggggctcgattgtcagatttgtacatgtcattgtgtgtctacatggcattccaaagaaaattgtatcggacagaggatcccagttcacctctcggttttggtagaagttacacgagagtacggacacaaatctaaacttcagctcaacctaccatccccaaatagatggccaaaccgaaaggaccaatcaggtgctagaagatatgttgagagcttgtgctcttaaacatggtggcaattgggacaagagtctaccctacacagatttttcatataataacaattaccaagccagtttgaagatgtccctgttcgaggcattatacgggagaaagtgtagaactccattgtactgggatcagactcgcgaaaaacagttcttcggaccagaaatcatccaagaagcagaggagcaggtttggataattagagagaacctgaggacaacacagtcaaggcgaaaaagttctgttgacactcgaagaagacagttggagtttgatgaaagtgatcacgtatacctaaaagtgtcactaatttggggcatgagaagattcaaagtccaggggaagttgtcgcctcgctttattggacccttcaaaatcctaaagcgagttgggcaagtggcctacctgttggtcacttgttttcaattgttgtgaattaaaaacaaggcaacatagtattagacattaaggaccttcatccttcgaagcattatcttctcttgaagataatagttcttggacgaaggtgatgaaatatatgtttttatctctcaattgaccctttttaagggttcatggtttgtaagcacaataccataatgcgatatgatattaaatctcctattttatttgtgtattcaaacaagatgatagcatgaattacataatgacaaaagattacatttatttttttggttccgtgcgaagggtaaatgcaagaatatccttcaattcatgcatgaacagtacgagggtattgttcatctatttataggcatgggacacagtccaagcaaaagtacaattgtgcccttgatgcctacacatttgttctaatacagaaaatgagggttaagctgtctttctactcctgacttgaattgttgcaatcccttcagagcttagcaaaagcaaaaagctatgattgtgtcatttgtcgaagctctacttcgttgttgtaccttcggcaattggtcctgcattacgtctatcaaatgagccaaagcagcttgttgaggaccttcggcagagaagtagacccccaacagtagccccttcgcggtgctaggtcattttttcataacgagctcaatccgcgaaacatatggaggcttcataatgccgaaggtccgaaaaacaccttctttgagcttgttattaaaaagaataaaatagccacagactccatcggtccaccaatcagccagtgtatctagcgtggcggttcgccttcttcacctgcaggactatataaacagattggttggtgtcaagttattacagcattcattgcacttccatcgttgtgctgctaaaaattttcactacaaccgaaggtgtttgcgctcttttcgtcttttaaccatgcttcgacataagtggtaaagatcttttagcttcatcttgacaattcaatggccagaattagatctactgctagactgacgaatgaaagaggggagaccgaagcaactgatacagctccgatcttagaaataatgagggattctgggatggttgctcagacggaagaggaaattgtgccagagaaaaataatattgatgatgaagccaacagtgataatgcttcggatgatgatggtatcttgagcctaagtaaatccagtcatattgaatttggcaaatctactgtgaagcctggtgacctgactttaatgaagaaacttggttactttggaaagaatgatgatgagttgataaggttcgcaggtgatgaaatagtttcggaaccgaaggatgatgaggtgatagttttcaggagcttcttccgcactaggttttggttccctttgtatgaaatgattgacgaaatagtgaagaaattcgaaatatatctccatcatcttactccaaatgcaatagttaggctcagtgtttatatatgggcccttcgaagtcagggtgtaagcgcaaatgacgaaggttgaaccgggtaatggacgccatgggcttcgaatatcctgactatgaaaaatttgaagaagaagctggaggagtaaaaaagaatagggttgttagtattttgaaaagacaagcaatgaggtcaattgaagaggacaaaaagaaaactgtatcaaagaaacaaaagattagagaagagtcgaagtctttggcctttaaaaagcgaaaatcttcagaactaggccgcactgagaagaagttgcctagtccgccagaacggacccctgatacttcttcgacttcatctatcgaggtgacagagattctgaaggtaatgactgaacccttccccttagctatgctaagtccactaagatcagacctgattagcttattatagaatggaaagaatatcaaaggagggaacaaaaaggatccttcgacaactggaggaaggaaatgttcaaaagaaacgtcatatgatggccatcatgagggttgtacacaagactcccccaccagaggcgacaaaaaatatttcttctcccgctcatgccgaagtagagcctgaagccgaaagtagcggaggcccgctcgggactacgctatcagagattgatagacttatagctaatgtggtacacgagatggaactggatgaagttattgttgttgaatatgtggcttcggaaatgaaaaatattgaagaaacttcttcagagaacaagatctttgatctacatcacctgggtggccagcaactctctgaagaagacatttatgagctaagagagtttgctattgcgggtgtctactagctcaagtttattattttttgtggtgttgatgaagagattttaggatgcatccctgactgtgctggggcaaaaattgttaatacattatcaaaagcatctgatttccgaaacttgaatgagatctcagcaactataggaaacaacatattactggcagcttattttactcgatttttaaggtacaaattctattttttcttcttctaattcattgcttttcaaatttttaagggtcaaaaacttatgtagcttcggcctttgtgacagagcttcctactaagcaaagcctttaagttgcagcaatagtgcgaagataagaagaatgagcttattgttaatgatctggaaaagaaggtaaagaaccttgaagacttgttgtaataaaagaactctaagctcaaggctgccgaagcaaatcttgctgaagctcaccttcatagcaaaaaccaagacatccaaattttagattagaacaaaaaattggaaaggttgagcaaagaacttgaacaggtaaagtcatcttttgaaggtactataactcgtttcaagcgtgaggccgaagaactaaatcaaaaggtcaaagccgaaggagagaagagctctaaattgtctatagctttaaaaacacttcgagtttcctgctttggctttgcaacacgatgtacttcacgtttgcaagaaattttcaattcagtcggagcaacttcagagggcatcaaacattctgtcaacaatatcccgaaagcacttgaatggattgagaaagaagttaatgattttgacgaagttatggtggggcatggtgacttctgttcgttagtggctgcctgagggactgctataatcttttccaaagccgtgtgcatccacttgaaaagcatcaacaaaccaaccttaagcatctctcaagctgacctggacaatattcttggtgaagccagaagcgtgggtaacagattcgttacccggatttggacaaagggcgaccgagaagttgctggaaacgaagctcgagcgctacttgaaaatgaagacccgaagctaaagatttctggcgaagacgtgaagacattcttgtagattttgtgtaaaatatagttaagtggaaaaaacaatgtagtgtaaacattccttgtaaatgtgtaccaataccttgcaatattaccttatgttgtttccatttgctttgcagtggacaaaaccatgttattttacttttgagtcgaaaggcgaa

SEQ ID NO: 59022 - DNA, 2868 bp, Zea Mays
ctcttccgcaccccacctgtcaatggttagtcacgtgatcacgtcctctgcgccgccgtgcccatcggagctcggccgcggtctctgcgagatggccccaccaccgcccttgcatcgccgtcctcccgcgcgcgactccaccaataacgctccgggcacactcgcgcagcgcagcgcagtaaataaaaggcaaaaaataaaaaaaaagcacccaaggaaacgccagaacatcaaccaggccgcggccgcggcacttacttcatccgagctccgcccacctcggagcaccgcagtcagctcaagcgcttgaagggacccacaatcttgcaatggaagcacttcagccaaacatccaggctgggatccatactcgtaacctcccagtaaaacagcttggagggatgatctttggttgcaagcctgatacaattgaagaatgcttcaaaaaacagctctttggtctgcctgcagtccattattcatatgtgaagaatgtaaaacctggtatgcctttgtttctattcaattatattgacagaagactccatggtatttttgaggctgcaagtcttggtcagatgtctattgatccatatgcttggagtaatgaggacttattaaagacaccttttcctgctcaggttcgtatttgcataaggactcggtatccaccaatgttagagagcagatacaaaacagtgcttggtgctaactattatgatcgtcatctattctactttgagctggaccatacacagacagaagctttaatttctttgttcaagttgctgccccttgttaataatcaagttccagctgctccaagagaaaggagtattgctgtgtctttaccaccaactaaaaggaaggcaccagttcttcctgacccaaagaaagtcaaagaaaattcaaaggatatcaatccatttagtgttttatcaaatgcaagtgatggtgctcaagaaaactgggttgattttgattctgacgtggaaaatgctagcatcaatgaaaattcacacagtgacactgatgagaaggaatttgaggagccagtttctgattgggaagatttggatgacaatgctcttcaataccaattcagtccttattcaaattcagatgaggtcagtcaaaactcctcatacaaaacagtttgccaagaagtggagcttgctgaatgcattcctccagttgtcaatcctgcgagtgaagaaaaactcaccatgcttgtacataatgagcataaagctgctgtgtgtattggcaaaatagagagtgaagttaacagtatcatggatggtgttgggctacagcctgaaagacacactatcctgaaaaagctgaaagagttattttccatgcgacagcaaggggtttcttcgcaggattgtgttgagtcaagcccagatcaatgtgtacctgaagaaaccctttcctgtgacccattagatgtcactgtggaagacaaaacctcttttcaggaacaccttggagaatttgatgagcttcgacaaatcattgctgatttatccaagagggctgaagcattggagaagaagcagaaaggatcagatcaagatctactttttttgagggaagttgttaaagattcaggaagaaaagtacagcaactggaatatcttgtagatgagttacaattccgatttgactcttcattgtctcttcctggaagcatgcacaatactttagccaagccatcgatatttctgatcggtggctacaatggtgtgacctggttatcatctcttgattctttttctcctgagaaagacacaatggtgggtctcacaccaatgagttttgcccgctcatatgcatctgctgctgcattggatggtcacatatttgcttttggtggtggaggtggcaagtcatcatggtataacacagcgatttgctcttgccgtggctgaattgaatggaacaatctacgccactggtgggtatgatggaagcatgtacttacaatcagcagaacggtatgaccaaagggagggtgtctgggtccgtcttcgaagcatgaacacaaagaggggatgtcatgcccttactgtccttggagaaagcctatatgcaatgggcggatacaatggagacaagatggtttctagcgttgagatcttcgaccctcggctcaacgcctggaggatgggagatcccatgagcgccccaagagggtacgccgctgcagttactctggatggaagcgcgtacttaatcggtggcctggagtccaatgtgcagatcctagctaccgttgaagtttacaacgcgagctccggctggtcagttctcggtttgagttcactcgggaagaggtcctttgcatctgccgtagtcatgtagttactgatcacgatgttaactactgtcgataacatcaggtttaacatagtcgctgcgttatgcaaggagtagttagggtaaggtgggtggggctagatcacccttccgatgtgtaatgtgttgagatcttcatcaggggaaattcgcatggtatgggagactacggcccgtatacctttgaaccctcgtaggaagtcttgagaacccttgcatgcattcgctgttgtatgcgtgccatgctgttgaatttagctgtactacaccagatagtgatacccgaactcacggagtttaatggaaccggatagaaagctgcccatgtagtttggtgtttgttgcttacgttgtggattttactgtagtgacttgtctaatgctccgtttctccgtttggttatcgaccatattggagggcatggaattaaaataagttcaataccaaatcaaatatagtattgaaatagtattgaaatgagatgtaatttcaattctattgtt

SEQ ID NO: 59023 - DNA, 2677 bp, Zea Mays
gccgtgcccatcggagctcggccgcggtctctgcgagatggccccaccaccgcccttgcatcgccgtcctcccgcgcgcgactccaccaataacgctccgggcacactcgcgcagcgcagcgcagtaaataaaaggcaaaaaataaaaaaaaagcacccaaggaaacgccagaacatcaaccaggccgcggccgcggcacttacttcatccgagctccgcccacctcggagcaccgcagtcagctcaagcgcttgaagggacccacaatcttgcaatggaagcacttcagccaaacatccaggctgggatccatactcgtaacctcccagtaaaacagcttggagggatgatctttggttgcaagcctgatacaattgaagaatgcttcaaaaaacagctctttggtctgcctgcagtccattattcatatgtgaagaatgtaaaacctggttcgtatttgcataaggactcggtatccaccaatgttagagagcagatacaaaacagtgcttggtgctaactattatgatcgtcatctattctactttgagctggaccatacacagacagaagctttaatttctttgttcaagttgctgccccttgttaataatcaagttccagctgctccaagagaaaggagtattgctgtgtctttaccaccaactaaaaggaaggcaccagttcttcctgacccaaagaaagtcaaagaaaattcaaaggatatcaatccatttagtgttttatcaaatgcaagtgatggtgctcaagaaaactgggttgattttgattctgacgtggaaaatgctagcatcaatgaaaattcacacagtgacactgatgagaaggaatttgaggagccagtttctgattgggaagatttggatgacaatgctcttcaataccaattcagtccttattcaaattcagatgaggtcagtcaaaactcctcatacaaaacagtttgccaagaagtggagcttgctgaatgcattcctccagttgtcaatcctgcgagtgaagaaaaactcaccatgcttgtacataatgagcataaagctgctgtgtgtattggcaaaatagagagtgaagttaacagtatcatggatggtgttgggctacagcctgaaagacacactatcctgaaaaagctgaaagagttattttccatgcgacagcaaggggtttcttcgcaggattgtgttgagtcaagcccagatcaatgtgtacctgaagaaaccctttcctgtgacccattagatgtcactgtggaagacaaaacctcttttcaggaacaccttggagaatttgatgagcttcgacaaatcattgctgatttatccaagagggctgaagcattggagaagaagcagaaaggatcagatcaagatctactttttttgagggaagttgttaaagattcaggaagaaaagtacagcaactggaatatcttgtagatgagttacaattccgatttgactcttcattgtctcttcctggaagcatgcacaatactttagccaagccatcgatatttctgatcggtggctacaatggtgtgacctggttatcatctcttgattctttttctcctgagaaagacacaatggtgggtctcacaccaatgagttttgcccgctcatatgcatctgctgctgcattggatggtcacatatttgcttttggtggtggaggtggcaagtcatcatggtataacacagcgatttgctcttgccgtggctgaattgaatggaacaatctacgccactggtgggtatgatggaagcatgtacttacaatcagcagaacggtatgaccaaagggagggtgtctgggtccgtcttcgaagcatgaacacaaagaggggatgtcatgcccttactgtccttggagaaagcctatatgcaatgggcggatacaatggagacaagatggtttctagcgttgagatcttcgaccctcggctcaacgcctggaggatgggagatcccatgagcgccccaagagggtacgccgctgcagttactctggatggaagcgcgtacttaatcggtggcctggagtccaatgtgcagatcctagctaccgttgaagtttacaacgcgagctccggctggtcagttctcggtttgagttcactcgggaagaggtcctttgcatctgccgtagtcatgtagttactgatcacgatgttaactactgtcgataacatcaggtttaacatagtcgctgcgttatgcaaggagtagttagggtaaggtgggtggggctagatcacccttccgatgtgtaatgtgttgagatcttcatcaggggaaattcgcatggtatgggagactacggcccgtatacctttgaaccctcgtaggaagtcttgagaacccttgcatgcattcgctgttgtatgcgtgccatgctgttgaatttagctgtactacaccagatagtgatacccgaactcacggagtttaatggaaccggatagaaagctgcccatgtagtttggtgtttgttgcttacgttgtggattttactgtagtgacttgtctaatgctccgtttctccgtttggttatcgaccatattggagggcatggaattaaaataagttcaataccaaatcaaatatagtattgaaatagtattgaaatgagatgtaatttcaattctattgtt

SEQ ID NO: 59024 - DNA, 2670 bp, Zea Mays
cgcagcgcagtaaataaaaggcaaaaaataaaaaaaaagcacccaaggaaacgccagaacatcaaccaggccgcggccgcggcacttacttcatccgagctccgcccacctcggagcaccgcagtcagaaagaaaatgttgctaatgttttgaaccgttctaccatcgaaaccaccgatacttgtatgttctctccttcagttatgacttaaaagcaattgttacctcattgatatcattgtatttgcttaactgatgtgctgctacgcatgcaaccaaaatttctgaagctcaagcgcttgaagggacccacaatcttgcaatggaagcacttcagccaaacatccaggctgggatccatactcgtaacctcccagtaaaacagcttggagggatgatctttggttgcaagcctgatacaattgaagaatgcttcaaaaaacagctctttggtctgcctgcagtccattattcatatgtgaagaatgtaaaacctgatgtctattgatccatatgcttggagtaatgaggacttattaaagacaccttttcctgctcagacagaagctttaatttctttgttcaagttgctgccccttgttaataatcaagttccagctgctccaagagaaaggagtattgctgtgtctttaccaccaactaaaaggaaggcaccagttcttcctgacccaaagaaagtcaaagaaaattcaaaggatatcaatccatttagtgttttatcaaatgcaagtgatggtgctcaagaaaactgggttgattttgattctgacgtggaaaatgctagcatcaatgaaaattcacacagtgacactgatgagaaggaatttgaggagccagtttctgattgggaagatttggatgacaatgctcttcaataccaattcagtccttattcaaattcagatgaggtcagtcaaaactcctcatacaaaacagtttgccaagaagtggagcttgctgaatgcattcctccagttgtcaatcctgcgagtgaagaaaaactcaccatgcttgtacataatgagcataaagctgctgtgtgtattggcaaaatagagagtgaagttaacagtatcatggatggtgttgggctacagcctgaaagacacactatcctgaaaaagctgaaagagttattttccatgcgacagcaaggggtttcttcgcaggattgtgttgagtcaagcccagatcaatgtgtacctgaagaaaccctttcctgtgacccattagatgtcactgtggaagacaaaacctcttttcaggaacaccttggagaatttgatgagcttcgacaaatcattgctgatttatccaagagggctgaagcattggagaagaagcagaaaggatcagatcaagatctactttttttgagggaagttgttaaagattcaggaagaaaagtacagcaactggaatatcttgtagatgagttacaattccgatttgactcttcattgtctcttcctggaagcatgcacaatactttagccaagccatcgatatttctgatcggtggctacaatggtgtgacctggttatcatctcttgattctttttctcctgagaaagacacaatggtgggtctcacaccaatgagttttgcccgctcatatgcatctgctgctgcattggatggtcacatatttgcttttggtggtggaggtggcaagtcatcatggtataacacagcgatttgctcttgccgtggctgaattgaatggaacaatctacgccactggtgggtatgatggaagcatgtacttacaatcagcagaacggtatgaccaaagggagggtgtctgggtccgtcttcgaagcatgaacacaaagaggggatgtcatgcccttactgtccttggagaaagcctatatgcaatgggcggatacaatggagacaagatggtttctagcgttgagatcttcgaccctcggctcaacgcctggaggatgggagatcccatgagcgccccaagagggtacgccgctgcagttactctggatggaagcgcgtacttaatcggtggcctggagtccaatgtgcagatcctagctaccgttgaagtttacaacgcgagctccggctggtcagttctcggtttgagttcactcgggaagaggtcctttgcatctgccgtagtcatgtagttactgatcacgatgttaactactgtcgataacatcaggtttaacatagtcgctgcgttatgcaaggagtagttagggtaaggtgggtggggctagatcacccttccgatgtgtaatgtgttgagatcttcatcaggggaaattcgcatggtatgggagactacggcccgtatacctttgaaccctcgtaggaagtcttgagaacccttgcatgcattcgctgttgtatgcgtgccatgctgttgaatttagctgtactacaccagatagtgatacccgaactcacggagtttaatggaaccggatagaaagctgcccatgtagtttggtgtttgttgcttacgttgtggattttactgtagtgacttgtctaatgctccgtttctccgtttggttatcgaccatattggagggcatggaattaaaataagttcaataccaaatcaaatatagtattgaaatagtattgaaatgagatgtaatttcaattctattgtt

SEQ ID NO: 59025 - DNA, 3804 bp, Zea Mays
cgcagcgcagtaaataaaaggcaaaaaataaaaaaaaagcacccaaggaaacgccagaacatcaaccaggccgcggccgcggcacttacttcatccgagctccgcccacctcggagcaccgcagtcagactgtacgagatttttattggtacaagagctgaccaaaaattgcctacacgtgagatgtgtccctttggatgtggttaaaattgttctgtgggcatggtaacatgacagattgcttctgtgtgatcgtccttgttgaagtggtgatgtggcttgggtgcccttactgtgacaaagcttgttgtcttcatatgttcttgtgcagttgtacatcacatttcgatcaaacattttgtgtgtgtgctccacatgattccaaagcttgtattgcaattgtggtctgttgatggggtggaacgagtcttggttctggaaggatggttaattcggtggtccactgggtatgcatgtggttcctattgcaactttgcaaggcaggggattaattaaacgacatgccgtgtgtagtaagttttatttgaagggtttcctcagggctatgtgcttgttcacatattgataatctttgtgacagattattatgtccatggctctattttgcgacaagatttagtttcaattcaaattttgagtacttttgttgctactctgcataacattcatgatttgatgaaataaatataattttccgtgctaaataatgaactagtagtggttttgtttggttacatgttggcataaaatgggtgatctacatgttgtttacacttcagaaagaaaatgttgctaatgttttgaaccgttctaccatcgaaaccaccgatacttgtatgttctctccttcagttatgacttaaaagcaattgttacctcattgatatcattgtatttgcttaactgatgtgctgctacgcatgcaaccaaaatttctgaagctcaagcgcttgaagggacccacaatcttgcaatggaagcacttcagccaaacatccaggctgggatccatactcgtaacctcccagtaaaacagcttggagggatgatctttggttgcaagcctgatacaattgaagaatgcttcaaaaaacagctctttggtctgcctgcagtccattattcatatgtgaagaatgtaaaacctggtatgcctttgtttctattcaattatattgacagaagactccatggtatttttgaggctgcaagtcttggtcagatgtctattgatccatatgcttggagtaatgaggacttattaaagacaccttttcctgctcaggttcgtatttgcataaggactcggtatccaccaatgttagagagcagatacaaaacagtgcttggtgctaactattatgatcgtcatctattctactttgagctggaccatacacagacagaagctttaatttctttgttcaagttgctgccccttgttaataatcaagttccagctgctccaagagaaaggagtattgctgtgtctttaccaccaactaaaaggaaggcaccagttcttcctgacccaaagaaagtcaaagaaaattcaaaggatatcaatccatttagtgttttatcaaatgcaagtgatggtgctcaagaaaactgggttgattttgattctgacgtggaaaatgctagcatcaatgaaaattcacacagtgacactgatgagaaggaatttgaggagccagtttctgattgggaagatttggatgacaatgctcttcaataccaattcagtccttattcaaattcagatgaggtcagtcaaaactcctcatacaaaacagtttgccaagaagtggagcttgctgaatgcattcctccagttgtcaatcctgcgagtgaagaaaaactcaccatgcttgtacataatgagcataaagctgctgtgtgtattggcaaaatagagagtgaagttaacagtatcatggatggtgttgggctacagcctgaaagacacactatcctgaaaaagctgaaagagttattttccatgcgacagcaaggggtttcttcgcaggattgtgttgagtcaagcccagatcaatgtgtacctgaagaaaccctttcctgtgacccattagatgtcactgtggaagacaaaacctcttttcaggaacaccttggagaatttgatgagcttcgacaaatcattgctgatttatccaagagggctgaagcattggagaagaagcagaaaggatcagatcaagatctactttttttgagggaagttgttaaagattcaggaagaaaagtacagcaactggaatatcttgtagatgagttacaattccgatttgactcttcattgtctcttcctggaagcatgcacaatactttagccaagccatcgatatttctgatcggtggctacaatggtgtgacctggttatcatctcttgattctttttctcctgagaaagacacaatggtgggtctcacaccaatgagttttgcccgctcatatgcatctgctgctgcattggatggtcacatatttgcttttggtggtggaggtggcaagtcatcatggtataacacagtggaatgctatagttcgaggaataacgagtggatagaatgcccctcgttgaaccgcaagaaaggaagtctcgctggtatcagtcttaatagcaaaatatatgctattggtgggggagatggaaatgaaactttttcagaagttgagatgtttgatccataccttgggaaatggttatgtggtccatctatgctgattcctttgcaaagcacctcaaagggttgaatagtcttgacaccaacatgctaccttattcacaatatatgttgcagcgatttgctcttgccgtggctgaattgaatggaacaatctacgccactggtgggtatgatggaagcatgtacttacaatcagcagaacggtatgaccaaagggagggtgtctgggtccgtcttcgaagcatgaacacaaagaggggatgtcatgcccttactgtccttggagaaagcctatatgcaatgggcggatacaatggagacaagatggtttctagcgttgagatcttcgaccctcggctcaacgcctggaggatgggagatcccatgagcgccccaagagggtacgccgctgcagttactctggatggaagcgcgtacttaatcggtggcctggagtccaatgtgcagatcctagctaccgttgaagtttacaacgcgagctccggctggtcagttctcggtttgagttcactcgggaagaggtcctttgcatctgccgtagtcatgtagttactgatcacgatgttaactactgtcgataacatcaggtttaacatagtcgctgcgttatgcaaggagtagttagggtaaggtgggtggggctagatcacccttccgatgtgtaatgtgttgagatcttcatcaggggaaattcgcatggtatgggagactacggcccgtatacctttgaaccctcgtaggaagtcttgagaacccttgcatgcattcgctgttgtatgcgtgccatgctgttgaatttagctgtactacaccagatagtgatacccgaactcacggagtttaatggaaccggatagaaagctgcccatgtagtttggtgtttgttgcttacgttgtggattttactgtagtgacttgtctaatgctccgtttctccgtttggttatcgaccatattggagggcatggaattaaaataagttcaataccaaatcaaatatagtattgaaatagtattgaaatgagatgtaatttcaattctattgtt

SEQ ID NO: 59026 - DNA, 3507 bp, Zea Mays
cgcagcgcagtaaataaaaggcaaaaaataaaaaaaaagcacccaaggaaacgccagaacatcaaccaggccgcggccgcggcacttacttcatccgagctccgcccacctcggagcaccgcagtcagaaagaaaatgttgctaatgttttgaaccgttctaccatcgaaaccaccgatacttctcaagcgcttgaagggacccacaatcttgcaatggaagcacttcagccaaacatccaggctgggatccatactcgtaacctcccagtaaaacagcttggagggatgatctttggttgcaagcctgatacaattgaagaatgcttcaaaaaacagctctttggtctgcctgcagtccattattcatatgtgaagaatgtaaaacctggtatgcctttgtttctattcaattatattgacagaagactccatggtatttttgaggctgcaagtcttggtcagatgtctattgatccatatgcttggagtaatgaggacttattaaagacaccttttcctgctcaggttcgtatttgcataaggactcggtatccaccaatgttagagagcagatacaaaacagtgcttggtgctaactattatgatcgtcatctattctactttgagctggaccatacacagacagaagctttaatttctttgttcaagttgctgccccttgttaataatcaagttccagctgctccaagagaaaggagtattgctgtgtctttaccaccaactaaaaggaaggcaccagttcttcctgacccaaagaaagtcaaagaaaattcaaaggatatcaatccatttagtgttttatcaaatgcaagtgatggtgctcaagaaaactgggttgattttgattctgacgtggaaaatgctagcatcaatgaaaattcacacagtgacactgatgagaaggaatttgaggagccagtttctgattgggaagatttggatgacaatgctcttcaataccaattcagtccttattcaaattcagatgaggtcagtcaaaactcctcatacaaaacagtttgccaagaagtggagcttgctgaatgcattcctccagttgtcaatcctgcgagtgaagaaaaactcaccatgcttgtacataatgagcataaagctgctgtgtgtattggcaaaatagagagtgaagttaacagtatcatggatggtgttgggctacagcctgaaagacacactatcctgaaaaagctgaaagagttattttccatgcgacagcaaggggtttcttcgcaggattgtgttgagtcaagcccagatcaatgtgtacctgaagaaaccctttcctgtgacccattagatgtcactgtggaagacaaaacctcttttcaggaacaccttggagaatttgatgagcttcgacaaatcattgctgatttatccaagagggctgaagcattggagaagaagcagaaaggatcagatcaagatctactttttttgagggaagttgttaaagattcaggaagaaaagtacagcaactggaatatcttgtagatgagttacaattccgatttgactcttcattgtctcttcctggaagcatgcacaatactttagccaagccatcgatatttctgatcggtggctacaatggtgtgacctggttatcatctcttgattctttttctcctgagaaagacacaatggtgggtctcacaccaatgagttttgcccgctcatatgcatctgctgctgcattggatggtcacatatttgcttttggtggtggaggtggcaagtcatcatggtataacacaggtatgccatgggtatctatgatatgatttcactacttttgtgtgacctttttatgttttgtggcatgtacttctatatggttgttttcatttgatagtggaatgctatagttcgaggaataacgagtggatagaatgcccctcgttgaaccgcaagaaaggaagtctcgctggtatcagtcttaatagcaaaatatatgctattggtgggggagatggaaatgaaactttttcagaagttgagatgtttgatccataccttgggaaatggttatgtggtccatctatgctgattcctgtatgatctcatcctctctttgcttatactatttatctaacttgatgtcttctagcccattacaacttagtgcttggaccttgagtcagctatgtttgtattctgattaacttggtgcccttaaagaaataagaacagatgaagggaataggtttatttttgtgtagagatacataagatcagttatgaattatgatgctctcacttttatatatacttgcagcagcatatggtgtcatcctctgtataaaaattctgcttcatataataattcacctgatcattgcatcattatttgcatagtttgcccagacttttgtttataattgagctacaatactgcagctatttactcttatatcttcacaataatttcttacatcagttgcaaagcacctcaaagggttgaatagtcttgacaccaacatgctaccttattcacaatatatgttgcagcgatttgctcttgccgtggctgaattgaatggaacaatctacgccactggtgggtatgatggaagcatgtacttacaatcagcagaacggtatgaccaaagggagggtgtctgggtccgtcttcgaagcatgaacacaaagaggggatgtcatgcccttactgtccttggagaaagcctatatgcaatgggcggatacaatggagacaagatggtttctagcgttgagatcttcgaccctcggctcaacgcctggaggatgggagatcccatgagcgccccaagagggtacgccgctgcagttactctggatggaagcgcgtacttaatcggtggcctggagtccaatgtgcagatcctagctaccgttgaagtttacaacgcgagctccggctggtcagttctcggtttgagttcactcgggaagaggtcctttgcatctgccgtagtcatgtagttactgatcacgatgttaactactgtcgataacatcaggtttaacatagtcgctgcgttatgcaaggagtagttagggtaaggtgggtggggctagatcacccttccgatgtgtaatgtgttgagatcttcatcaggggaaattcgcatggtatgggagactacggcccgtatacctttgaaccctcgtaggaagtcttgagaacccttgcatgcattcgctgttgtatgcgtgccatgctgttgaatttagctgtactacaccagatagtgatacccgaactcacggagtttaatggaaccggatagaaagctgcccatgtagtttggtgtttgttgcttacgttgtggattttactgtagtgacttgtctaatgctccgtttctccgtttggttatcgaccatattggagggcatggaattaaaataagttcaataccaaatcaaatatagtattgaaatagtattgaaatgagatgtaatttcaattctattgtt

SEQ ID NO: 59027 - DNA, 3659 bp, Zea Mays
cgcagcgcagtaaataaaaggcaaaaaataaaaaaaaagcacccaaggaaacgccagaacatcaaccaggccgcggccgcggcacttacttcatccgagctccgcccacctcggagcaccgcagtcagactgtacgagatttttattggtacaagagctgaccaaaaattgcctacacgtgagatgtgtccctttggatgtggttaaaattgttctgtgggcatggtaacatgacagattgcttctgtgtgatcgtccttgttgaagtggtgatgtggcttgggtgcccttactgtgacaaagcttgttgtcttcatatgttcttgtgcagttgtacatcacatttcgatcaaacattttgtgtgtgtgctccacatgattccaaagcttgtattgcaattgtggtctgttgatggggtggaacgagtcttggttctggaaggatggttaattcggtggtccactgggtatgcatgtggttcctattgcaactttgcaaggcaggggattaattaaacgacatgccgtgtgtagtaagttttatttgaagggtttcctcagggctatgtgcttgttcacatattgataatctttgtgacagattattatgtccatggctctattttgcgacaagatttagtttcaattcaaattttgagtacttttgttgctactctgcataacattcatgatttgatgaaataaatataattttccgtgctaaataatgaactagtagtggttttgtttggttacatgttggcataaaatgggtgatctacatgttgtttacacttcagaaagaaaatgttgctaatgttttgaaccgttctaccatcgaaaccaccgatacttgtatgttctctccttcagttatgacttaaaagcaattgttacctcattgatatcattgtatttgcttaactgatgtgctgctacgcatgcaaccaaaatttctgaagctcaagcgcttgaagggacccacaatcttgcaatggaagcacttcagccaaacatccaggctgggatccatactcgtaacctcccagtaaaacagcttggagggatgatctttggttgcaagcctgatacaattgaagaatgcttcaaaaaacagctctttggtctgcctgcagtccattattcatatgtgaagaatgtaaaacctgatgtctattgatccatatgcttggagtaatgaggacttattaaagacaccttttcctgctcaggttcgtatttgcataaggactcggtatccaccaatgttagagagcagatacaaaacagtgcttggtgctaactattatgatcgtcatctattctactttgagctggaccatacacagacagaagctttaatttctttgttcaagttgctgccccttgttaataatcaagttccagctgctccaagagaaaggagtattgctgtgtctttaccaccaactaaaaggaaggcaccagttcttcctgacccaaagaaagtcaaagaaaattcaaaggatatcaatccatttagtgttttatcaaatgcaagtgatggtgctcaagaaaactgggttgattttgattctgacgtggaaaatgctagcatcaatgaaaattcacacagtgacactgatgagaaggaatttgaggagccagtttctgattgggaagatttggatgacaatgctcttcaataccaattcagtccttattcaaattcagatgaggtcagtcaaaactcctcatacaaaacagtttgccaagaagtggagcttgctgaatgcattcctccagttgtcaatcctgcgagtgaagaaaaactcaccatgcttgtacataatgagcataaagctgctgtgtgtattggcaaaatagagagtgaagttaacagtatcatggatggtgttgggctacagcctgaaagacacactatcctgaaaaagctgaaagagttattttccatgcgacagcaaggggtttcttcgcaggattgtgttgagtcaagcccagatcaatgtgtacctgaagaaaccctttcctgtgacccattagatgtcactgtggaagacaaaacctcttttcaggaacaccttggagaatttgatgagcttcgacaaatcattgctgatttatccaagagggctgaagcattggagaagaagcagaaaggatcagatcaagatctactttttttgagggaagttgttaaagattcaggaagaaaagtacagcaactggaatatcttgtagatgagttacaattccgatttgactcttcattgtctcttcctggaagcatgcacaatactttagccaagccatcgatatttctgatcggtggctacaatggtgtgacctggttatcatctcttgattctttttctcctgagaaagacacaatggtgggtctcacaccaatgagttttgcccgctcatatgcatctgctgctgcattggatggtcacatatttgcttttggtggtggaggtggcaagtcatcatggtataacacagtggaatgctatagttcgaggaataacgagtggatagaatgcccctcgttgaaccgcaagaaaggaagtctcgctggtatcagtcttaatagcaaaatatatgctattggtgggggagatggaaatgaaactttttcagaagttgagatgtttgatccataccttgggaaatggttatgtggtccatctatgctgattcctcgatttgctcttgccgtggctgaattgaatggaacaatctacgccactggtgggtatgatggaagcatgtacttacaatcagcagaacggtatgaccaaagggagggtgtctgggtccgtcttcgaagcatgaacacaaagaggggatgtcatgcccttactgtccttggagaaagcctatatgcaatgggcggatacaatggagacaagatggtttctagcgttgagatcttcgaccctcggctcaacgcctggaggatgggagatcccatgagcgccccaagagggtacgccgctgcagttactctggatggaagcgcgtacttaatcggtggcctggagtccaatgtgcagatcctagctaccgttgaagtttacaacgcgagctccggctggtcagttctcggtttgagttcactcgggaagaggtcctttgcatctgccgtagtcatgtagttactgatcacgatgttaactactgtcgataacatcaggtttaacatagtcgctgcgttatgcaaggagtagttagggtaaggtgggtggggctagatcacccttccgatgtgtaatgtgttgagatcttcatcaggggaaattcgcatggtatgggagactacggcccgtatacctttgaaccctcgtaggaagtcttgagaacccttgcatgcattcgctgttgtatgcgtgccatgctgttgaatttagctgtactacaccagatagtgatacccgaactcacggagtttaatggaaccggatagaaagctgcccatgtagtttggtgtttgttgcttacgttgtggattttactgtagtgacttgtctaatgctccgtttctccgtttggttatcgaccatattggagggcatggaattaaaataagttcaataccaaatcaaatatagtattgaaatagtattgaaatgagatgtaatttcaattctattgtt

SEQ ID NO: 59028 - DNA, 2825 bp, Zea Mays
cgcagcgcagtaaataaaaggcaaaaaataaaaaaaaagcacccaaggaaacgccagaacatcaaccaggccgcggccgcggcacttacttcatccgagctccgcccacctcggagcaccgcagtcagctcaagcgcttgaagggacccacaatcttgcaatggaagcacttcagccaaacatccaggctgggatccatactcgtaacctcccagtaaaacagcttggagggatgatctttggttgcaagcctgatacaattgaagaatgcttcaaaaaacagctctttggtctgcctgcagtccattattcatatgtgaagaatgtaaaacctgatgtctattgatccatatgcttggagtaatgaggacttattaaagacaccttttcctgctcaggttcgtatttgcataaggactcggtatccaccaatgttagagagcagatacaaaacagtgcttggtgctaactattatgatcgtcatctattctactttgagctggaccatacacagacagaagctttaatttctttgttcaagttgctgccccttgttaataatcaagttccagctgctccaagagaaaggagtattgctgtgtctttaccaccaactaaaaggaaggcaccagttcttcctgacccaaagaaagtcaaagaaaattcaaaggatatcaatccatttagtgttttatcaaatgcaagtgatggtgctcaagaaaactgggttgattttgattctgacgtggaaaatgctagcatcaatgaaaattcacacagtgacactgatgagaaggaatttgaggagccagtttctgattgggaagatttggatgacaatgctcttcaataccaattcagtccttattcaaattcagatgaggtcagtcaaaactcctcatacaaaacagtttgccaagaagtggagcttgctgaatgcattcctccagttgtcaatcctgcgagtgaagaaaaactcaccatgcttgtacataatgagcataaagctgctgtgtgtattggcaaaatagagagtgaagttaacagtatcatggatggtgttgggctacagcctgaaagacacactatcctgaaaaagctgaaagagttattttccatgcgacagcaaggggtttcttcgcaggattgtgttgagtcaagcccagatcaatgtgtacctgaagaaaccctttcctgtgacccattagatgtcactgtggaagacaaaacctcttttcaggaacaccttggagaatttgatgagcttcgacaaatcattgctgatttatccaagagggctgaagcattggagaagaagcagaaaggatcagatcaagatctactttttttgagggaagttgttaaagattcaggaagaaaagtacagcaactggaatatcttgtagatgagttacaattccgatttgactcttcattgtctcttcctggaagcatgcacaatactttagccaagccatcgatatttctgatcggtggctacaatggtgtgacctggttatcatctcttgattctttttctcctgagaaagacacaatggtgggtctcacaccaatgagttttgcccgctcatatgcatctgctgctgcattggatggtcacatatttgcttttggtggtggaggtggcaagtcatcatggtataacacagtggaatgctatagttcgaggaataacgagtggatagaatgcccctcgttgaaccgcaagaaaggaagtctcgctggtatcagtcttaatagcaaaatatatgctattggtgggggagatggaaatgaaactttttcagaagttgagatgtttgatccataccttgggaaatggttatgtggtccatctatgctgattcctcgatttgctcttgccgtggctgaattgaatggaacaatctacgccactggtgggtatgatggaagcatgtacttacaatcagcagaacggtatgaccaaagggagggtgtctgggtccgtcttcgaagcatgaacacaaagaggggatgtcatgcccttactgtccttggagaaagcctatatgcaatgggcggatacaatggagacaagatggtttctagcgttgagatcttcgaccctcggctcaacgcctggaggatgggagatcccatgagcgccccaagagggtacgccgctgcagttactctggatggaagcgcgtacttaatcggtggcctggagtccaatgtgcagatcctagctaccgttgaagtttacaacgcgagctccggctggtcagttctcggtttgagttcactcgggaagaggtcctttgcatctgccgtagtcatgtagttactgatcacgatgttaactactgtcgataacatcaggtttaacatagtcgctgcgttatgcaaggagtagttagggtaaggtgggtggggctagatcacccttccgatgtgtaatgtgttgagatcttcatcaggggaaattcgcatggtatgggagactacggcccgtatacctttgaaccctcgtaggaagtcttgagaacccttgcatgcattcgctgttgtatgcgtgccatgctgttgaatttagctgtactacaccagatagtgatacccgaactcacggagtttaatggaaccggatagaaagctgcccatgtagtttggtgtttgttgcttacgttgtggattttactgtagtgacttgtctaatgctccgtttctccgtttggttatcgaccatattggagggcatggaattaaaataagttcaataccaaatcaaatatagtattgaaatagtattgaaatgagatgtaatttcaattctattgtt

SEQ ID NO: 59029 - DNA, 3355 bp, Zea Mays
cgcagcgcagtaaataaaaggcaaaaaataaaaaaaaagcacccaaggaaacgccagaacatcaaccaggccgcggccgcggcacttacttcatccgagctccgcccacctcggagcaccgcagtcagctcaagcgcttgaagggacccacaatcttgcaatggaagcacttcagccaaacatccaggctgggatccatactcgtaacctcccagtaaaacagcttggagggatgatctttggttgcaagcctgatacaattgaagaatgcttcaaaaaacagctctttggtctgcctgcagtccattattcatatgtgaagaatgtaaaacctggtatgcctttgtttctattcaattatattgacagaagactccatggtatttttgaggctgcaagtcttggtcagatgtctattgatccatatgcttggagtaatgaggacttattaaagacaccttttcctgctcaggttcgtatttgcataaggactcggtatccaccaatgttagagagcagatacaaaacagtgcttggtgctaactattatgatcgtcatctattctactttgagctggaccatacacagacagaagctttaatttctttgttcaagttgctgccccttgttaataatcaagttccagctgctccaagagaaaggagtattgctgtgtctttaccaccaactaaaaggaaggcaccagttcttcctgacccaaagaaagtcaaagaaaattcaaaggatatcaatccatttagtgttttatcaaatgcaagtgatggtgctcaagaaaactgggttgattttgattctgacgtggaaaatgctagcatcaatgaaaattcacacagtgacactgatgagaaggaatttgaggagccagtttctgattgggaagatttggatgacaatgctcttcaataccaattcagtccttattcaaattcagatgaggtcagtcaaaactcctcatacaaaacagtttgccaagaagtggagcttgctgaatgcattcctccagttgtcaatcctgcgagtgaagaaaaactcaccatgcttgtacataatgagcataaagctgctgtgtgtattggcaaaatagagagtgaagttaacagtatcatggatggtgttgggctacagcctgaaagacacactatcctgaaaaagctgaaagagttattttccatgcgacagcaaggggtttcttcgcaggattgtgttgagtcaagcccagatcaatgtgtacctgaagaaaccctttcctgtgacccattagatgtcactgtggaagacaaaacctcttttcaggaacaccttggagaatttgatgagcttcgacaaatcattgctgatttatccaagagggctgaagcattggagaagaagcagaaaggatcagatcaagatctactttttttgagggaagttgttaaagattcaggaagaaaagtacagcaactggaatatcttgtagatgagttacaattccgatttgactcttcattgtctcttcctggaagcatgcacaatactttagccaagccatcgatatttctgatcggtggctacaatggtgtgacctggttatcatctcttgattctttttctcctgagaaagacacaatggtgggtctcacaccaatgagttttgcccgctcatatgcatctgctgctgcattggatggtcacatatttgcttttggtggtggaggtggcaagtcatcatggtataacacagtggaatgctatagttcgaggaataacgagtggatagaatgcccctcgttgaaccgcaagaaaggaagtctcgctggtatcagtcttaatagcaaaatatatgctattggtgggggagatggaaatgaaactttttcagaagttgagatgtttgatccataccttgggaaatggttatgtggtccatctatgctgattcctgtatgatctcatcctctctttgcttatactatttatctaacttgatgtcttctagcccattacaacttagtgcttggaccttgagtcagctatgtttgtattctgattaacttggtgcccttaaagaaataagaacagatgaagggaataggtttatttttgtgtagagatacataagatcagttatgaattatgatgctctcacttttatatatacttgcagcagcatatggtgtcatcctctgtataaaaattctgcttcatataataattcacctgatcattgcatcattatttgcatagtttgcccagacttttgtttataattgagctacaatactgcagctatttactcttatatcttcacaataatttcttacatcagttgcaaagcacctcaaagggttgaatagtcttgacaccaacatgctaccttattcacaatatatgttgcagcgatttgctcttgccgtggctgaattgaatggaacaatctacgccactggtgggtatgatggaagcatgtacttacaatcagcagaacggtatgaccaaagggagggtgtctgggtccgtcttcgaagcatgaacacaaagaggggatgtcatgcccttactgtccttggagaaagcctatatgcaatgggcggatacaatggagacaagatggtttctagcgttgagatcttcgaccctcggctcaacgcctggaggatgggagatcccatgagcgccccaagagggtacgccgctgcagttactctggatggaagcgcgtacttaatcggtggcctggagtccaatgtgcagatcctagctaccgttgaagtttacaacgcgagctccggctggtcagttctcggtttgagttcactcgggaagaggtcctttgcatctgccgtagtcatgtagttactgatcacgatgttaactactgtcgataacatcaggtttaacatagtcgctgcgttatgcaaggagtagttagggtaaggtgggtggggctagatcacccttccgatgtgtaatgtgttgagatcttcatcaggggaaattcgcatggtatgggagactacggcccgtatacctttgaaccctcgtaggaagtcttgagaacccttgcatgcattcgctgttgtatgcgtgccatgctgttgaatttagctgtactacaccagatagtgatacccgaactcacggagtttaatggaaccggatagaaagctgcccatgtagtttggtgtttgttgcttacgttgtggattttactgtagtgacttgtctaatgctccgtttctccgtttggttatcgaccatattggagggcatggaattaaaataagttcaataccaaatcaaatatagtattgaaatagtattgaaatgagatgtaatttcaattctattgtt

SEQ ID NO: 59030 - DNA, 4294 bp, Zea Mays
cgcagcgcagtaaataaaaggcaaaaaataaaaaaaaagcacccaaggaaacgccagaacatcaaccaggccgcggccgcggcacttacttcatccgagctccgcccacctcggagcaccgcagtcaggtgctgttccggccaccctctagcgtcttgagccgctgctacattccttcccgatacgtcgtgcgctccgctaggatcggccatggggtttgggtccgtacgtacggctcgggcgcattttttttccctttttccatttcagccaaatttctggaacctgttcgggtttcgttgtgggggcgtgcgcgaggttttagcccgttccggtttgttgatacgtgtgtactcgatgtggggtcgcagcttggaatgcgatgggttgggtggcctggcctcggtgattgtggtttgggtggctcattagtgtttagcgttgttgatcactgggggttagggtttaaagcccaaggttttgcggccttgcgggtgccgattgcggggattgctagttcgttgcgttgtctacctgttaatcgcagtaaatcgccctggttttggtgggtttttggttggttgtttgagcgcattttttattaaaagataagagaaatccatgcagttttggtgggcaactgtgcctgcatgtgatttatttgttttatttatttctctttctgtttcttcgtttcacgactggttttgtgtgttgtgaacttgtggtggatacacgtagaatttatgtatttttcctgcagactgtacgagatttttattggtacaagagctgaccaaaaattgcctacacgtgagatgtgtccctttggatgtggttaaaattgttctgtgggcatggtaacatgacagattgcttctgtgtgatcgtccttgttgaagtggtgatgtggcttgggtgcccttactgtgacaaagcttgttgtcttcatatgttcttgtgcagttgtacatcacatttcgatcaaacattttgtgtgtgtgctccacatgattccaaagcttgtattgcaattgtggtctgttgatggggtggaacgagtcttggttctggaaggatggttaattcggtggtccactgggtatgcatgtggttcctattgcaactttgcaaggcaggggattaattaaacgacatgccgtgtgtagtaagttttatttgaagggtttcctcagggctatgtgcttgttcacatattgataatctttgtgacagattattatgtccatggctctattttgcgacaagatttagtttcaattcaaattttgagtacttttgttgctactctgcataacattcatgatttgatgaaataaatataattttccgtgctaaataatgaactagtagtggttttgtttggttacatgttggcataaaatgggtgatctacatgttgtttacacttcagaaagaaaatgttgctaatgttttgaaccgttctaccatcgaaaccaccgatacttgtatgttctctccttcagttatgacttaaaagcaattgttacctcattgatatcattgtatttgcttaactgatgtgctgctacgcatgcaaccaaaatttctgaagctcaagcgcttgaagggacccacaatcttgcaatggaagcacttcagccaaacatccaggctgggatccatactcgtaacctcccagtaaaacagcttggagggatgatctttggttgcaagcctgatacaattgaagaatgcttcaaaaaacagctctttggtctgcctgcagtccattattcatatgtgaagaatgtaaaacctgatgtctattgatccatatgcttggagtaatgaggacttattaaagacaccttttcctgctcaggttcgtatttgcataaggactcggtatccaccaatgttagagagcagatacaaaacagtgcttggtgctaactattatgatcgtcatctattctactttgagctggaccatacacagacagaagctttaatttctttgttcaagttgctgccccttgttaataatcaagttccagctgctccaagagaaaggagtattgctgtgtctttaccaccaactaaaaggaaggcaccagttcttcctgacccaaagaaagtcaaagaaaattcaaaggatatcaatccatttagtgttttatcaaatgcaagtgatggtgctcaagaaaactgggttgattttgattctgacgtggaaaatgctagcatcaatgaaaattcacacagtgacactgatgagaaggaatttgaggagccagtttctgattgggaagatttggatgacaatgctcttcaataccaattcagtccttattcaaattcagatgaggtcagtcaaaactcctcatacaaaacagtttgccaagaagtggagcttgctgaatgcattcctccagttgtcaatcctgcgagtgaagaaaaactcaccatgcttgtacataatgagcataaagctgctgtgtgtattggcaaaatagagagtgaagttaacagtatcatggatggtgttgggctacagcctgaaagacacactatcctgaaaaagctgaaagagttattttccatgcgacagcaaggggtttcttcgcaggattgtgttgagtcaagcccagatcaatgtgtacctgaagaaaccctttcctgtgacccattagatgtcactgtggaagacaaaacctcttttcaggaacaccttggagaatttgatgagcttcgacaaatcattgctgatttatccaagagggctgaagcattggagaagaagcagaaaggatcagatcaagatctactttttttgagggaagttgttaaagattcaggaagaaaagtacagcaactggaatatcttgtagatgagttacaattccgatttgactcttcattgtctcttcctggaagcatgcacaatactttagccaagccatcgatatttctgatcggtggctacaatggtgtgacctggttatcatctcttgattctttttctcctgagaaagacacaatggtgggtctcacaccaatgagttttgcccgctcatatgcatctgctgctgcattggatggtcacatatttgcttttggtggtggaggtggcaagtcatcatggtataacacagtggaatgctatagttcgaggaataacgagtggatagaatgcccctcgttgaaccgcaagaaaggaagtctcgctggtatcagtcttaatagcaaaatatatgctattggtgggggagatggaaatgaaactttttcagaagttgagatgtttgatccataccttgggaaatggttatgtggtccatctatgctgattcctcgatttgctcttgccgtggctgaattgaatggaacaatctacgccactggtgggtatgatggaagcatgtacttacaatcagcagaacggtatgaccaaagggagggtgtctgggtccgtcttcgaagcatgaacacaaagaggggatgtcatgcccttactgtccttggagaaagcctatatgcaatgggcggatacaatggagacaagatggtttctagcgttgagatcttcgaccctcggctcaacgcctggaggatgggagatcccatgagcgccccaagagggtacgccgctgcagttactctggatggaagcgcgtacttaatcggtggcctggagtccaatgtgcagatcctagctaccgttgaagtttacaacgcgagctccggctggtcagttctcggtttgagttcactcgggaagaggtcctttgcatctgccgtagtcatgtagttactgatcacgatgttaactactgtcgataacatcaggtttaacatagtcgctgcgttatgcaaggagtagttagggtaaggtgggtggggctagatcacccttccgatgtgtaatgtgttgagatcttcatcaggggaaattcgcatggtatgggagactacggcccgtatacctttgaaccctcgtaggaagtcttgagaacccttgcatgcattcgctgttgtatgcgtgccatgctgttgaatttagctgtactacaccagatagtgatacccgaactcacggagtttaatggaaccggatagaaagctgcccatgtagtttggtgtttgttgcttacgttgtggattttactgtagtgacttgtctaatgctccgtttctccgtttggttatcgaccatattggagggcatggaattaaaataagttcaataccaaatcaaatatagtattgaaatagtattgaaatgagatgtaatttcaattctattgtt

SEQ ID NO: 59031 - DNA, 2755 bp, Zea Mays
ctgctacattccttcccgatacgtcgtgcgctccgctaggatcggccatggggtttggctcaagcgcttgaagggacccacaatcttgcaatggaagcacttcagccaaacatccaggctgggatccatactcgtaacctcccagtaaaacagcttggagggatgatctttggttgcaagcctgatacaattgaagaatgcttcaaaaaacagctctttggtctgcctgcagtccattattcatatgtgaagaatgtaaaacctgatgtctattgatccatatgcttggagtaatgaggacttattaaagacaccttttcctgctcaggttcgtatttgcataaggactcggtatccaccaatgttagagagcagatacaaaacagtgcttggtgctaactattatgatcgtcatctattctactttgagctggaccatacacagacagaagctttaatttctttgttcaagttgctgccccttgttaataatcaagttccagctgctccaagagaaaggagtattgctgtgtctttaccaccaactaaaaggaaggcaccagttcttcctgacccaaagaaagtcaaagaaaattcaaaggatatcaatccatttagtgttttatcaaatgcaagtgatggtgctcaagaaaactgggttgattttgattctgacgtggaaaatgctagcatcaatgaaaattcacacagtgacactgatgagaaggaatttgaggagccagtttctgattgggaagatttggatgacaatgctcttcaataccaattcagtccttattcaaattcagatgaggtcagtcaaaactcctcatacaaaacagtttgccaagaagtggagcttgctgaatgcattcctccagttgtcaatcctgcgagtgaagaaaaactcaccatgcttgtacataatgagcataaagctgctgtgtgtattggcaaaatagagagtgaagttaacagtatcatggatggtgttgggctacagcctgaaagacacactatcctgaaaaagctgaaagagttattttccatgcgacagcaaggggtttcttcgcaggattgtgttgagtcaagcccagatcaatgtgtacctgaagaaaccctttcctgtgacccattagatgtcactgtggaagacaaaacctcttttcaggaacaccttggagaatttgatgagcttcgacaaatcattgctgatttatccaagagggctgaagcattggagaagaagcagaaaggatcagatcaagatctactttttttgagggaagttgttaaagattcaggaagaaaagtacagcaactggaatatcttgtagatgagttacaattccgatttgactcttcattgtctcttcctggaagcatgcacaatactttagccaagccatcgatatttctgatcggtggctacaatggtgtgacctggttatcatctcttgattctttttctcctgagaaagacacaatggtgggtctcacaccaatgagttttgcccgctcatatgcatctgctgctgcattggatggtcacatatttgcttttggtggtggaggtggcaagtcatcatggtataacacagtggaatgctatagttcgaggaataacgagtggatagaatgcccctcgttgaaccgcaagaaaggaagtctcgctggtatcagtcttaatagcaaaatatatgctattggtgggggagatggaaatgaaactttttcagaagttgagatgtttgatccataccttgggaaatggttatgtggtccatctatgctgattcctcgatttgctcttgccgtggctgaattgaatggaacaatctacgccactggtgggtatgatggaagcatgtacttacaatcagcagaacggtatgaccaaagggagggtgtctgggtccgtcttcgaagcatgaacacaaagaggggatgtcatgcccttactgtccttggagaaagcctatatgcaatgggcggatacaatggagacaagatggtttctagcgttgagatcttcgaccctcggctcaacgcctggaggatgggagatcccatgagcgccccaagagggtacgccgctgcagttactctggatggaagcgcgtacttaatcggtggcctggagtccaatgtgcagatcctagctaccgttgaagtttacaacgcgagctccggctggtcagttctcggtttgagttcactcgggaagaggtcctttgcatctgccgtagtcatgtagttactgatcacgatgttaactactgtcgataacatcaggtttaacatagtcgctgcgttatgcaaggagtagttagggtaaggtgggtggggctagatcacccttccgatgtgtaatgtgttgagatcttcatcaggggaaattcgcatggtatgggagactacggcccgtatacctttgaaccctcgtaggaagtcttgagaacccttgcatgcattcgctgttgtatgcgtgccatgctgttgaatttagctgtactacaccagatagtgatacccgaactcacggagtttaatggaaccggatagaaagctgcccatgtagtttggtgtttgttgcttacgttgtggattttactgtagtgacttgtctaatgctccgtttctccgtttggttatcgaccatattggagggcatggaattaaaataagttcaataccaaatcaaatatagtattgaaatagtattgaaatgagatgtaatttcaattctattgtt

SEQ ID NO: 59032 - DNA, 2849 bp, Zea Mays
gttgaagtggtgatgtggcttgggtgcccttactgtgacaaagcttgttgtcttcatatgttcttgtgcagttgtacatcacatttcgatcaaacattttgtgtgtgtgctccacatgattccaaagcttgtattgcaattgtggtctgttgatggggtggaacgagtcttggttctggaaggatggttaattcggtggtccactggctcaagcgcttgaagggacccacaatcttgcaatggaagcacttcagccaaacatccaggctgggatccatactcgtaacctcccagtaaaacagcttggagggatgatctttggttgcaagcctgatacaattgaagaatgcttcaaaaaacagctctttggtctgcctgcagtccattattcatatgtgaagaatgtaaaacctggtatgcctttgtttctattcaattatattgacagaagactccatggtatttttgaggctgcaagtcttggtcagatgtctattgatccatatgcttggagtaatgaggacttattaaagacaccttttcctgctcaggttcgtatttgcataaggactcggtatccaccaatgttagagagcagatacaaaacagtgcttggtgctaactattatgatcgtcatctattctactttgagctggaccatacacagacagaagctttaatttctttgttcaagttgctgccccttgttaataatcaagttccagctgctccaagagaaaggagtattgctgtgtctttaccaccaactaaaaggaaggcaccagttcttcctgacccaaagaaagtcaaagaaaattcaaaggatatcaatccatttagtgttttatcaaatgcaagtgatggtgctcaagaaaactgggttgattttgattctgacgtggaaaatgctagcatcaatgaaaattcacacagtgacactgatgagaaggaatttgaggagccagtttctgattgggaagatttggatgacaatgctcttcaataccaattcagtccttattcaaattcagatgaggtcagtcaaaactcctcatacaaaacagtttgccaagaagtggagcttgctgaatgcattcctccagttgtcaatcctgcgagtgaagaaaaactcaccatgcttgtacataatgagcataaagctgctgtgtgtattggcaaaatagagagtgaagttaacagtatcatggatggtgttgggctacagcctgaaagacacactatcctgaaaaagctgaaagagttattttccatgcgacagcaaggggtttcttcgcaggattgtgttgagtcaagcccagatcaatgtgtacctgaagaaaccctttcctgtgacccattagatgtcactgtggaagacaaaacctcttttcaggaacaccttggagaatttgatgagcttcgacaaatcattgctgatttatccaagagggctgaagcattggagaagaagcagaaaggatcagatcaagatctactttttttgagggaagttgttaaagattcaggaagaaaagtacagcaactggaatatcttgtagatgagttacaattccgatttgactcttcattgtctcttcctggaagcatgcacaatactttagccaagccatcgatatttctgatcggtggctacaatggtgtgacctggttatcatctcttgattctttttctcctgagaaagacacaatggtgggtctcacaccaatgagttttgcccgctcatatgcatctgctgctgcattggatggtcacatatttgcttttggtggtggaggtggcaagtcatcatggtataacacagttgcaaagcacctcaaagggttgaatagtcttgacaccaacatgctaccttattcacaatatatgttgcagcgatttgctcttgccgtggctgaattgaatggaacaatctacgccactggtgggtatgatggaagcatgtacttacaatcagcagaacggtatgaccaaagggagggtgtctgggtccgtcttcgaagcatgaacacaaagaggggatgtcatgcccttactgtccttggagaaagcctatatgcaatgggcggatacaatggagacaagatggtttctagcgttgagatcttcgaccctcggctcaacgcctggaggatgggagatcccatgagcgccccaagagggtacgccgctgcagttactctggatggaagcgcgtacttaatcggtggcctggagtccaatgtgcagatcctagctaccgttgaagtttacaacgcgagctccggctggtcagttctcggtttgagttcactcgggaagaggtcctttgcatctgccgtagtcatgtagttactgatcacgatgttaactactgtcgataacatcaggtttaacatagtcgctgcgttatgcaaggagtagttagggtaaggtgggtggggctagatcacccttccgatgtgtaatgtgttgagatcttcatcaggggaaattcgcatggtatgggagactacggcccgtatacctttgaaccctcgtaggaagtcttgagaacccttgcatgcattcgctgttgtatgcgtgccatgctgttgaatttagctgtactacaccagatagtgatacccgaactcacggagtttaatggaaccggatagaaagctgcccatgtagtttggtgtttgttgcttacgttgtggattttactgtagtgacttgtctaatgctccgtttctccgtttggttatcgaccatattggagggcatggaattaaaataagttcaataccaaatcaaatatagtattgaaatagtattgaaatgagatgtaatttcaattctattgtt

SEQ ID NO: 59033 - DNA, 2812 bp, Zea Mays
gtcttggttctggaaggatggttaattcggtggtccactggctcaagcgcttgaagggacccacaatcttgcaatggaagcacttcagccaaacatccaggctgggatccatactcgtaacctcccagtaaaacagcttggagggatgatctttggttgcaagcctgatacaattgaagaatgcttcaaaaaacagctctttggtctgcctgcagtccattattcatatgtgaagaatgtaaaacctggtatgcctttgtttctattcaattatattgacagaagactccatggtatttttgaggctgcaagtcttggtcagatgtctattgatccatatgcttggagtaatgaggacttattaaagacaccttttcctgctcaggttcgtatttgcataaggactcggtatccaccaatgttagagagcagatacaaaacagtgcttggtgctaactattatgatcgtcatctattctactttgagctggaccatacacagacagaagctttaatttctttgttcaagttgctgccccttgttaataatcaagttccagctgctccaagagaaaggagtattgctgtgtctttaccaccaactaaaaggaaggcaccagttcttcctgacccaaagaaagtcaaagaaaattcaaaggatatcaatccatttagtgttttatcaaatgcaagtgatggtgctcaagaaaactgggttgattttgattctgacgtggaaaatgctagcatcaatgaaaattcacacagtgacactgatgagaaggaatttgaggagccagtttctgattgggaagatttggatgacaatgctcttcaataccaattcagtccttattcaaattcagatgaggtcagtcaaaactcctcatacaaaacagtttgccaagaagtggagcttgctgaatgcattcctccagttgtcaatcctgcgagtgaagaaaaactcaccatgcttgtacataatgagcataaagctgctgtgtgtattggcaaaatagagagtgaagttaacagtatcatggatggtgttgggctacagcctgaaagacacactatcctgaaaaagctgaaagagttattttccatgcgacagcaaggggtttcttcgcaggattgtgttgagtcaagcccagatcaatgtgtacctgaagaaaccctttcctgtgacccattagatgtcactgtggaagacaaaacctcttttcaggaacaccttggagaatttgatgagcttcgacaaatcattgctgatttatccaagagggctgaagcattggagaagaagcagaaaggatcagatcaagatctactttttttgagggaagttgttaaagattcaggaagaaaagtacagcaactggaatatcttgtagatgagttacaattccgatttgactcttcattgtctcttcctggaagcatgcacaatactttagccaagccatcgatatttctgatcggtggctacaatggtgtgacctggttatcatctcttgattctttttctcctgagaaagacacaatggtgggtctcacaccaatgagttttgcccgctcatatgcatctgctgctgcattggatggtcacatatttgcttttggtggtggaggtggcaagtcatcatggtataacacagtggaatgctatagttcgaggaataacgagtggatagaatgcccctcgttgaaccgcaagaaaggaagtctcgctggtatcagtcttaatagcaaaatatatgctattggtgggggagatggaaatgaaactttttcagaagttgagatgtttgatccataccttgggaaatggttatgtggtccatctatgctgattcctcgatttgctcttgccgtggctgaattgaatggaacaatctacgccactggtgggtatgatggaagcatgtacttacaatcagcagaacggtatgaccaaagggagggtgtctgggtccgtcttcgaagcatgaacacaaagaggggatgtcatgcccttactgtccttggagaaagcctatatgcaatgggcggatacaatggagacaagatggtttctagcgttgagatcttcgaccctcggctcaacgcctggaggatgggagatcccatgagcgccccaagagggtacgccgctgcagttactctggatggaagcgcgtacttaatcggtggcctggagtccaatgtgcagatcctagctaccgttgaagtttacaacgcgagctccggctggtcagttctcggtttgagttcactcgggaagaggtcctttgcatctgccgtagtcatgtagttactgatcacgatgttaactactgtcgataacatcaggtttaacatagtcgctgcgttatgcaaggagtagttagggtaaggtgggtggggctagatcacccttccgatgtgtaatgtgttgagatcttcatcaggggaaattcgcatggtatgggagactacggcccgtatacctttgaaccctcgtaggaagtcttgagaacccttgcatgcattcgctgttgtatgcgtgccatgctgttgaatttagctgtactacaccagatagtgatacccgaactcacggagtttaatggaaccggatagaaagctgcccatgtagtttggtgtttgttgcttacgttgtggattttactgtagtgacttgtctaatgctccgtttctccgtttggttatcgaccatattggagggcatggaattaaaataagttcaataccaaatcaaatatagtattgaaatagtattgaaatgagatgtaatttcaattctattgtt

SEQ ID NO: 59034 - DNA, 742 bp, Zea Mays
atgtagctaaatgatttatatcactgggagtaaggatatataatcaattagcagataatcggccttcctgtccagctctgcttggcggacagtcatgccggtggagggaaggaagaagggcgtgccggcgctggggtggtggctaatgctggtcggctccctccgcctcgcctccgtctggttcggcttctttgacatctgggcgctccgcgtcgccgtcttctcccagacggacatgactgatgttcatggccgtacttttggtgtctggactcttctgacctgcacgttgtgcttcctctgtgcactgaacctggaaaataggcctctgtatctggccaccttcctatcatttgtctacgctcttggccatttcctcacagagtacttgatatatcacaccatggctgcagcaaatctgagcacagttggcttctttgcaggaacgtcaatcatatggatgcttcttcagtggaattatcatgtgaatccccatggtgcccaagctgtgaagcagtcatgattgatgcttgggctgttagctttatgtggtccagggggaggaaggataccttagaaactgtcagaaaagctcatttcatacttcatttttcatcatgttattttgttgcatgagacatttgtccaactgagtagggaatgaaagttcaaattatttctgccactgattgggggatggaattccaaacattgtaaaaggcgactgtatctagtaaaaaga

SEQ ID NO: 59035 - DNA, 592 bp, Zea Mays
atgcatctatgtgatgtctcgctaggtagcaagaggatagctcacatccgagcctagtcttcctccgttgctgctcagccatggtggtgtcgctggacctcgccgagcatggcacgcgcccggccatggtgactttctacttaattgaggagcataggagaaagctcaaggaagattacggttagtaacctagagaggataagctggagattaagaagattgctcttcatgctctgaaccatgtaatctccagaaaggctctggcaatcgtgtaggtgattgatcgtttcattgatgactgggaagatagaaggcacggtggttgtactgacccagcttggacgtggttattttggtagcaggttgtagtctagactctagattctagaatagaccagagatttcctcacccctggacgccattacagcgtcaggcttttgttcatatgtggtgattagcggctgacaccattttggaagaaccattctagatgctcgttgtacaaagactcttcatatctggtgattgctgggctagtctaccttccagctcgccgtgctcatgcgctggctaccaatctggcttgtcgac

SEQ ID NO: 59036 - DNA, 737 bp, Zea Mays
atgcatctatgtgatgtctcgctaggtagcaagaggatagctcacatccgagcctagtcttcctccgttgctgctcagccatggtggtgtcgctggacctcgccgagcatggcacgcgcccggccatggtggtgcacgaccatcttctgcaatcatgtgaaagcagacattattttccttgcacttatttgctctgttttttctattgctatttgctgttttttctattgctatttgctctgtttttattatgttgaccaatggtcatgcaaatgattcgggttattcacccaattcacgatcagactttctacttaattgaggagcataggagaaagctcaaggaagattacgattaagaagattgctcttcatgctctgaaccatgtaatctccagaaaggctctggcaatcgtgtaggtgattgatcgtttcattgatgactgggaagatagaaggcacggtggttgtactgacccagcttggacgtggttattttggtagcaggttgtagtctagactctagattctagaatagaccagagatttcctcacccctggacgccattacagcgtcaggcttttgttcatatgtggtgattagcggctgacaccattttggaagaaccattctagatgctcgttgtacaaagactcttcatatctggtgattgctgggctagtctaccttccagctcgccgtgctcatgcgctggctaccaatctggcttgtcgac

SEQ ID NO: 59037 - DNA, 574 bp, Zea Mays
acatccgagcctagtcttcctccgttgctgctcagccatggtggtgtcgctggacctcgccgagcatggcacgcgcccggccatggtggtgcacgaccatcttctgcaatcatactttctacttaattgaggagcataggagaaagctcaaggaagattacggttagtaacctagagaggataagctggagattaagaagattgctcttcatgctctgaaccatgtaatctccagaaaggctctggcaatcgtgtaggtgattgatcgtttcattgatgactgggaagatagaaggcacggtggttgtactgacccagcttggacgtggttattttggtagcaggttgtagtctagactctagattctagaatagaccagagatttcctcacccctggacgccattacagcgtcaggcttttgttcatatgtggtgattagcggctgacaccattttggaagaaccattctagatgctcgttgtacaaagactcttcatatctggtgattgctgggctagtctaccttccagctcgccgtgctcatgcgctggctaccaatctggcttgtcgac

SEQ ID NO: 59038 - DNA, 556 bp, Zea Mays
acatccgagcctagtcttcctccgttgctgctcagccatggtggtgtcgctggacctcgccgagcatggcacgcgcccggccatggtggtgcacgaccatcttctgcaatcatgagcataggagaaagctcaaggaagattacggttagtaacctagagaggataagctggagattaagaagattgctcttcatgctctgaaccatgtaatctccagaaaggctctggcaatcgtgtaggtgattgatcgtttcattgatgactgggaagatagaaggcacggtggttgtactgacccagcttggacgtggttattttggtagcaggttgtagtctagactctagattctagaatagaccagagatttcctcacccctggacgccattacagcgtcaggcttttgttcatatgtggtgattagcggctgacaccattttggaagaaccattctagatgctcgttgtacaaagactcttcatatctggtgattgctgggctagtctaccttccagctcgccgtgctcatgcgctggctaccaatctggcttgtcgac

SEQ ID NO: 59039 - DNA, 1266 bp, Zea Mays
cgcccacgcccgcctctcccttccccgccagttttgatcaacccgcacacctcccgctctctagggttccacggtcccacctgtgtcatcacctctcctatccaatataccacctcatcgttgtctcacacgttccttcccaactccacagtgtagcctcttcgcgacatgatctagatccaatttgttcatcgtgggtctggtgaaggaaggcatcaacatggaggaggaatacttggagatcggcatatcagtaatatttgagacatttcggctaattcgggtagttcatgtaatgggtaacattacctgaactacccaaaccaaatctgggtttctagaattgctatccaaaattatgatcgggtaattcgggttcaggtagtttggatctgggttggggtagtttgggtttgagatttggataccgggtattttgcctacccctctttgaattttataaatgtatggtattagtatatatcactatagattctcctagcaataaatcaactcactatcacatgtagattatcctaacaatacatcaactcactgttacaaggcttttgttgaaccatactacattaatgcaacagtatgcatttatttacaaataatttatgagacattgagggcgataatgataatatgttgttttttgtgtaattgttgtgcactaaaacatttttgaatcatttgtgtgtcgttccaacgcagaggcattgtactagtattagttacaatagtagctaaaaaggataaaccttggttagttcaaacgtactctaaccactaagccaatgttttgttacaacaacaatgcgggacttacaacagtaaagccaaaaatttctgatgtcctaatccattgaatataacccctatatcgtcggacataagttatttctgatggcttagggcttatgtccgacaacaaggggtttgggagccttcgtcttccgaaggtcctcgaaaacatgatttaacaatgtttcccaagtgtaacatatgaacaggtaccttcggacttggatcaaaaccgtacacgatgtgaaaagcatggtcgagacgaagattgatgttgctccgaagctatgcgcaagggagcttcggctcaacgacggaaaaaggaaccgacttaaaggggaaaaggtcatatagtcttcgttgagttgtccataagtcaatagtaaatataaagggcatgaatgtaattttacacaggctacgccctgtgcctataaatagatgaacagtaccccc

SEQ ID NO: 59040 - DNA, 284 bp, Zea Mays
ccgcctctcccttccccgccagttttgatcaacccgcacacctcccgctctctagggttccacggtcccacctgtgtcatcacctctcctatccaatataccacctcatcgttgtctcacacgttccttcccaactccacagtgtagcctcttcgcgacatgatctagatccaagtaatataatttgttcatcgtgggtctggtgaaggaaggcatcaacatggaggaggaatacttggagatcggcatatcagttattttacattacgattagttttatttta

SEQ ID NO: 59041 - DNA, 3572 bp, Zea Mays
caacggttccctccattaaaagaccttcccctccatcaccaccccccgattccactcccacgtgctgctccacttgcgccgccacgttatacctctgggctgtagccatggggacgtcggggtccaagggcatcgacggcgtcggcgcagtttctggcgtcggcgctggcgcggcgggccttggcggcgtcggcgccggcggggacgggggcgagggcgccgccgcggaggcgtggcatggcggggcgcagctgtacgtgtcgctcaagatggagaacgcgttgatcagcggcgacctcgtcccgcacgtgtatggctccgagcccatcatcggcacctgggacccctcccgcgccctcgccatggaaagggagctcgcgtccatgtgggtgctcagcttcgtcgtgccgccggaccatgaaacactggacttcaagttcttgctgaagcccaaagacgctgaaaccccgtgcatcatcgaggaaggacccacacggctcctcaccggaggcatgctagagggtgatgtgagggttgcactgttcaagctcaatggagatgatgaggtgctcgagtttggggtggtcaacaaggcggaccttgtatcaccgcttgaacttgctgcaagctggagggtgtacaaggagaactttcagccttccaaagttcgggggatccctgatatcagtatcaatgtcacacccactaatggagctgaggtttctgtttcctgtcttcctacaggaaggatcagcggctactttggaacttgacttggaacattatgttgttccgtccccgccaactgcaccaccaaatggatatgctgcaaaccttgctgcgactccagcatccgtgattcaaactgaggcattgttgacaaatgatatccttctaagtgatgggattcagagtccaagtagtgtttctgcaaaattagaagattgtactaaccacaagaatattgaggcctgggcaacagattcttctaagaaaattcagaattccggactcattgaatcaaaatcagttggcacctttacaccaatgcaaaagctagatggtcaaaaggggctgttcgttgacaggggtgttggctcttctatgcttccaaaatcagccagtgcatgctccttggcatctgggtttagttttggatcagcaaagacaatgccagaagcagcaggagctgttgcagctgcagctgtagctgatcgtttgcatgggtcaaaggaggaccggaagctggccattgttttggttggcctaccagctcgtggtaaaaccttcactgcagttaagcttacaaggtaccttcgttggttgggccatgaaactagacatttcaatgttgggaagtatcgccgtcttaagcttggagcaaatcagtctgcagattttttccgtgatgataatcctgaaggtattgaggcacgtaatgaggtggctgctttagcaatggaggacatgatagattggatgaatggtggaggtcaggttggtatatttgacgcaacaaacagcacaagaaagcgaagatatatgctaatgaaaatggctgaaggtaactgtaagattatatttttggagacaatatgtaatgatccaaacataattgaaagaaacatacggctgaagatccaacaaagtccagactatgctgaacagctagattatgaagctggactggaggacttcaaggaacgtttgattaattatgaaaaggtctacgagccagtaggggaaggttcttacatcaaaatgattgacatggtaaaggggcaagatggtcagttacaggcatggtgagagtttacataatgttagaggaagagtcggtggtgatacagttctaagtgaaactggcgaactttatgcaaagaaactagccaactttatagaaaagcggctcaaatgtgagaaaacagcaactatatggaccagtacccttcagagaacaattttgacagcaagtccaattgttggattccccaagatacaatggcgtgctcttgatgagatcaattctggagtgtgtgatgggatgacttatgaagagataaagaaaatcatgcccgaggaatttgagtcacgaaagaaggacaagctaagataccgctacccccgtggagaatcttacctcgatgtgatacagaggctggaacccgtcatcatcgagctagaacgccagcgtgcaccagtggttgtcatatctcatcaggctgtactgcgagcactgtatgcatatttcgcggaccgtcctttgagagaagttccagagatagagatgccactacacaccataatcgagatacaaatgggcgtcacgggtgtggaagagaagaggtacaaactcatggactgaatgaatacataaaagcagctggttggctgtttcatacagcaagtacacataacacagaagccttttcccttctctctctctctccacacggtgttcagtgtaatttctttggaaaaaagacatgttgaacattgtaaagaaaaaactaataaggaactgtaaaaatggcatgcttactgtaacgaataaggaatacagactgggggtctccaatgcttattcagaaacatattccgtcaaatcggttgatcctgtggctgatgggaccaatgaaccgtaatgcctttgccttggttgtactagtagatctgtacacgacctgtgccaaactatgaactgtcatgtcctcctgtgcccatgtgaggacacaaggcaggccgttttcgtgctccagaagctctgctgaaattatggcgtggccctggactgggtgccaaattcccctcgattccatgcggcatccatgaacgccctcacgatgcccctgtctgccttcaaatatatagctcagtcgccgcttggtccggtacggcttcatgtgtgcgtgcgtgattgaagacggaggcccggaggtgcgctgtcggcactggccatgtcgctggctcgttacgacgccaacgtcctgctggccgcggtgaccgcgctctcggcggctgtcgctttcgtcgcggcgcttcacctctacgcgcggtgcctcctgcagcggcgcgtcgccctcgcggaaggcagccctcgcgtggtcgcgctgcagcggcagcgcccgccggacggctacgtggtggaggtcgtccgcatcgtcgaagacgcaagcgtgtgcggccagcaggctgcggggctggacgccaaggcgctgcgcgcgctgccggtgttcacgttggagtccgagcaggccaaggaagaaggcggcgtcgctgccgagctgcacgggcagtgcgtggtgtgcctcggggagatggaggatggcgagctggggaggctgctcccggggtgccgccacgtgttccacgttgagtgcatcgacacgtggctcggggtgagctcgacctgcccggtgtgccggacggcagctacgcctgccgctccgtcggccgtcggcgtggaccacggtggcggggaagagtccatagctgttgagtgctagtgtgatgtacaaaaaaaggaaggttaatcataaataaatggatgcaaggctgaaatcttttgtgct

SEQ ID NO: 59042 - DNA, 3661 bp, Zea Mays
caacggttccctccattaaaagaccttcccctccatcaccaccccccgattccactcccacgtgctgctccacttgcgccgccacgttatacctctgggctgtagccatggggacgtcggggtccaagggcatcgacggcgtcggcgcagtttctggcgtcggcgctggcgcggcgggccttggcggcgtcggcgccggcggggacgggggcgagggcgccgccgcggaggcgtggcatggcggggcgcagctgtacgtgtcgctcaagatggagaacgcgttgatcagcggcgacctcgtcccgcacgtgtatggctccgagcccatcatcggcacctgggacccctcccgcgccctcgccatggaaagggagctcgcgtccatgtgggtgctcagcttcgtcgtgccgccggaccatgaaacactggacttcaagttcttgctgaagcccaaagacgctgaaaccccgtgcatcatcgaggaaggacccacacggctcctcaccggaggcatgctagagggtgatgtgagggttgcactgttcaagctcaatggagatgatgaggtgctcgagtttggggtggtcaacaaggcggaccttgtatcaccgcttgaacttgctgcaagctggagggtgtacaaggagaactttcagccttccaaagttcgggggatccctgatatcagtatcaatgtcacacccactaatggagctgaggtttctgtttcctgtcttcctacaggaaggatcagcggctactttggaacttgacttggaacattatgttgttccgtccccgccaactgcaccaccaaatggatatgctgcaaaccttgctgcgactccagcatccgtgattcaaactgaggcattgttgacaaatgatatccttctaagtgatgggattcagagtccaagtagtgtttctgcaaaattagaagattgtactaaccacaagaatattgaggcctgggcaacagattcttctaagaaaattcagaattccggactcattgaatcaaaatcagttggcacctttacaccaatgcaaaagctagatggtcaaaaggggctgttcgttgacaggggtgttggctcttctatgcttccaaaatcagccagtgcatgctccttggcatctgggtttagttttggatcagcaaagacaatgccagaagcagcaggagctgttgcagctgcagctgtagctgatcgtttgcatgggtcaaaggaggaccggaagctggccattgttttggttggcctaccagctcgtggtaaaaccttcactgcagttaagcttacaaggtaccttcgttggttgggccatgaaactagacatttcaatgttgggaagtatcgccgtcttaagcttggagcaaatcagtctgcagattttttccgtgatgataatcctgaaggtattgaggcacgtaatgaggtggctgctttagcaatggaggacatgatagattggatgaatggtggaggtcaggttggtatatttgacgcaacaaacagcacaagaaagcgaagatatatgctaatgaaaatggctgaaggtaactgtaagattatatttttggagacaatatgtaatgatccaaacataattgaaagaaacatacggctgaagatccaacaaagtccagactatgctgaacagctagattatgaagctggactggaggacttcaaggaacgtttgattaattatgaaaaggtctacgagccagtaggggaaggttcttacatcaaaatgattgacatggtaaaggggcaagatggtcagttacaggtaaataatatcagcggttatctccctgggaggattgtcttcttcttggtgaactctcatcttacaccacgacctattttgcttaccaggcatggtgagagtttacataatgttagaggaagagtcggtggtgatacagttctaagtgaaactggcgaactttatgcaaagaaactagccaactttatagaaaagcggctcaaatgtgagaaaacagcaactatatggaccagtacccttcagagaacaattttgacagcaagtccaattgttggattccccaagatacaatggcgtgctcttgatgagatcaattctggagtgtgtgatgggatgacttatgaagagataaagaaaatcatgcccgaggaatttgagtcacgaaagaaggacaagctaagataccgctacccccgtggagaatcttacctcgatgtgatacagaggctggaacccgtcatcatcgagctagaacgccagcgtgcaccagtggttgtcatatctcatcaggctgtactgcgagcactgtatgcatatttcgcggaccgtcctttgagagaagttccagagatagagatgccactacacaccataatcgagatacaaatgggcgtcacgggtgtggaagagaagaggtacaaactcatggactgaatgaatacataaaagcagctggttggctgtttcatacagcaagtacacataacacagaagccttttcccttctctctctctctccacacggtgttcagtgtaatttctttggaaaaaagacatgttgaacattgtaaagaaaaaactaataaggaactgtaaaaatggcatgcttactgtaacgaataaggaatacagactgggggtctccaatgcttattcagaaacatattccgtcaaatcggttgatcctgtggctgatgggaccaatgaaccgtaatgcctttgccttggttgtactagtagatctgtacacgacctgtgccaaactatgaactgtcatgtcctcctgtgcccatgtgaggacacaaggcaggccgttttcgtgctccagaagctctgctgaaattatggcgtggccctggactgggtgccaaattcccctcgattccatgcggcatccatgaacgccctcacgatgcccctgtctgccttcaaatatatagctcagtcgccgcttggtccggtacggcttcatgtgtgcgtgcgtgattgaagacggaggcccggaggtgcgctgtcggcactggccatgtcgctggctcgttacgacgccaacgtcctgctggccgcggtgaccgcgctctcggcggctgtcgctttcgtcgcggcgcttcacctctacgcgcggtgcctcctgcagcggcgcgtcgccctcgcggaaggcagccctcgcgtggtcgcgctgcagcggcagcgcccgccggacggctacgtggtggaggtcgtccgcatcgtcgaagacgcaagcgtgtgcggccagcaggctgcggggctggacgccaaggcgctgcgcgcgctgccggtgttcacgttggagtccgagcaggccaaggaagaaggcggcgtcgctgccgagctgcacgggcagtgcgtggtgtgcctcggggagatggaggatggcgagctggggaggctgctcccggggtgccgccacgtgttccacgttgagtgcatcgacacgtggctcggggtgagctcgacctgcccggtgtgccggacggcagctacgcctgccgctccgtcggccgtcggcgtggaccacggtggcggggaagagtccatagctgttgagtgctagtgtgatgtacaaaaaaaggaaggttaatcataaataaatggatgcaaggctgaaatcttttgtgct

SEQ ID NO: 59043 - DNA, 2532 bp, Zea Mays
gagatatctaggtcgaggccgtgttcttgtaatcacagacaatgccagaagcagcaggagctgttgcagctgcagctgtagctgatcgtttgcatgggtcaaaggaggaccggaagctggccattgttttggttggcctaccagctcgtggtaaaaccttcactgcagttaagcttacaaggtaccttcgttggttgggccatgaaactagacatttcaatgttgggaagtatcgccgtcttaagcttggagcaaatcagtctgcagattttttccgtgatgataatcctgaaggtattgaggcacgtaatgaggtggctgctttagcaatggaggacatgatagattggatgaatggtggaggtcaggttggtatatttgacgcaacaaacagcacaagaaagcgaagatatatgctaatgaaaatggctgaaggtaactgtaagattatatttttggagacaatatgtaatgatccaaacataattgaaagaaacatacggctgaagatccaacaaagtccagactatgctgaacagctagattatgaagctggactggaggacttcaaggaacgtttgattaattatgaaaaggtctacgagccagtaggggaaggttcttacatcaaaatgattgacatggtaaaggggcaagatggtcagttacaggtaaataatatcagcggttatctccctgggaggattgtcttcttcttggtgaactctcatcttacaccacgacctattttgcttaccaggcatggtgagagtttacataatgttagaggaagagtcggtggtgatacagttctaagtgaaactggcgaactttatgcaaagaaactagccaactttatagaaaagcggctcaaatgtgagaaaacagcaactatatggaccagtacccttcagagaacaattttgacagcaagtccaattgttggattccccaagatacaatggcgtgctcttgatgagatcaattctggagtgtgtgatgggatgacttatgaagagataaagaaaatcatgcccgaggaatttgagtcacgaaagaaggacaagctaagataccgctacccccgtggagaatcttacctcgatgtgatacagaggctggaacccgtcatcatcgagctagaacgccagcgtgcaccagtggttgtcatatctcatcaggctgtactgcgagcactgtatgcatatttcgcggaccgtcctttgagagaagttccagagatagagatgccactacacaccataatcgagatacaaatgggcgtcacgggtgtggaagagaagaggtacaaactcatggactgaatgaatacataaaagcagctggttggctgtttcatacagcaagtacacataacacagaagccttttcccttctctctctctctccacacggtgttcagtgtaatttctttggaaaaaagacatgttgaacattgtaaagaaaaaactaataaggaactgtaaaaatggcatgcttactgtaacgaataaggaatacagactgggggtctccaatgcttattcagaaacatattccgtcaaatcggttgatcctgtggctgatgggaccaatgaaccgtaatgcctttgccttggttgtactagtagatctgtacacgacctgtgccaaactatgaactgtcatgtcctcctgtgcccatgtgaggacacaaggcaggccgttttcgtgctccagaagctctgctgaaattatggcgtggccctggactgggtgccaaattcccctcgattccatgcggcatccatgaacgccctcacgatgcccctgtctgccttcaaatatatagctcagtcgccgcttggtccggtacggcttcatgtgtgcgtgcgtgattgaagacggaggcccggaggtgcgctgtcggcactggccatgtcgctggctcgttacgacgccaacgtcctgctggccgcggtgaccgcgctctcggcggctgtcgctttcgtcgcggcgcttcacctctacgcgcggtgcctcctgcagcggcgcgtcgccctcgcggaaggcagccctcgcgtggtcgcgctgcagcggcagcgcccgccggacggctacgtggtggaggtcgtccgcatcgtcgaagacgcaagcgtgtgcggccagcaggctgcggggctggacgccaaggcgctgcgcgcgctgccggtgttcacgttggagtccgagcaggccaaggaagaaggcggcgtcgctgccgagctgcacgggcagtgcgtggtgtgcctcggggagatggaggatggcgagctggggaggctgctcccggggtgccgccacgtgttccacgttgagtgcatcgacacgtggctcggggtgagctcgacctgcccggtgtgccggacggcagctacgcctgccgctccgtcggccgtcggcgtggaccacggtggcggggaagagtccatagctgttgagtgctagtgtgatgtacaaaaaaaggaaggttaatcataaataaatggatgcaaggctgaaatcttttgtgct

SEQ ID NO: 59044 - DNA, 2484 bp, Zea Mays
ctaggtcgaggccgtgttcttgtaatcacagacaatgccagaagcagcaggagctgttgcagctgcagctgtagctgatcgtttgcatgggtcaaaggaggaccggaagctggccattgttttggttggcctaccagctcgtggtaaaaccttcactgcagttaagcttacaaggtaccttcgttggttgggccatgaaactagacatttcaatgttgggaagtatcgccgtcttaagcttggagcaaatcagtctgcagattttttccgtgatgataatcctgaaggtattgaggcacgtaatgaggtggctgctttagcaatggaggacatgatagattggatgaatggtggaggtcaggttggtatatttgacgcaacaaacagcacaagaaagcgaagatatatgctaatgaaaatggctgaaggtaactgtaagattatatttttggagacaatatgtaatgatccaaacataattgaaagaaacatacggctgaagatccaacaaagtccagactatgctgaacagctagattatgaagctggactggaggacttcaaggaacgtttgattaattatgaaaaggtctacgagccagtaggggaaggttcttacatcaaaatgattgacatggtaaaggggcaagatggtcagttacaggtaaataatatcagcggttatctccctgggaggattgtcttcttcttggcatggtgagagtttacataatgttagaggaagagtcggtggtgatacagttctaagtgaaactggcgaactttatgcaaagaaactagccaactttatagaaaagcggctcaaatgtgagaaaacagcaactatatggaccagtacccttcagagaacaattttgacagcaagtccaattgttggattccccaagatacaatggcgtgctcttgatgagatcaattctggagtgtgtgatgggatgacttatgaagagataaagaaaatcatgcccgaggaatttgagtcacgaaagaaggacaagctaagataccgctacccccgtggagaatcttacctcgatgtgatacagaggctggaacccgtcatcatcgagctagaacgccagcgtgcaccagtggttgtcatatctcatcaggctgtactgcgagcactgtatgcatatttcgcggaccgtcctttgagagaagttccagagatagagatgccactacacaccataatcgagatacaaatgggcgtcacgggtgtggaagagaagaggtacaaactcatggactgaatgaatacataaaagcagctggttggctgtttcatacagcaagtacacataacacagaagccttttcccttctctctctctctccacacggtgttcagtgtaatttctttggaaaaaagacatgttgaacattgtaaagaaaaaactaataaggaactgtaaaaatggcatgcttactgtaacgaataaggaatacagactgggggtctccaatgcttattcagaaacatattccgtcaaatcggttgatcctgtggctgatgggaccaatgaaccgtaatgcctttgccttggttgtactagtagatctgtacacgacctgtgccaaactatgaactgtcatgtcctcctgtgcccatgtgaggacacaaggcaggccgttttcgtgctccagaagctctgctgaaattatggcgtggccctggactgggtgccaaattcccctcgattccatgcggcatccatgaacgccctcacgatgcccctgtctgccttcaaatatatagctcagtcgccgcttggtccggtacggcttcatgtgtgcgtgcgtgattgaagacggaggcccggaggtgcgctgtcggcactggccatgtcgctggctcgttacgacgccaacgtcctgctggccgcggtgaccgcgctctcggcggctgtcgctttcgtcgcggcgcttcacctctacgcgcggtgcctcctgcagcggcgcgtcgccctcgcggaaggcagccctcgcgtggtcgcgctgcagcggcagcgcccgccggacggctacgtggtggaggtcgtccgcatcgtcgaagacgcaagcgtgtgcggccagcaggctgcggggctggacgccaaggcgctgcgcgcgctgccggtgttcacgttggagtccgagcaggccaaggaagaaggcggcgtcgctgccgagctgcacgggcagtgcgtggtgtgcctcggggagatggaggatggcgagctggggaggctgctcccggggtgccgccacgtgttccacgttgagtgcatcgacacgtggctcggggtgagctcgacctgcccggtgtgccggacggcagctacgcctgccgctccgtcggccgtcggcgtggaccacggtggcggggaagagtccatagctgttgagtgctagtgtgatgtacaaaaaaaggaaggttaatcataaataaatggatgcaaggctgaaatcttttgtgct

SEQ ID NO: 59045 - DNA, 5326 bp, Zea Mays
cctccctggcccctaattgccccccggaagaagccgcaccaggagcaaattcctcctctctcgagggcggttgcgtgctcgcgtgaagaaggccggggccctatctctccgatcgcggtagggcgttcgcagcgccgattcgagccgacgattggccgtccgcgaagaacacataagttctacactcggtttttctttagaagcagaagtactgaatctgttaaatggtacaacactgttgtcctttgctttgatggtaatgcatgaaattcgaacaccgacatgtcttctgcatcttcaggtttagtgagatctggcctctgcaatagtcacttccttgaaagcagatataaggattattatagttggagttcaatctttggggacatgaattgattctgttatttgtttgactccagtttggggcaatcacgggctttaggttgggtgaggtattgttgtttcaatgaattcaggtactcaggttagtgatagtttcagaatattgtagttacattgtggcggtgagtaagctcttaagtcttaactcatgatgagaaccttaattcattgggtactacatttactccttttttagaaaaaatatacatttatgtttttctttcttcccttagagtccatagcctgatatgcgtatttccttctctgtagctcttccattgtccaactgaactttggaagttcttctagagaattatctagctctcagtttttttcagatatttgcatttattacttcaaaaatttgaattgttctattaatgacattgcaggtactatttgaacactgaactaaaaattggagtttcttttcttatttgacatcttgatgtgccaaaatcaagctctcgttaaaggtcaaacaaatgggcaaaatttgggctctttgattagttttttcagtgttaagtggtgaatctactgtggtaaatgggagagctgatccagttgatctatatgccttgtgaggactattttgtcctcaataagaatatatgttcaacatcactgttggacttgtgttgcccttagattgagatggtggcttctcttacaagattgtagcagccttttaactctcgaagagggggccccttcaattgtgagttttgagaagagccaattgctgctaccttcatatcattttgaggactggaaaaggtggaccagtgtcactcttagcatctaccacctagaactttagcccaatggtggtttatatgttgaaattcatcaagtataaaggcgagaagggtagtttcgttgcccacagttaacttgtagggagagaaatattgagatctgtggaaatattggctggagcagcagaatcactcaataattttgattttggatggtagaataggttggcgtaaatttggcaaaaagaacttaaacagttctttcacatcaaattagttgttctgaagattctttccaagtaaaaatcagcttatcatgtatgcttgggccatgaagtaacaattcttttgatcgctgaggatgtcatttgcagatagatattcaatgttgttggaaagagaaagatgctagttgaaaataggtgaattgatgatgttggaaacaagatgcatttattcataagacgaacaaagggacaacaatttcgaggaggaaccctttagctaggttgtgtgtgcatcattacatggacatgtgtgtacctgaaatgctagtgctatatctacctgccttcatattttctggggcttctggagctgatagatagtgtcatactttctgccttatgtccatttactttctgtttaacagaattatgtacaatttattattagtttctctcccaatgactaagcccgtttgacgggcttttcactccatgtaaagaattagaagattctagccaatcttcttatgttcaatataatgtatatgaactgtactgtttgataagtgctgccatataatttagttgcacactgtttcagcttctttggttattactgtattcctgttgttatagatgtttgtattgctgtcaataagttctttgccttcgaaaattggtcctttcacctggtgttgcacagagtcctggtgttgtgctgaactaatgttgtaaggcaactgtctttgttggttaggtattatgattttcatacttgatactggactactaaaatagcatctgtaatttgatcctaatcaatggattgtatagatgcttatctagtatttttctatcacatagagaaaagacaatgcagtctagatatgctgcttgtaattatcttttctaaagcttgtctaagttaaacgctatatatatctactagtctctttgttatcttcaaacaaacatcatcgtttgatactattacgacaataaatgatctccaatcctttatattggaggaataataatatgtaacattggttgggtgtagagattacattatatacgtctctaaccctaataggctacatgtgctaggctaggtccatgacacacaaccatgaagaggacccagatccttcatcacgaactttggttgaagtgtgtgtgtttgtgcatatataaaatcttaggcaccataataacatgacgtatacataatggttctcttcaacttgcatctacattattgacataacataggtatcgtctagctacttggtgaataaaacttcagagaatcatattttgttgttttcatatggtaaattcatatgttctttctcttcaacttgcatctacattattggcataacataggtatcgtctagctacttggtgactaaaacttcagaaagtcatatttcgttattttcatatggtaaaatcatatgttctatcattacttgtcaggccaagttactgccataaccaaagctataaaggtttctaattcttgtattgaggtctaaaagtcagatctccaccatatatattttattttgtagcagactattatgcaagtatgatgatgattccttctctagtttaattctgtaaactacatactgtagtcaaaaagttttatgtttactttgttaattacgtcggcatggtttctagtcttcttggatatatgacgaggacttcatttgtgttgtgtgttgcaccaaagttaaataagacactggatatgatggaatatttgggttttggcactggcagctctagcctgtgtgactgtaatctcacatcttgcggttctaaggtctgaatgattctttttagtttattacagaagtctaagtatttgtggttctctgtatatattttgtttctaaatctacaagtatatttgcagctgcaacttgcttttctagaatactaatgccaaccctatattttttcaggttaaacaaaatcaaatccccctgttcatgtgttatggcagggcatcatcataataacacacatgcctccaggatggatcatgtgaacaggttccagagtgaagcacagccttttggcccaaagttatttatgcattctagaactgatgcagcaaatggagctctaccatcaggttatgtgggcgcaccaataagaccaaatggcattccattctcaagtcacaccgggcaatctcatattcagcacagtgatgctcctggaaccatgcttgcatcctattctggctatcctcttgctggaagctccagtagcacctatgcaccacataatactcatcatctgcctgctttgagctatccacataggtctgatgataacttcattctgagttcccatatggatgacagaagggttgcactgaagcggagaaatccaattatttatccagtggatggagtcaataatgggagctgttatgctggcagttcatctaatcctcagttcccatgctacatgcctccaaatcctattcctgctcctgaaccctgccctcctcgaataacatcaaatatgggttcaagctactggactgatcagccctttggtagcaatggaggatctcagaggaatgtgagaggtcgccatgatcacaatcctatccatttgggacacaatccaggtgtagcttgcgcaacaagcagcactcatgggccaccacaccatgctaatgtaattggtcctcaaagtacagcagtgccacaaaatagagcatatttttctatacctccaagagtgactgccccaggcagcgatggaaactgtagcatggttttcagggaagggacatactactctgctccgcagaggaccaacataaatgccccccctgtcctagcacctcctggttcttctgatagtctacattttgtgcatggtgggtatgccccaagagcagcccctcctaacagcatcagcacatatcctgccccggcttttgcgactcctaacaactcagtgacagttacccatgagcctgatatcccttgctatcgacctgccgtccctggctatccgcctgctacctcagcagcagcagcagcagcaagtgttcatgctgaaggtgctgctgcatcttcgagacatctaggtcatgtggctctaggttccagtggtagtgcaaggagtagaaggctgagggattcataccatgcttttcgtccactggttattgaagaaaataacttgagaggaccagcaaccgagcgttttatgatgctaaatcagttatttatccatgaatcgagagaagattctgaccctcactgggacatgaggctggacattgatgatatgagttatgaggagctgctggctttgggagaacgaataggcaatgtcaacacgggcctagctgatgaaaaactttcaagctgtgtgacggagataccctgctgcagctctgcccgtactcatgatgataatgagagcgcaagatgtgtaatttgcctggaggattacaaattcgaggactctgtcgggaagctaaaatgcaatcacaagtatcacgcagactgcatcaagaaatggctgcaggtgaagaacgcttgcccagtctgcaaagcttctgcggcagatgacggcggaggcaccgaatgaagcgccctgccgcccccattcaccctatctcaggcgaagctgtactggctgatctggtttgctgtgtgtaaataatggtcctgaaacggattatttgtgagctgaattaaactcgacatgtaaatttaatcctcaagctagttgcaaattgatggcagcggttagccctacgtgtcagccgtctgacgtaactgcagagagaaaacgtttgcatgcatatgtacagctcgatccaatagaggttattaaatgttaacaatttattagttagttaagccgtctttacgacgtccatcgtca

SEQ ID NO: 59046 - DNA, 3028 bp, Zea Mays
cctccctggcccctaattgccccccggaagaagccgcaccaggagcaaattcctcctctctcgagggcggttgcgtgctcgcgtgaagaaggccggggccctatctctccgatcgcggtagggcgttcgcagcgccgattcgagccgacgattggccgtccgcgaaggtactatttgaacactgaactaaaaattggagtttcttttcttatttgacatcttgatgtgccaaaatcaagctctcgttaaaggtcaaacaaatgggcaaaatttgggctctttgattagttttttcagtgttaagtggtgaatctactgtggtaaatgggagagctgatccagttgatctatatgccttgtgaggactattttgtcctcaataagaatatatgttcaacatcactgttggacttgtgttgcccttagattgagatggtggcttctcttacaagattgtagcagccttttaactctcgaagagggggccccttcaattgtgagttttgagaagagccaattgctgctaccttcatatcattttgaggactggaaaaggtggaccagtgtcactcttagcatctaccacctagaactttagcccaatggtggtttatatgttgaaattcatcaagtataaaggcgagaagggtagtttcgttgcccacagttaacttgtagggagagaaatattgagatctgtggaaatattggctggagcagcagaatcactcaataattttgattttggatggtagaataggttggcgtaaatttggcaaaaagaacttaaacagttctttcacatcaaattagttgttctgaagattctttccaagtaaaaatcagcttatcatgtatgcttgggccatgaagtaacaattcttttgatcgctgaggatgtcatttgcagatagatattcaatgttgttggaaagagaaagatgctagttgaaaataggtgaattgatgatgttggaaacaagatgcatttattcataagacgaacaaagggacaacaatttcgaggaggaaccctttagctaggttgtgtgtgcatcattacatggacatgttaaacaaaatcaaatccccctgttcatgtgttatggcagggcatcatcataataacacacatgcctccaggatggatcatgtgaacaggttccagagtgaagcacagccttttggcccaaagttatttatgcattctagaactgatgcagcaaatggagctctaccatcaggttatgtgggcgcaccaataagaccaaatggcattccattctcaagtcacaccgggcaatctcatattcagcacagtgatgctcctggaaccatgcttgcatcctattctggctatcctcttgctggaagctccagtagcacctatgcaccacataatactcatcatctgcctgctttgagctatccacataggtctgatgataacttcattctgagttcccatatggatgacagaagggttgcactgaagcggagaaatccaattatttatccagtggatggagtcaataatgggagctgttatgctggcagttcatctaatcctcagttcccatgctacatgcctccaaatcctattcctgctcctgaaccctgccctcctcgaataacatcaaatatgggttcaagctactggactgatcagccctttggtagcaatggaggatctcagaggaatgtgagaggtcgccatgatcacaatcctatccatttgggacacaatccaggtgtagcttgcgcaacaagcagcactcatgggccaccacaccatgctaatgtaattggtcctcaaagtacagcagtgccacaaaatagagcatatttttctatacctccaagagtgactgccccaggcagcgatggaaactgtagcatggttttcagggaagggacatactactctgctccgcagaggaccaacataaatgccccccctgtcctagcacctcctggttcttctgatagtctacattttgtgcatggtgggtatgccccaagagcagcccctcctaacagcatcagcacatatcctgccccggcttttgcgactcctaacaactcagtgacagttacccatgagcctgatatcccttgctatcgacctgccgtccctggctatccgcctgctacctcagcagcagcagcagcagcaagtgttcatgctgaaggtgctgctgcatcttcgagacatctaggtcatgtggctctaggttccagtggtagtgcaaggagtagaaggctgagggattcataccatgcttttcgtccactggttattgaagaaaataacttgagaggaccagcaaccgagcgttttatgatgctaaatcagttatttatccatgaatcgagagaagattctgaccctcactgggacatgaggctggacattgatgatatgagttatgaggagctgctggctttgggagaacgaataggcaatgtcaacacgggcctagctgatgaaaaactttcaagctgtgtgacggagataccctgctgcagctctgcccgtactcatgatgataatgagagcgcaagatgtgtaatttgcctggaggattacaaattcgaggactctgtcgggaagctaaaatgcaatcacaagtatcacgcagactgcatcaagaaatggctgcaggtgaagaacgcttgcccagtctgcaaagcttctgcggcagatgacggcggaggcaccgaatgaagcgccctgccgcccccattcaccctatctcaggcgaagctgtactggctgatctggtttgctgtgtgtaaataatggtcctgaaacggattatttgtgagctgaattaaactcgacatgtaaatttaatcctcaagctagttgcaaattgatggcagcggttagccctacgtgtcagccgtctgacgtaactgcagagagaaaacgtttgcatgcatatgtacagctcgatccaatagaggttattaaatgttaacaatttattagttagttaagccgtctttacgacgtccatcgtca

SEQ ID NO: 59047 - DNA, 4533 bp, Zea Mays
cggaagaagccgcaccaggagcaaattcctcctctctcgagggcggttgcgtgctcgcgtgaagaaggccggggccctatctctccgatcgcggtagggcgttcgcagcgccgattcgagccgacgattggccgtccgcgaaggtactatttgaacactgaactaaaaattggagtttcttttcttatttgacatcttgatgtgccaaaatcaagctctcgttaaaggtcaaacaaatgggcaaaatttgggctctttgattagttttttcagtgttaagtggtgaatctactgtggtaaatgggagagctgatccagttgatctatatgccttgtgaggactattttgtcctcaataagaatatatgttcaacatcactgttggacttgtgttgcccttagattgagatggtggcttctcttacaagattgtagcagccttttaactctcgaagagggggccccttcaattgtgagttttgagaagagccaattgctgctaccttcatatcattttgaggactggaaaaggtggaccagtgtcactcttagcatctaccacctagaactttagcccaatggtggtttatatgttgaaattcatcaagtataaaggcgagaagggtagtttcgttgcccacagttaacttgtagggagagaaatattgagatctgtggaaatattggctggagcagcagaatcactcaataattttgattttggatggtagaataggttggcgtaaatttggcaaaaagaacttaaacagttctttcacatcaaattagttgttctgaagattctttccaagtaaaaatcagcttatcatgtatgcttgggccatgaagtaacaattcttttgatcgctgaggatgtcatttgcagatagatattcaatgttgttggaaagagaaagatgctagttgaaaataggtgaattgatgatgttggaaacaagatgcatttattcataagacgaacaaagggacaacaatttcgaggaggaaccctttagctaggttgtgtgtgcatcattacatggacatgtgtgtacctgaaatgctagtgctatatctacctgccttcatattttctggggcttctggagctgatagatagtgtcatactttctgccttatgtccatttactttctgtttaacagaattatgtacaatttattattagtttctctcccaatgactaagcccgtttgacgggcttttcactccatgtaaagaattagaagattctagccaatcttcttatgttcaatataatgtatatgaactgtactgtttgataagtgctgccatataatttagttgcacactgtttcagcttctttggttattactgtattcctgttgttatagatgtttgtattgctgtcaataagttctttgccttcgaaaattggtcctttcacctggtgttgcacagagtcctggtgttgtgctgaactaatgttgtaaggcaactgtctttgttggttaggtattatgattttcatacttgatactggactactaaaatagcatctgtaatttgatcctaatcaatggattgtatagatgcttatctagtatttttctatcacatagagaaaagacaatgcagtctagatatgctgcttgtaattatcttttctaaagcttgtctaagttaaacgctatatatatctactagtctctttgttatcttcaaacaaacatcatcgtttgatactattacgacaataaatgatctccaatcctttatattggaggaataataatatgtaacattggttgggtgtagagattacattatatacgtctctaaccctaataggctacatgtgctaggctaggtccatgacacacaaccatgaagaggacccagatccttcatcacgaactttggttgaagtgtgtgtgtttgtgcatatataaaatcttaggcaccataataacatgacgtatacataatggttctcttcaacttgcatctacattattgacataacataggtatcgtctagctacttggtgaataaaacttcagagaatcatattttgttgttttcatatggtaaattcatatgttctttctcttcaacttgcatctacattattggcataacataggtatcgtctagctacttggtgactaaaacttcagaaagtcatatttcgttattttcatatggtaaaatcatatgttctatcattacttgtcaggccaagttactgccataaccaaagctataaaggtttctaattcttgtattgaggtctaaaagtcagatctccaccatatatattttattttgtagcagactattatgcaagtatgatgatgattccttctctagtttaattctgtaaactacatactgtagtcaaaaagttttatgtttactttgttaattacgtcggcatggtttctagtcttcttggatatatgacgaggacttcatttgtgttgtgtgttgcaccaaagttaaataagacactggatatgatggaatatttgggttttggcactggcagctctagcctgtgtgactgtaatctcacatcttgcggttctaaggttaaacaaaatcaaatccccctgttcatgtgttatggcagggcatcatcataataacacacatgcctccaggatggatcatgtgaacaggttccagagtgaagcacagccttttggcccaaagttatttatgcattctagaactgatgcagcaaatggagctctaccatcaggttatgtgggcgcaccaataagaccaaatggcattccattctcaagtcacaccgggcaatctcatattcagcacagtgatgctcctggaaccatgcttgcatcctattctggctatcctcttgctggaagctccagtagcacctatgcaccacataatactcatcatctgcctgctttgagctatccacataggtctgatgataacttcattctgagttcccatatggatgacagaagggttgcactgaagcggagaaatccaattatttatccagtggatggagtcaataatgggagctgttatgctggcagttcatctaatcctcagttcccatgctacatgcctccaaatcctattcctgctcctgaaccctgccctcctcgaataacatcaaatatgggttcaagctactggactgatcagccctttggtagcaatggaggatctcagaggaatgtgagaggtcgccatgatcacaatcctatccatttgggacacaatccaggtgtagcttgcgcaacaagcagcactcatgggccaccacaccatgctaatgtaattggtcctcaaagtacagcagtgccacaaaatagagcatatttttctatacctccaagagtgactgccccaggcagcgatggaaactgtagcatggttttcagggaagggacatactactctgctccgcagaggaccaacataaatgccccccctgtcctagcacctcctggttcttctgatagtctacattttgtgcatggtgggtatgccccaagagcagcccctcctaacagcatcagcacatatcctgccccggcttttgcgactcctaacaactcagtgacagttacccatgagcctgatatcccttgctatcgacctgccgtccctggctatccgcctgctacctcagcagcagcagcagcagcaagtgttcatgctgaaggtgctgctgcatcttcgagacatctaggtcatgtggctctaggttccagtggtagtgcaaggagtagaaggctgagggattcataccatgcttttcgtccactggttattgaagaaaataacttgagaggaccagcaaccgagcgttttatgatgctaaatcagttatttatccatgaatcgagagaagattctgaccctcactgggacatgaggctggacattgatgatatgagttatgaggagctgctggctttgggagaacgaataggcaatgtcaacacgggcctagctgatgaaaaactttcaagctgtgtgacggagataccctgctgcagctctgcccgtactcatgatgataatgagagcgcaagatgtgtaatttgcctggaggattacaaattcgaggactctgtcgggaagctaaaatgcaatcacaagtatcacgcagactgcatcaagaaatggctgcaggtgaagaacgcttgcccagtctgcaaagcttctgcggcagatgacggcggaggcaccgaatgaagcgccctgccgcccccattcaccctatctcaggcgaagctgtactggctgatctggtttgctgtgtgtaaataatggtcctgaaacggattatttgtgagctgaattaaactcgacatgtaaatttaatcctcaagctagttgcaaattgatggcagcggttagccctacgtgtcagccgtctgacgtaactgcagagagaaaacgtttgcatgcatatgtacagctcgatccaatagaggttattaaatgttaacaatttattagttagttaagccgtctttacgacgtccatcgtca

SEQ ID NO: 59048 - DNA, 4890 bp, Zea Mays
cggaagaagccgcaccaggagcaaattcctcctctctcgagggcggttgcgtgctcgcgtgaagaaggccggggccctatctctccgatcgcggtagggcgttcgcagcgccgattcgagccgacgattggccgtccgcgaagccattaaattattcaaggtaccttttgatgcttcaatctgttttgaaaatatctaaattccattggacaaagaacacataagttctacactcggtttttctttagaagcagaagtactgaatctgttaaatggtacaacactgttgtcctttgctttgatggtaatgcatgaaattcgaacaccgacatgtcttctgcatcttcaggtttagtgagatctggcctctgcaatagtcacttccttgaaagcagatataaggattattatagttggagttcaatctttggggacatgaattgattctgttatttgtttgactccagtttggggcaatcacgggctttaggttgggtgaggtactatttgaacactgaactaaaaattggagtttcttttcttatttgacatcttgatgtgccaaaatcaagctctcgttaaaggtcaaacaaatgggcaaaatttgggctctttgattagttttttcagtgttaagtggtgaatctactgtggtaaatgggagagctgatccagttgatctatatgccttgtgaggactattttgtcctcaataagaatatatgttcaacatcactgttggacttgtgttgcccttagattgagatggtggcttctcttacaagattgtagcagccttttaactctcgaagagggggccccttcaattgtgagttttgagaagagccaattgctgctaccttcatatcattttgaggactggaaaaggtggaccagtgtcactcttagcatctaccacctagaactttagcccaatggtggtttatatgttgaaattcatcaagtataaaggcgagaagggtagtttcgttgcccacagttaacttgtagggagagaaatattgagatctgtggaaatattggctggagcagcagaatcactcaataattttgattttggatggtagaataggttggcgtaaatttggcaaaaagaacttaaacagttctttcacatcaaattagttgttctgaagattctttccaagtaaaaatcagcttatcatgtatgcttgggccatgaagtaacaattcttttgatcgctgaggatgtcatttgcagatagatattcaatgttgttggaaagagaaagatgctagttgaaaataggtgaattgatgatgttggaaacaagatgcatttattcataagacgaacaaagggacaacaatttcgaggaggaaccctttagctaggttgtgtgtgcatcattacatggacatgtgtgtacctgaaatgctagtgctatatctacctgccttcatattttctggggcttctggagctgatagatagtgtcatactttctgccttatgtccatttactttctgtttaacagaattatgtacaatttattattagtttctctcccaatgactaagcccgtttgacgggcttttcactccatgtaaagaattagaagattctagccaatcttcttatgttcaatataatgtatatgaactgtactgtttgataagtgctgccatataatttagttgcacactgtttcagcttctttggttattactgtattcctgttgttatagatgtttgtattgctgtcaataagttctttgccttcgaaaattggtcctttcacctggtgttgcacagagtcctggtgttgtgctgaactaatgttgtaaggcaactgtctttgttggttaggtattatgattttcatacttgatactggactactaaaatagcatctgtaatttgatcctaatcaatggattgtatagatgcttatctagtatttttctatcacatagagaaaagacaatgcagtctagatatgctgcttgtaattatcttttctaaagcttgtctaagttaaacgctatatatatctactagtctctttgttatcttcaaacaaacatcatcgtttgatactattacgacaataaatgatctccaatcctttatattggaggaataataatatgtaacattggttgggtgtagagattacattatatacgtctctaaccctaataggctacatgtgctaggctaggtccatgacacacaaccatgaagaggacccagatccttcatcacgaactttggttgaagtgtgtgtgtttgtgcatatataaaatcttaggcaccataataacatgacgtatacataatggttctcttcaacttgcatctacattattgacataacataggtatcgtctagctacttggtgaataaaacttcagagaatcatattttgttgttttcatatggtaaattcatatgttctttctcttcaacttgcatctacattattggcataacataggtatcgtctagctacttggtgactaaaacttcagaaagtcatatttcgttattttcatatggtaaaatcatatgttctatcattacttgtcaggccaagttactgccataaccaaagctataaaggtttctaattcttgtattgaggtctaaaagtcagatctccaccatatatattttattttgtagcagactattatgcaagtatgatgatgattccttctctagtttaattctgtaaactacatactgtagtcaaaaagttttatgtttactttgttaattacgtcggcatggtttctagtcttcttggatatatgacgaggacttcatttgtgttgtgtgttgcaccaaagttaaataagacactggatatgatggaatatttgggttttggcactggcagctctagcctgtgtgactgtaatctcacatcttgcggttctaaggttaaacaaaatcaaatccccctgttcatgtgttatggcagggcatcatcataataacacacatgcctccaggatggatcatgtgaacaggttccagagtgaagcacagccttttggcccaaagttatttatgcattctagaactgatgcagcaaatggagctctaccatcaggttatgtgggcgcaccaataagaccaaatggcattccattctcaagtcacaccgggcaatctcatattcagcacagtgatgctcctggaaccatgcttgcatcctattctggctatcctcttgctggaagctccagtagcacctatgcaccacataatactcatcatctgcctgctttgagctatccacataggtctgatgataacttcattctgagttcccatatggatgacagaagggttgcactgaagcggagaaatccaattatttatccagtggatggagtcaataatgggagctgttatgctggcagttcatctaatcctcagttcccatgctacatgcctccaaatcctattcctgctcctgaaccctgccctcctcgaataacatcaaatatgggttcaagctactggactgatcagccctttggtagcaatggaggatctcagaggaatgtgagaggtcgccatgatcacaatcctatccatttgggacacaatccaggtgtagcttgcgcaacaagcagcactcatgggccaccacaccatgctaatgtaattggtcctcaaagtacagcagtgccacaaaatagagcatatttttctatacctccaagagtgactgccccaggcagcgatggaaactgtagcatggttttcagggaagggacatactactctgctccgcagaggaccaacataaatgccccccctgtcctagcacctcctggttcttctgatagtctacattttgtgcatggtgggtatgccccaagagcagcccctcctaacagcatcagcacatatcctgccccggcttttgcgactcctaacaactcagtgacagttacccatgagcctgatatcccttgctatcgacctgccgtccctggctatccgcctgctacctcagcagcagcagcagcagcaagtgttcatgctgaaggtgctgctgcatcttcgagacatctaggtcatgtggctctaggttccagtggtagtgcaaggagtagaaggctgagggattcataccatgcttttcgtccactggttattgaagaaaataacttgagaggaccagcaaccgagcgttttatgatgctaaatcagttatttatccatgaatcgagagaagattctgaccctcactgggacatgaggctggacattgatgatatgagttatgaggagctgctggctttgggagaacgaataggcaatgtcaacacgggcctagctgatgaaaaactttcaagctgtgtgacggagataccctgctgcagctctgcccgtactcatgatgataatgagagcgcaagatgtgtaatttgcctggaggattacaaattcgaggactctgtcgggaagctaaaatgcaatcacaagtatcacgcagactgcatcaagaaatggctgcaggtgaagaacgcttgcccagtctgcaaagcttctgcggcagatgacggcggaggcaccgaatgaagcgccctgccgcccccattcaccctatctcaggcgaagctgtactggctgatctggtttgctgtgtgtaaataatggtcctgaaacggattatttgtgagctgaattaaactcgacatgtaaatttaatcctcaagctagttgcaaattgatggcagcggttagccctacgtgtcagccgtctgacgtaactgcagagagaaaacgtttgcatgcatatgtacagctcgatccaatagaggttattaaatgttaacaatttattagttagttaagccgtctttacgacgtccatcgtca

SEQ ID NO: 59049 - DNA, 3128 bp, Zea Mays
cggaagaagccgcaccaggagcaaattcctcctctctcgagggcggttgcgtgctcgcgtgaagaaggccggggccctatctctccgatcgcggtagggcgttcgcagcgccgattcgagccgacgattggccgtccgcgaaggtttagtgagatctggcctctgcaatagtcacttccttgaaagcagatataaggattattatagttggagttcaatctttggggacatgaattgattctgttatttgtttgactccagtttggggcaatcacgggctttaggttgggtgaggtactatttgaacactgaactaaaaattggagtttcttttcttatttgacatcttgatgtgccaaaatcaagctctcgttaaaggtcaaacaaatgggcaaaatttgggctctttgattagttttttcagtgttaagtggtgaatctactgtggtaaatgggagagctgatccagttgatctatatgccttgtgaggactattttgtcctcaataagaatatatgttcaacatcactgttggacttgtgttgcccttagattgagatggtggcttctcttacaagattgtagcagccttttaactctcgaagagggggccccttcaattgtgagttttgagaagagccaattgctgctaccttcatatcattttgaggactggaaaaggtggaccagtgtcactcttagcatctaccacctagaactttagcccaatggtggtttatatgttgaaattcatcaagtataaaggcgagaagggtagtttcgttgcccacagttaacttgtagggagagaaatattgagatctgtggaaatattggctggagcagcagaatcactcaataattttgattttggatggtagaataggttggcgtaaatttggcaaaaagaacttaaacagttctttcacatcaaattagttgttctgaagattctttccaagtaaaaatcagcttatcatgtatgcttgggccatgaagtaacaattcttttgatcgctgaggatgtcatttgcagatagatattcaatgttgttggaaagagaaagatgctagttgaaaataggtgaattgatgatgttggaaacaagatgcatttattcataagacgaacaaagggacaacaatttcgaggaggaaccctttagctaggttaaacaaaatcaaatccccctgttcatgtgttatggcagggcatcatcataataacacacatgcctccaggatggatcatgtgaacaggttccagagtgaagcacagccttttggcccaaagttatttatgcattctagaactgatgcagcaaatggagctctaccatcaggttatgtgggcgcaccaataagaccaaatggcattccattctcaagtcacaccgggcaatctcatattcagcacagtgatgctcctggaaccatgcttgcatcctattctggctatcctcttgctggaagctccagtagcacctatgcaccacataatactcatcatctgcctgctttgagctatccacataggtctgatgataacttcattctgagttcccatatggatgacagaagggttgcactgaagcggagaaatccaattatttatccagtggatggagtcaataatgggagctgttatgctggcagttcatctaatcctcagttcccatgctacatgcctccaaatcctattcctgctcctgaaccctgccctcctcgaataacatcaaatatgggttcaagctactggactgatcagccctttggtagcaatggaggatctcagaggaatgtgagaggtcgccatgatcacaatcctatccatttgggacacaatccaggtgtagcttgcgcaacaagcagcactcatgggccaccacaccatgctaatgtaattggtcctcaaagtacagcagtgccacaaaatagagcatatttttctatacctccaagagtgactgccccaggcagcgatggaaactgtagcatggttttcagggaagggacatactactctgctccgcagaggaccaacataaatgccccccctgtcctagcacctcctggttcttctgatagtctacattttgtgcatggtgggtatgccccaagagcagcccctcctaacagcatcagcacatatcctgccccggcttttgcgactcctaacaactcagtgacagttacccatgagcctgatatcccttgctatcgacctgccgtccctggctatccgcctgctacctcagcagcagcagcagcagcaagtgttcatgctgaaggtgctgctgcatcttcgagacatctaggtcatgtggctctaggttccagtggtagtgcaaggagtagaaggctgagggattcataccatgcttttcgtccactggttattgaagaaaataacttgagaggaccagcaaccgagcgttttatgatgctaaatcagttatttatccatgaatcgagagaagattctgaccctcactgggacatgaggctggacattgatgatatgagttatgaggagctgctggctttgggagaacgaataggcaatgtcaacacgggcctagctgatgaaaaactttcaagctgtgtgacggagataccctgctgcagctctgcccgtactcatgatgataatgagagcgcaagatgtgtaatttgcctggaggattacaaattcgaggactctgtcgggaagctaaaatgcaatcacaagtatcacgcagactgcatcaagaaatggctgcaggtgaagaacgcttgcccagtctgcaaagcttctgcggcagatgacggcggaggcaccgaatgaagcgccctgccgcccccattcaccctatctcaggcgaagctgtactggctgatctggtttgctgtgtgtaaataatggtcctgaaacggattatttgtgagctgaattaaactcgacatgtaaatttaatcctcaagctagttgcaaattgatggcagcggttagccctacgtgtcagccgtctgacgtaactgcagagagaaaacgtttgcatgcatatgtacagctcgatccaatagaggttattaaatgttaacaatttattagttagttaagccgtctttacgacgtccatcgtca

SEQ ID NO: 59050 - DNA, 2064 bp, Zea Mays
cggaagaagccgcaccaggagcaaattcctcctctctcgagggcggttgcgtgctcgcgtgaagaaggccggggccctatctctccgatcgcggtagggcgttcgcagcgccgattcgagccgacgattggccgtccgcgaaggttaaacaaaatcaaatccccctgttcatgtgttatggcagggcatcatcataataacacacatgcctccaggatggatcatgtgaacaggttccagagtgaagcacagccttttgcaaatggagctctaccatcaggttatgtgggcgcaccaataagaccaaatggcattccattctcaagtcacaccgggcaatctcatattcagcacagtgatgctcctggaaccatgcttgcatcctattctggctatcctcttgctggaagctccagtagcacctatgcaccacataatactcatcatctgcctgctttgagctatccacataggtctgatgataacttcattctgagttcccatatggatgacagaagggttgcactgaagcggagaaatccaattatttatccagtggatggagtcaataatgggagctgttatgctggcagttcatctaatcctcagttcccatgctacatgcctccaaatcctattcctgctcctgaaccctgccctcctcgaataacatcaaatatgggttcaagctactggactgatcagccctttggtagcaatggaggatctcagaggaatgtgagaggtcgccatgatcacaatcctatccatttgggacacaatccaggtgtagcttgcgcaacaagcagcactcatgggccaccacaccatgctaatgtaattggtcctcaaagtacagcagtgccacaaaatagagcatatttttctatacctccaagagtgactgccccaggcagcgatggaaactgtagcatggttttcagggaagggacatactactctgctccgcagaggaccaacataaatgccccccctgtcctagcacctcctggttcttctgatagtctacattttgtgcatggtgggtatgccccaagagcagcccctcctaacagcatcagcacatatcctgccccggcttttgcgactcctaacaactcagtgacagttacccatgagcctgatatcccttgctatcgacctgccgtccctggctatccgcctgctacctcagcagcagcagcagcagcaagtgttcatgctgaaggtgctgctgcatcttcgagacatctaggtcatgtggctctaggttccagtggtagtgcaaggagtagaaggctgagggattcataccatgcttttcgtccactggttattgaagaaaataacttgagaggaccagcaaccgagcgttttatgatgctaaatcagttatttatccatgaatcgagagaagattctgaccctcactgggacatgaggctggacattgatgatatgagttatgaggagctgctggctttgggagaacgaataggcaatgtcaacacgggcctagctgatgaaaaactttcaagctgtgtgacggagataccctgctgcagctctgcccgtactcatgatgataatgagagcgcaagatgtgtaatttgcctggaggattacaaattcgaggactctgtcgggaagctaaaatgcaatcacaagtatcacgcagactgcatcaagaaatggctgcaggtgaagaacgcttgcccagtctgcaaagcttctgcggcagatgacggcggaggcaccgaatgaagcgccctgccgcccccattcaccctatctcaggcgaagctgtactggctgatctggtttgctgtgtgtaaataatggtcctgaaacggattatttgtgagctgaattaaactcgacatgtaaatttaatcctcaagctagttgcaaattgatggcagcggttagccctacgtgtcagccgtctgacgtaactgcagagagaaaacgtttgcatgcatatgtacagctcgatccaatagaggttattaaatgttaacaatttattagttagttaagccgtctttacgacgtccatcgtca

SEQ ID NO: 59051 - DNA, 2184 bp, Zea Mays
cggaagaagccgcaccaggagcaaattcctcctctctcgagggcggttgcgtgctcgcgtgaagaaggccggggccctatctctccgatcgcggtagggcgttcgcagcgccgattcgagccgacgattggccgtccgcgaaggtactatttgaacactgaactaaaaattggagtttcttttcttatttgacatcttgatgtgccaaaatcaagctctcgttaaaggttaaacaaaatcaaatccccctgttcatgtgttatggcagggcatcatcataataacacacatgcctccaggatggatcatgtgaacaggttccagagtgaagcacagccttttggcccaaagttatttatgcattctagaactgatgcagcaaatggagctctaccatcaggttatgtgggcgcaccaataagaccaaatggcattccattctcaagtcacaccgggcaatctcatattcagcacagtgatgctcctggaaccatgcttgcatcctattctggctatcctcttgctggaagctccagtagcacctatgcaccacataatactcatcatctgcctgctttgagctatccacataggtctgatgataacttcattctgagttcccatatggatgacagaagggttgcactgaagcggagaaatccaattatttatccagtggatggagtcaataatgggagctgttatgctggcagttcatctaatcctcagttcccatgctacatgcctccaaatcctattcctgctcctgaaccctgccctcctcgaataacatcaaatatgggttcaagctactggactgatcagccctttggtagcaatggaggatctcagaggaatgtgagaggtcgccatgatcacaatcctatccatttgggacacaatccaggtgtagcttgcgcaacaagcagcactcatgggccaccacaccatgctaatgtaattggtcctcaaagtacagcagtgccacaaaatagagcatatttttctatacctccaagagtgactgccccaggcagcgatggaaactgtagcatggttttcagggaagggacatactactctgctccgcagaggaccaacataaatgccccccctgtcctagcacctcctggttcttctgatagtctacattttgtgcatggtgggtatgccccaagagcagcccctcctaacagcatcagcacatatcctgccccggcttttgcgactcctaacaactcagtgacagttacccatgagcctgatatcccttgctatcgacctgccgtccctggctatccgcctgctacctcagcagcagcagcagcagcaagtgttcatgctgaaggtgctgctgcatcttcgagacatctaggtcatgtggctctaggttccagtggtagtgcaaggagtagaaggctgagggattcataccatgcttttcgtccactggttattgaagaaaataacttgagaggaccagcaaccgagcgttttatgatgctaaatcagttatttatccatgaatcgagagaagattctgaccctcactgggacatgaggctggacattgatgatatgagttatgaggagctgctggctttgggagaacgaataggcaatgtcaacacgggcctagctgatgaaaaactttcaagctgtgtgacggagataccctgctgcagctctgcccgtactcatgatgataatgagagcgcaagatgtgtaatttgcctggaggattacaaattcgaggactctgtcgggaagctaaaatgcaatcacaagtatcacgcagactgcatcaagaaatggctgcaggtgaagaacgcttgcccagtctgcaaagcttctgcggcagatgacggcggaggcaccgaatgaagcgccctgccgcccccattcaccctatctcaggcgaagctgtactggctgatctggtttgctgtgtgtaaataatggtcctgaaacggattatttgtgagctgaattaaactcgacatgtaaatttaatcctcaagctagttgcaaattgatggcagcggttagccctacgtgtcagccgtctgacgtaactgcagagagaaaacgtttgcatgcatatgtacagctcgatccaatagaggttattaaatgttaacaatttattagttagttaagccgtctttacgacgtccatcgtca

SEQ ID NO: 59052 - DNA, 3932 bp, Zea Mays
cggaagaagccgcaccaggagcaaattcctcctctctcgagggcggttgcgtgctcgcgtgaagaaggccggggccctatctctccgatcgcggtagggcgttcgcagcgccgattcgagccgacgattggccgtccgcgaagatagatattcaatgttgttggaaagagaaagatgctagttgaaaataggtgaattgatgatgttggaaacaagatgcatttattcataagacgaacaaagggacaacaatttcgaggaggaaccctttagctaggttgtgtgtgcatcattacatggacatgtgtgtacctgaaatgctagtgctatatctacctgccttcatattttctggggcttctggagctgatagatagtgtcatactttctgccttatgtccatttactttctgtttaacagaattatgtacaatttattattagtttctctcccaatgactaagcccgtttgacgggcttttcactccatgtaaagaattagaagattctagccaatcttcttatgttcaatataatgtatatgaactgtactgtttgataagtgctgccatataatttagttgcacactgtttcagcttctttggttattactgtattcctgttgttatagatgtttgtattgctgtcaataagttctttgccttcgaaaattggtcctttcacctggtgttgcacagagtcctggtgttgtgctgaactaatgttgtaaggcaactgtctttgttggttaggtattatgattttcatacttgatactggactactaaaatagcatctgtaatttgatcctaatcaatggattgtatagatgcttatctagtatttttctatcacatagagaaaagacaatgcagtctagatatgctgcttgtaattatcttttctaaagcttgtctaagttaaacgctatatatatctactagtctctttgttatcttcaaacaaacatcatcgtttgatactattacgacaataaatgatctccaatcctttatattggaggaataataatatgtaacattggttgggtgtagagattacattatatacgtctctaaccctaataggctacatgtgctaggctaggtccatgacacacaaccatgaagaggacccagatccttcatcacgaactttggttgaagtgtgtgtgtttgtgcatatataaaatcttaggcaccataataacatgacgtatacataatggttctcttcaacttgcatctacattattgacataacataggtatcgtctagctacttggtgaataaaacttcagagaatcatattttgttgttttcatatggtaaattcatatgttctttctcttcaacttgcatctacattattggcataacataggtatcgtctagctacttggtgactaaaacttcagaaagtcatatttcgttattttcatatggtaaaatcatatgttctatcattacttgtcaggccaagttactgccataaccaaagctataaaggtttctaattcttgtattgaggtctaaaagtcagatctccaccatatatattttattttgtagcagactattatgcaagtatgatgatgattccttctctagtttaattctgtaaactacatactgtagtcaaaaagttttatgtttactttgttaattacgtcggcatggtttctagtcttcttggatatatgacgaggacttcatttgtgttgtgtgttgcaccaaagttaaataagacactggatatgatggaatatttgggttttggcactggcagctctagcctgtgtgactgtaatctcacatcttgcggttctaaggtctgaatgattctttttagtttattacagaagtctaagtatttgtggttctctgtatatattttgtttctaaatctacaagtatatttgcagctgcaacttgcttttctagaatactaatgccaaccctatattttttcaggttaaacaaaatcaaatccccctgttcatgtgttatggcagggcatcatcataataacacacatgcctccaggatggatcatgtgaacaggttccagagtgaagcacagccttttggcccaaagttatttatgcattctagaactgatgcagcaaatggagctctaccatcaggttatgtgggcgcaccaataagaccaaatggcattccattctcaagtcacaccgggcaatctcatattcagcacagtgatgctcctggaaccatgcttgcatcctattctggctatcctcttgctggaagctccagtagcacctatgcaccacataatactcatcatctgcctgctttgagctatccacataggtctgatgataacttcattctgagttcccatatggatgacagaagggttgcactgaagcggagaaatccaattatttatccagtggatggagtcaataatgggagctgttatgctggcagttcatctaatcctcagttcccatgctacatgcctccaaatcctattcctgctcctgaaccctgccctcctcgaataacatcaaatatgggttcaagctactggactgatcagccctttggtagcaatggaggatctcagaggaatgtgagaggtcgccatgatcacaatcctatccatttgggacacaatccaggtgtagcttgcgcaacaagcagcactcatgggccaccacaccatgctaatgtaattggtcctcaaagtacagcagtgccacaaaatagagcatatttttctatacctccaagagtgactgccccaggcagcgatggaaactgtagcatggttttcagggaagggacatactactctgctccgcagaggaccaacataaatgccccccctgtcctagcacctcctggttcttctgatagtctacattttgtgcatggtgggtatgccccaagagcagcccctcctaacagcatcagcacatatcctgccccggcttttgcgactcctaacaactcagtgacagttacccatgagcctgatatcccttgctatcgacctgccgtccctggctatccgcctgctacctcagcagcagcagcagcagcaagtgttcatgctgaaggtgctgctgcatcttcgagacatctaggtcatgtggctctaggttccagtggtagtgcaaggagtagaaggctgagggattcataccatgcttttcgtccactggttattgaagaaaataacttgagaggaccagcaaccgagcgttttatgatgctaaatcagttatttatccatgaatcgagagaagattctgaccctcactgggacatgaggctggacattgatgatatgagttatgaggagctgctggctttgggagaacgaataggcaatgtcaacacgggcctagctgatgaaaaactttcaagctgtgtgacggagataccctgctgcagctctgcccgtactcatgatgataatgagagcgcaagatgtgtaatttgcctggaggattacaaattcgaggactctgtcgggaagctaaaatgcaatcacaagtatcacgcagactgcatcaagaaatggctgcaggtgaagaacgcttgcccagtctgcaaagcttctgcggcagatgacggcggaggcaccgaatgaagcgccctgccgcccccattcaccctatctcaggcgaagctgtactggctgatctggtttgctgtgtgtaaataatggtcctgaaacggattatttgtgagctgaattaaactcgacatgtaaatttaatcctcaagctagttgcaaattgatggcagcggttagccctacgtgtcagccgtctgacgtaactgcagagagaaaacgtttgcatgcatatgtacagctcgatccaatagaggttattaaatgttaacaatttattagttagttaagccgtctttacgacgtccatcgtca

SEQ ID NO: 59053 - DNA, 3450 bp, Zea Mays
cggaagaagccgcaccaggagcaaattcctcctctctcgagggcggttgcgtgctcgcgtgaagaaggccggggccctatctctccgatcgcggtagggcgttcgcagcgccgattcgagccgacgattggccgtccgcgaagccattaaattattcaaggtaccttttgatgcttcaatctgttttgaaaatatctaaattccattggacaaagaacacataagttctacactcggtttttctttagaagcagaagtactgaatctgttaaatggtacaacactgttgtcctttgctttgatggtaatgcatgaaattcgaacaccgacatgtcttctgcatcttcaggtatctttattggtatttaaagactatatatacaatattatgttttattataaatggcacaaaaaccaatatttcttatgggaatgcaggtttagtgagatctggcctctgcaatagtcacttccttgaaagcagatataaggattattatagttggagttcaatctttggggacatgaattgattctgttatttgtttgactccagtttggggcaatcacgggctttaggttgggtgaggtactatttgaacactgaactaaaaattggagtttcttttcttatttgacatcttgatgtgccaaaatcaagctctcgttaaaggtcaaacaaatgggcaaaatttgggctctttgattagttttttcagtgttaagtggtgaatctactgtggtaaatgggagagctgatccagttgatctatatgccttgtgaggactattttgtcctcaataagaatatatgttcaacatcactgttggacttgtgttgcccttagattgagatggtggcttctcttacaagattgtagcagccttttaactctcgaagagggggccccttcaattgtgagttttgagaagagccaattgctgctaccttcatatcattttgaggactggaaaaggtggaccagtgtcactcttagcatctaccacctagaactttagcccaatggtggtttatatgttgaaattcatcaagtataaaggcgagaagggtagtttcgttgcccacagttaacttgtagggagagaaatattgagatctgtggaaatattggctggagcagcagaatcactcaataattttgattttggatggtagaataggttggcgtaaatttggcaaaaagaacttaaacagttctttcacatcaaattagttgttctgaagattctttccaagtaaaaatcagcttatcatgtatgcttgggccatgaagtaacaattcttttgatcgctgaggatgtcatttgcagatagatattcaatgttgttggaaagagaaagatgctagttgaaaataggtgaattgatgatgttggaaacaagatgcatttattcataagacgaacaaagggacaacaatttcgaggaggaaccctttagctaggttgtgtgtgcatcattacatggacatgttaaacaaaatcaaatccccctgttcatgtgttatggcagggcatcatcataataacacacatgcctccaggatggatcatgtgaacaggttccagagtgaagcacagccttttggcccaaagttatttatgcattctagaactgatgcagcaaatggagctctaccatcaggttatgtgggcgcaccaataagaccaaatggcattccattctcaagtcacaccgggcaatctcatattcagcacagtgatgctcctggaaccatgcttgcatcctattctggctatcctcttgctggaagctccagtagcacctatgcaccacataatactcatcatctgcctgctttgagctatccacataggtctgatgataacttcattctgagttcccatatggatgacagaagggttgcactgaagcggagaaatccaattatttatccagtggatggagtcaataatgggagctgttatgctggcagttcatctaatcctcagttcccatgctacatgcctccaaatcctattcctgctcctgaaccctgccctcctcgaataacatcaaatatgggttcaagctactggactgatcagccctttggtagcaatggaggatctcagaggaatgtgagaggtcgccatgatcacaatcctatccatttgggacacaatccaggtgtagcttgcgcaacaagcagcactcatgggccaccacaccatgctaatgtaattggtcctcaaagtacagcagtgccacaaaatagagcatatttttctatacctccaagagtgactgccccaggcagcgatggaaactgtagcatggttttcagggaagggacatactactctgctccgcagaggaccaacataaatgccccccctgtcctagcacctcctggttcttctgatagtctacattttgtgcatggtgggtatgccccaagagcagcccctcctaacagcatcagcacatatcctgccccggcttttgcgactcctaacaactcagtgacagttacccatgagcctgatatcccttgctatcgacctgccgtccctggctatccgcctgctacctcagcagcagcagcagcagcaagtgttcatgctgaaggtgctgctgcatcttcgagacatctaggtcatgtggctctaggttccagtggtagtgcaaggagtagaaggctgagggattcataccatgcttttcgtccactggttattgaagaaaataacttgagaggaccagcaaccgagcgttttatgatgctaaatcagttatttatccatgaatcgagagaagattctgaccctcactgggacatgaggctggacattgatgatatgagttatgaggagctgctggctttgggagaacgaataggcaatgtcaacacgggcctagctgatgaaaaactttcaagctgtgtgacggagataccctgctgcagctctgcccgtactcatgatgataatgagagcgcaagatgtgtaatttgcctggaggattacaaattcgaggactctgtcgggaagctaaaatgcaatcacaagtatcacgcagactgcatcaagaaatggctgcaggtgaagaacgcttgcccagtctgcaaagcttctgcggcagatgacggcggaggcaccgaatgaagcgccctgccgcccccattcaccctatctcaggcgaagctgtactggctgatctggtttgctgtgtgtaaataatggtcctgaaacggattatttgtgagctgaattaaactcgacatgtaaatttaatcctcaagctagttgcaaattgatggcagcggttagccctacgtgtcagccgtctgacgtaactgcagagagaaaacgtttgcatgcatatgtacagctcgatccaatagaggttattaaatgttaacaatttattagttagttaagccgtctttacgacgtccatcgtca

SEQ ID NO: 59054 - DNA, 3470 bp, Zea Mays
cggaagaagccgcaccaggagcaaattcctcctctctcgagggcggttgcgtgctcgcgtgaagaaggccggggccctatctctccgatcgcggtagggcgttcgcagcgccgattcgagccgacgattggccgtccgcgaaggtttagtgagatctggcctctgcaatagtcacttccttgaaagcagatataaggattattatagttggagttcaatctttggggacatgaattgattctgttatttgtttgactccagtttggggcaatcacgggctttaggttgggtgaggtattgttgtttcaatgaattcaggtactcaggttagtgatagtttcagaatattgtagttacattgtggcggtgagtaagctcttaagtcttaactcatgatgagaaccttaattcattgggtactacatttactccttttttagaaaaaatatacatttatgtttttctttcttcccttagagtccatagcctgatatgcgtatttccttctctgtagctcttccattgtccaactgaactttggaagttcttctagagaattatctagctctcagtttttttcagatatttgcatttattacttcaaaaatttgaattgttctattaatgacattgcaggtactatttgaacactgaactaaaaattggagtttcttttcttatttgacatcttgatgtgccaaaatcaagctctcgttaaaggtcaaacaaatgggcaaaatttgggctctttgattagttttttcagtgttaagtggtgaatctactgtggtaaatgggagagctgatccagttgatctatatgccttgtgaggactattttgtcctcaataagaatatatgttcaacatcactgttggacttgtgttgcccttagattgagatggtggcttctcttacaagattgtagcagccttttaactctcgaagagggggccccttcaattgtgagttttgagaagagccaattgctgctaccttcatatcattttgaggactggaaaaggtggaccagtgtcactcttagcatctaccacctagaactttagcccaatggtggtttatatgttgaaattcatcaagtataaaggcgagaagggtagtttcgttgcccacagttaacttgtagggagagaaatattgagatctgtggaaatattggctggagcagcagaatcactcaataattttgattttggatggtagaataggttggcgtaaatttggcaaaaagaacttaaacagttctttcacatcaaattagttgttctgaagattctttccaagtaaaaatcagcttatcatgtatgcttgggccatgaagtaacaattcttttgatcgctgaggatgtcatttgcagatagatattcaatgttgttggaaagagaaagatgctagttgaaaataggtgaattgatgatgttggaaacaagatgcatttattcataagacgaacaaagggacaacaatttcgaggaggaaccctttagctaggttaaacaaaatcaaatccccctgttcatgtgttatggcagggcatcatcataataacacacatgcctccaggatggatcatgtgaacaggttccagagtgaagcacagccttttggcccaaagttatttatgcattctagaactgatgcagcaaatggagctctaccatcaggttatgtgggcgcaccaataagaccaaatggcattccattctcaagtcacaccgggcaatctcatattcagcacagtgatgctcctggaaccatgcttgcatcctattctggctatcctcttgctggaagctccagtagcacctatgcaccacataatactcatcatctgcctgctttgagctatccacataggtctgatgataacttcattctgagttcccatatggatgacagaagggttgcactgaagcggagaaatccaattatttatccagtggatggagtcaataatgggagctgttatgctggcagttcatctaatcctcagttcccatgctacatgcctccaaatcctattcctgctcctgaaccctgccctcctcgaataacatcaaatatgggttcaagctactggactgatcagccctttggtagcaatggaggatctcagaggaatgtgagaggtcgccatgatcacaatcctatccatttgggacacaatccaggtgtagcttgcgcaacaagcagcactcatgggccaccacaccatgctaatgtaattggtcctcaaagtacagcagtgccacaaaatagagcatatttttctatacctccaagagtgactgccccaggcagcgatggaaactgtagcatggttttcagggaagggacatactactctgctccgcagaggaccaacataaatgccccccctgtcctagcacctcctggttcttctgatagtctacattttgtgcatggtgggtatgccccaagagcagcccctcctaacagcatcagcacatatcctgccccggcttttgcgactcctaacaactcagtgacagttacccatgagcctgatatcccttgctatcgacctgccgtccctggctatccgcctgctacctcagcagcagcagcagcagcaagtgttcatgctgaaggtgctgctgcatcttcgagacatctaggtcatgtggctctaggttccagtggtagtgcaaggagtagaaggctgagggattcataccatgcttttcgtccactggttattgaagaaaataacttgagaggaccagcaaccgagcgttttatgatgctaaatcagttatttatccatgaatcgagagaagattctgaccctcactgggacatgaggctggacattgatgatatgagttatgaggagctgctggctttgggagaacgaataggcaatgtcaacacgggcctagctgatgaaaaactttcaagctgtgtgacggagataccctgctgcagctctgcccgtactcatgatgataatgagagcgcaagatgtgtaatttgcctggaggattacaaattcgaggactctgtcgggaagctaaaatgcaatcacaagtatcacgcagactgcatcaagaaatggctgcaggtgaagaacgcttgcccagtctgcaaagcttctgcggcagatgacggcggaggcaccgaatgaagcgccctgccgcccccattcaccctatctcaggcgaagctgtactggctgatctggtttgctgtgtgtaaataatggtcctgaaacggattatttgtgagctgaattaaactcgacatgtaaatttaatcctcaagctagttgcaaattgatggcagcggttagccctacgtgtcagccgtctgacgtaactgcagagagaaaacgtttgcatgcatatgtacagctcgatccaatagaggttattaaatgttaacaatttattagttagttaagccgtctttacgacgtccatcgtca

SEQ ID NO: 59055 - DNA, 5168 bp, Zea Mays
cggaagaagccgcaccaggagcaaattcctcctctctcgagggcggttgcgtgctcgcgtgaagaaggccggggccctatctctccgatcgcggtagggcgttcgcagcgccgattcgagccgacgattggccgtccgcgaaggtttagtgagatctggcctctgcaatagtcacttccttgaaagcagatataaggattattatagttggagttcaatctttggggacatgaattgattctgttatttgtttgactccagtttggggcaatcacgggctttaggttgggtgaggtattgttgtttcaatgaattcaggtactcaggttagtgatagtttcagaatattgtagttacattgtggcggtgagtaagctcttaagtcttaactcatgatgagaaccttaattcattgggtactacatttactccttttttagaaaaaatatacatttatgtttttctttcttcccttagagtccatagcctgatatgcgtatttccttctctgtagctcttccattgtccaactgaactttggaagttcttctagagaattatctagctctcagtttttttcagatatttgcatttattacttcaaaaatttgaattgttctattaatgacattgcaggtactatttgaacactgaactaaaaattggagtttcttttcttatttgacatcttgatgtgccaaaatcaagctctcgttaaaggtcaaacaaatgggcaaaatttgggctctttgattagttttttcagtgttaagtggtgaatctactgtggtaaatgggagagctgatccagttgatctatatgccttgtgaggactattttgtcctcaataagaatatatgttcaacatcactgttggacttgtgttgcccttagattgagatggtggcttctcttacaagattgtagcagccttttaactctcgaagagggggccccttcaattgtgagttttgagaagagccaattgctgctaccttcatatcattttgaggactggaaaaggtggaccagtgtcactcttagcatctaccacctagaactttagcccaatggtggtttatatgttgaaattcatcaagtataaaggcgagaagggtagtttcgttgcccacagttaacttgtagggagagaaatattgagatctgtggaaatattggctggagcagcagaatcactcaataattttgattttggatggtagaataggttggcgtaaatttggcaaaaagaacttaaacagttctttcacatcaaattagttgttctgaagattctttccaagtaaaaatcagcttatcatgtatgcttgggccatgaagtaacaattcttttgatcgctgaggatgtcatttgcagatagatattcaatgttgttggaaagagaaagatgctagttgaaaataggtgaattgatgatgttggaaacaagatgcatttattcataagacgaacaaagggacaacaatttcgaggaggaaccctttagctaggttgtgtgtgcatcattacatggacatgtgtgtacctgaaatgctagtgctatatctacctgccttcatattttctggggcttctggagctgatagatagtgtcatactttctgccttatgtccatttactttctgtttaacagaattatgtacaatttattattagtttctctcccaatgactaagcccgtttgacgggcttttcactccatgtaaagaattagaagattctagccaatcttcttatgttcaatataatgtatatgaactgtactgtttgataagtgctgccatataatttagttgcacactgtttcagcttctttggttattactgtattcctgttgttatagatgtttgtattgctgtcaataagttctttgccttcgaaaattggtcctttcacctggtgttgcacagagtcctggtgttgtgctgaactaatgttgtaaggcaactgtctttgttggttaggtattatgattttcatacttgatactggactactaaaatagcatctgtaatttgatcctaatcaatggattgtatagatgcttatctagtatttttctatcacatagagaaaagacaatgcagtctagatatgctgcttgtaattatcttttctaaagcttgtctaagttaaacgctatatatatctactagtctctttgttatcttcaaacaaacatcatcgtttgatactattacgacaataaatgatctccaatcctttatattggaggaataataatatgtaacattggttgggtgtagagattacattatatacgtctctaaccctaataggctacatgtgctaggctaggtccatgacacacaaccatgaagaggacccagatccttcatcacgaactttggttgaagtgtgtgtgtttgtgcatatataaaatcttaggcaccataataacatgacgtatacataatggttctcttcaacttgcatctacattattgacataacataggtatcgtctagctacttggtgaataaaacttcagagaatcatattttgttgttttcatatggtaaattcatatgttctttctcttcaacttgcatctacattattggcataacataggtatcgtctagctacttggtgactaaaacttcagaaagtcatatttcgttattttcatatggtaaaatcatatgttctatcattacttgtcaggccaagttactgccataaccaaagctataaaggtttctaattcttgtattgaggtctaaaagtcagatctccaccatatatattttattttgtagcagactattatgcaagtatgatgatgattccttctctagtttaattctgtaaactacatactgtagtcaaaaagttttatgtttactttgttaattacgtcggcatggtttctagtcttcttggatatatgacgaggacttcatttgtgttgtgtgttgcaccaaagttaaataagacactggatatgatggaatatttgggttttggcactggcagctctagcctgtgtgactgtaatctcacatcttgcggttctaaggtctgaatgattctttttagtttattacagaagtctaagtatttgtggttctctgtatatattttgtttctaaatctacaagtatatttgcagctgcaacttgcttttctagaatactaatgccaaccctatattttttcaggttaaacaaaatcaaatccccctgttcatgtgttatggcagggcatcatcataataacacacatgcctccaggatggatcatgtgaacaggttccagagtgaagcacagccttttggcccaaagttatttatgcattctagaactgatgcagcaaatggagctctaccatcaggttatgtgggcgcaccaataagaccaaatggcattccattctcaagtcacaccgggcaatctcatattcagcacagtgatgctcctggaaccatgcttgcatcctattctggctatcctcttgctggaagctccagtagcacctatgcaccacataatactcatcatctgcctgctttgagctatccacataggtctgatgataacttcattctgagttcccatatggatgacagaagggttgcactgaagcggagaaatccaattatttatccagtggatggagtcaataatgggagctgttatgctggcagttcatctaatcctcagttcccatgctacatgcctccaaatcctattcctgctcctgaaccctgccctcctcgaataacatcaaatatgggttcaagctactggactgatcagccctttggtagcaatggaggatctcagaggaatgtgagaggtcgccatgatcacaatcctatccatttgggacacaatccaggtgtagcttgcgcaacaagcagcactcatgggccaccacaccatgctaatgtaattggtcctcaaagtacagcagtgccacaaaatagagcatatttttctatacctccaagagtgactgccccaggcagcgatggaaactgtagcatggttttcagggaagggacatactactctgctccgcagaggaccaacataaatgccccccctgtcctagcacctcctggttcttctgatagtctacattttgtgcatggtgggtatgccccaagagcagcccctcctaacagcatcagcacatatcctgccccggcttttgcgactcctaacaactcagtgacagttacccatgagcctgatatcccttgctatcgacctgccgtccctggctatccgcctgctacctcagcagcagcagcagcagcaagtgttcatgctgaaggtgctgctgcatcttcgagacatctaggtcatgtggctctaggttccagtggtagtgcaaggagtagaaggctgagggattcataccatgcttttcgtccactggttattgaagaaaataacttgagaggaccagcaaccgagcgttttatgatgctaaatcagttatttatccatgaatcgagagaagattctgaccctcactgggacatgaggctggacattgatgatatgagttatgaggagctgctggctttgggagaacgaataggcaatgtcaacacgggcctagctgatgaaaaactttcaagctgtgtgacggagataccctgctgcagctctgcccgtactcatgatgataatgagagcgcaagatgtgtaatttgcctggaggattacaaattcgaggactctgtcgggaagctaaaatgcaatcacaagtatcacgcagactgcatcaagaaatggctgcaggtgaagaacgcttgcccagtctgcaaagcttctgcggcagatgacggcggaggcaccgaatgaagcgccctgccgcccccattcaccctatctcaggcgaagctgtactggctgatctggtttgctgtgtgtaaataatggtcctgaaacggattatttgtgagctgaattaaactcgacatgtaaatttaatcctcaagctagttgcaaattgatggcagcggttagccctacgtgtcagccgtctgacgtaactgcagagagaaaacgtttgcatgcatatgtacagctcgatccaatagaggttattaaatgttaacaatttattagttagttaagccgtctttacgacgtccatcgtca

SEQ ID NO: 59056 - DNA, 2100 bp, Zea Mays
cggaagaagccgcaccaggagcaaattcctcctctctcgagggcggttgcgtgctcgcgtgaagaaggccggggccctatctctccgatcgcggtagggcgttcgcagcgccgattcgagccgacgattggccgtccgcgaaggttaaacaaaatcaaatccccctgttcatgtgttatggcagggcatcatcataataacacacatgcctccaggatggatcatgtgaacaggttccagagtgaagcacagccttttggcccaaagttatttatgcattctagaactgatgcagcaaatggagctctaccatcaggttatgtgggcgcaccaataagaccaaatggcattccattctcaagtcacaccgggcaatctcatattcagcacagtgatgctcctggaaccatgcttgcatcctattctggctatcctcttgctggaagctccagtagcacctatgcaccacataatactcatcatctgcctgctttgagctatccacataggtctgatgataacttcattctgagttcccatatggatgacagaagggttgcactgaagcggagaaatccaattatttatccagtggatggagtcaataatgggagctgttatgctggcagttcatctaatcctcagttcccatgctacatgcctccaaatcctattcctgctcctgaaccctgccctcctcgaataacatcaaatatgggttcaagctactggactgatcagccctttggtagcaatggaggatctcagaggaatgtgagaggtcgccatgatcacaatcctatccatttgggacacaatccaggtgtagcttgcgcaacaagcagcactcatgggccaccacaccatgctaatgtaattggtcctcaaagtacagcagtgccacaaaatagagcatatttttctatacctccaagagtgactgccccaggcagcgatggaaactgtagcatggttttcagggaagggacatactactctgctccgcagaggaccaacataaatgccccccctgtcctagcacctcctggttcttctgatagtctacattttgtgcatggtgggtatgccccaagagcagcccctcctaacagcatcagcacatatcctgccccggcttttgcgactcctaacaactcagtgacagttacccatgagcctgatatcccttgctatcgacctgccgtccctggctatccgcctgctacctcagcagcagcagcagcagcaagtgttcatgctgaaggtgctgctgcatcttcgagacatctaggtcatgtggctctaggttccagtggtagtgcaaggagtagaaggctgagggattcataccatgcttttcgtccactggttattgaagaaaataacttgagaggaccagcaaccgagcgttttatgatgctaaatcagttatttatccatgaatcgagagaagattctgaccctcactgggacatgaggctggacattgatgatatgagttatgaggagctgctggctttgggagaacgaataggcaatgtcaacacgggcctagctgatgaaaaactttcaagctgtgtgacggagataccctgctgcagctctgcccgtactcatgatgataatgagagcgcaagatgtgtaatttgcctggaggattacaaattcgaggactctgtcgggaagctaaaatgcaatcacaagtatcacgcagactgcatcaagaaatggctgcaggtgaagaacgcttgcccagtctgcaaagcttctgcggcagatgacggcggaggcaccgaatgaagcgccctgccgcccccattcaccctatctcaggcgaagctgtactggctgatctggtttgctgtgtgtaaataatggtcctgaaacggattatttgtgagctgaattaaactcgacatgtaaatttaatcctcaagctagttgcaaattgatggcagcggttagccctacgtgtcagccgtctgacgtaactgcagagagaaaacgtttgcatgcatatgtacagctcgatccaatagaggttattaaatgttaacaatttattagttagttaagccgtctttacgacgtccatcgtca

SEQ ID NO: 59057 - DNA, 3160 bp, Zea Mays
cggaagaagccgcaccaggagcaaattcctcctctctcgagggcggttgcgtgctcgcgtgaagaaggccggggccctatctctccgatcgcggtagggcgttcgcagcgccgattcgagccgacgattggccgtccgcgaaggtttagtgagatctggcctctgcaatagtcacttccttgaaagcagatataaggattattatagttggagttcaatctttggggacatgaattgattctgttatttgtttgactccagtttggggcaatcacgggctttaggttgggtgaggtattgttgtttcaatgaattcaggtactcaggtactatttgaacactgaactaaaaattggagtttcttttcttatttgacatcttgatgtgccaaaatcaagctctcgttaaaggtcaaacaaatgggcaaaatttgggctctttgattagttttttcagtgttaagtggtgaatctactgtggtaaatgggagagctgatccagttgatctatatgccttgtgaggactattttgtcctcaataagaatatatgttcaacatcactgttggacttgtgttgcccttagattgagatggtggcttctcttacaagattgtagcagccttttaactctcgaagagggggccccttcaattgtgagttttgagaagagccaattgctgctaccttcatatcattttgaggactggaaaaggtggaccagtgtcactcttagcatctaccacctagaactttagcccaatggtggtttatatgttgaaattcatcaagtataaaggcgagaagggtagtttcgttgcccacagttaacttgtagggagagaaatattgagatctgtggaaatattggctggagcagcagaatcactcaataattttgattttggatggtagaataggttggcgtaaatttggcaaaaagaacttaaacagttctttcacatcaaattagttgttctgaagattctttccaagtaaaaatcagcttatcatgtatgcttgggccatgaagtaacaattcttttgatcgctgaggatgtcatttgcagatagatattcaatgttgttggaaagagaaagatgctagttgaaaataggtgaattgatgatgttggaaacaagatgcatttattcataagacgaacaaagggacaacaatttcgaggaggaaccctttagctaggttaaacaaaatcaaatccccctgttcatgtgttatggcagggcatcatcataataacacacatgcctccaggatggatcatgtgaacaggttccagagtgaagcacagccttttggcccaaagttatttatgcattctagaactgatgcagcaaatggagctctaccatcaggttatgtgggcgcaccaataagaccaaatggcattccattctcaagtcacaccgggcaatctcatattcagcacagtgatgctcctggaaccatgcttgcatcctattctggctatcctcttgctggaagctccagtagcacctatgcaccacataatactcatcatctgcctgctttgagctatccacataggtctgatgataacttcattctgagttcccatatggatgacagaagggttgcactgaagcggagaaatccaattatttatccagtggatggagtcaataatgggagctgttatgctggcagttcatctaatcctcagttcccatgctacatgcctccaaatcctattcctgctcctgaaccctgccctcctcgaataacatcaaatatgggttcaagctactggactgatcagccctttggtagcaatggaggatctcagaggaatgtgagaggtcgccatgatcacaatcctatccatttgggacacaatccaggtgtagcttgcgcaacaagcagcactcatgggccaccacaccatgctaatgtaattggtcctcaaagtacagcagtgccacaaaatagagcatatttttctatacctccaagagtgactgccccaggcagcgatggaaactgtagcatggttttcagggaagggacatactactctgctccgcagaggaccaacataaatgccccccctgtcctagcacctcctggttcttctgatagtctacattttgtgcatggtgggtatgccccaagagcagcccctcctaacagcatcagcacatatcctgccccggcttttgcgactcctaacaactcagtgacagttacccatgagcctgatatcccttgctatcgacctgccgtccctggctatccgcctgctacctcagcagcagcagcagcagcaagtgttcatgctgaaggtgctgctgcatcttcgagacatctaggtcatgtggctctaggttccagtggtagtgcaaggagtagaaggctgagggattcataccatgcttttcgtccactggttattgaagaaaataacttgagaggaccagcaaccgagcgttttatgatgctaaatcagttatttatccatgaatcgagagaagattctgaccctcactgggacatgaggctggacattgatgatatgagttatgaggagctgctggctttgggagaacgaataggcaatgtcaacacgggcctagctgatgaaaaactttcaagctgtgtgacggagataccctgctgcagctctgcccgtactcatgatgataatgagagcgcaagatgtgtaatttgcctggaggattacaaattcgaggactctgtcgggaagctaaaatgcaatcacaagtatcacgcagactgcatcaagaaatggctgcaggtgaagaacgcttgcccagtctgcaaagcttctgcggcagatgacggcggaggcaccgaatgaagcgccctgccgcccccattcaccctatctcaggcgaagctgtactggctgatctggtttgctgtgtgtaaataatggtcctgaaacggattatttgtgagctgaattaaactcgacatgtaaatttaatcctcaagctagttgcaaattgatggcagcggttagccctacgtgtcagccgtctgacgtaactgcagagagaaaacgtttgcatgcatatgtacagctcgatccaatagaggttattaaatgttaacaatttattagttagttaagccgtctttacgacgtccatcgtca

SEQ ID NO: 59058 - DNA, 7197 bp, Zea Mays
cggaagaagccgcaccaggagcaaattcctcctctctcgagggcggttgcgtgctcgcgtgaagaaggccggggccctatctctccgatcgcggtagggcgttcgcagcgccgattcgagccgacgattggccgtccgcgaaggtatacccctccgattcggcccccagccctgcttaaatccgcgtggtactcctatgcattcggcggtagcggcacttcctggtacagcctaccctgcgtgggtagtgggtggatgctcgtggaatttagggggagttgcaggatcggtgcgcccggttggggttctcgctgctgagtcgcagtaatggggatttgggggtcgctgttccctcctcgtcgtcttcatttcgtcgattagtgcgatttgagtgaaacggtacatcgattctgcgtgggaaagcgtggcggtaatcggtggtggttcttcatttcgcctcatattgtctgatttgtattctagctgttcgcttcatctctatcaccaaaatccctgttctttctatcataaaaaagaatacaatcccacatttcagcctctttatgtattttcagtgaattgattttacccaaatctatcaccaaactccagtttctacagacataggtcataggtctgccttggtttggctcgggggctcttgagttatgtcatttaggataggaaacacaacatcaacatcatcaacatagtcttttagtcccaagcaagttgaggtaggctagagttgaaacacaacaagatgttacaaaagagagagtgagaaagtggaggggaaaagctttttagagcactataaggaaaaatgcctaatcacggttcgggcacgtgggtagcttctttccaagcacttctattcaaacacaacttcattggtatattccattctttcaagtcccttttgattggctcctcccatgtcaagtttggtcgacctctacctctctcacattattgtccatcttatggtgtctatatgcaccggtgcctctagtggtctccggtggacatatccaaaccatctcaatcggtgttgaataagcttttcttcaattggcgctactcttagccgatcgcgtatgtcatcgtttctcactcggtccaatcttgtgtgcccacatatccaacgcaacatacgcatatctgcgacacttagttgttggctgtaccaaaacttgtcgtgttatgttcatgtttgggtgtgtcaaacaatccttagtcccaggtgatcaatatacatcaatgtgtctccctgttaccatctgttttgatcattgcctcttttatgacccttctttgagttgaccattctccattttcaaaattatgttactatagttcagttcatatctatacccttcaactgaagttatctgactgtatggatgactaattatcatctagcagtttgaggaatcatgtttcctgtcccagtttacttactctgtagctcatgcattttttaaccttcaagtggaagcatttggatatttagtttttaatccacatctgagtgaaattcatgactgatgattttgaccttgaagcttatgattgagtaattcttttctgtatctcctttgttgtttattagtcagtagaagaaactggtaaatatgtatccatattacaaatctgaatcgcgtttatctccacttgtcaatctgtgatgccaggatttatcatttcgttgaacacactttcttgttttgatataagcttaaacaagaatagccataatttagaagcaataacctagaattacatgttacatgctcacaagaaaaatatcatgcacatgacttatgctatatctaaggtttcgaacgtaccttctccctgtggcaccccaacagccattaaattattcaaggtaccttttgatgcttcaatctgttttgaaaatatctaaattccattggacaaagaacacataagttctacactcggtttttctttagaagcagaagtactgaatctgttaaatggtacaacactgttgtcctttgctttgatggtaatgcatgaaattcgaacaccgacatgtcttctgcatcttcaggtatctttattggtatttaaagactatatatacaatattatgttttattataaatggcacaaaaaccaatatttcttatgggaatgcaggtttagtgagatctggcctctgcaatagtcacttccttgaaagcagatataaggattattatagttggagttcaatctttggggacatgaattgattctgttatttgtttgactccagtttggggcaatcacgggctttaggttgggtgaggtattgttgtttcaatgaattcaggtactcaggttagtgatagtttcagaatattgtagttacattgtggcggtgagtaagctcttaagtcttaactcatgatgagaaccttaattcattgggtactacatttactccttttttagaaaaaatatacatttatgtttttctttcttcccttagagtccatagcctgatatgcgtatttccttctctgtagctcttccattgtccaactgaactttggaagttcttctagagaattatctagctctcagtttttttcagatatttgcatttattacttcaaaaatttgaattgttctattaatgacattgcaggtactatttgaacactgaactaaaaattggagtttcttttcttatttgacatcttgatgtgccaaaatcaagctctcgttaaaggtcaaacaaatgggcaaaatttgggctctttgattagttttttcagtgttaagtggtgaatctactgtggtaaatgggagagctgatccagttgatctatatgccttgtgaggactattttgtcctcaataagaatatatgttcaacatcactgttggacttgtgttgcccttagattgagatggtggcttctcttacaagattgtagcagccttttaactctcgaagagggggccccttcaattgtgagttttgagaagagccaattgctgctaccttcatatcattttgaggactggaaaaggtggaccagtgtcactcttagcatctaccacctagaactttagcccaatggtggtttatatgttgaaattcatcaagtataaaggcgagaagggtagtttcgttgcccacagttaacttgtagggagagaaatattgagatctgtggaaatattggctggagcagcagaatcactcaataattttgattttggatggtagaataggttggcgtaaatttggcaaaaagaacttaaacagttctttcacatcaaattagttgttctgaagattctttccaagtaaaaatcagcttatcatgtatgcttgggccatgaagtaacaattcttttgatcgctgaggatgtcatttgcagatagatattcaatgttgttggaaagagaaagatgctagttgaaaataggtgaattgatgatgttggaaacaagatgcatttattcataagacgaacaaagggacaacaatttcgaggaggaaccctttagctaggttgtgtgtgcatcattacatggacatgtgtgtacctgaaatgctagtgctatatctacctgccttcatattttctggggcttctggagctgatagatagtgtcatactttctgccttatgtccatttactttctgtttaacagaattatgtacaatttattattagtttctctcccaatgactaagcccgtttgacgggcttttcactccatgtaaagaattagaagattctagccaatcttcttatgttcaatataatgtatatgaactgtactgtttgataagtgctgccatataatttagttgcacactgtttcagcttctttggttattactgtattcctgttgttatagatgtttgtattgctgtcaataagttctttgccttcgaaaattggtcctttcacctggtgttgcacagagtcctggtgttgtgctgaactaatgttgtaaggcaactgtctttgttggttaggtattatgattttcatacttgatactggactactaaaatagcatctgtaatttgatcctaatcaatggattgtatagatgcttatctagtatttttctatcacatagagaaaagacaatgcagtctagatatgctgcttgtaattatcttttctaaagcttgtctaagttaaacgctatatatatctactagtctctttgttatcttcaaacaaacatcatcgtttgatactattacgacaataaatgatctccaatcctttatattggaggaataataatatgtaacattggttgggtgtagagattacattatatacgtctctaaccctaataggctacatgtgctaggctaggtccatgacacacaaccatgaagaggacccagatccttcatcacgaactttggttgaagtgtgtgtgtttgtgcatatataaaatcttaggcaccataataacatgacgtatacataatggttctcttcaacttgcatctacattattgacataacataggtatcgtctagctacttggtgaataaaacttcagagaatcatattttgttgttttcatatggtaaattcatatgttctttctcttcaacttgcatctacattattggcataacataggtatcgtctagctacttggtgactaaaacttcagaaagtcatatttcgttattttcatatggtaaaatcatatgttctatcattacttgtcaggccaagttactgccataaccaaagctataaaggtttctaattcttgtattgaggtctaaaagtcagatctccaccatatatattttattttgtagcagactattatgcaagtatgatgatgattccttctctagtttaattctgtaaactacatactgtagtcaaaaagttttatgtttactttgttaattacgtcggcatggtttctagtcttcttggatatatgacgaggacttcatttgtgttgtgtgttgcaccaaagttaaataagacactggatatgatggaatatttgggttttggcactggcagctctagcctgtgtgactgtaatctcacatcttgcggttctaaggtctgaatgattctttttagtttattacagaagtctaagtatttgtggttctctgtatatattttgtttctaaatctacaagtatatttgcagctgcaacttgcttttctagaatactaatgccaaccctatattttttcaggttaaacaaaatcaaatccccctgttcatgtgttatggcagggcatcatcataataacacacatgcctccaggatggatcatgtgaacaggttccagagtgaagcacagccttttggcccaaagttatttatgcattctagaactgatgcagcaaatggagctctaccatcaggttatgtgggcgcaccaataagaccaaatggcattccattctcaagtcacaccgggcaatctcatattcagcacagtgatgctcctggaaccatgcttgcatcctattctggctatcctcttgctggaagctccagtagcacctatgcaccacataatactcatcatctgcctgctttgagctatccacataggtctgatgataacttcattctgagttcccatatggatgacagaagggttgcactgaagcggagaaatccaattatttatccagtggatggagtcaataatgggagctgttatgctggcagttcatctaatcctcagttcccatgctacatgcctccaaatcctattcctgctcctgaaccctgccctcctcgaataacatcaaatatgggttcaagctactggactgatcagccctttggtagcaatggaggatctcagaggaatgtgagaggtcgccatgatcacaatcctatccatttgggacacaatccaggtgtagcttgcgcaacaagcagcactcatgggccaccacaccatgctaatgtaattggtcctcaaagtacagcagtgccacaaaatagagcatatttttctatacctccaagagtgactgccccaggcagcgatggaaactgtagcatggttttcagggaagggacatactactctgctccgcagaggaccaacataaatgccccccctgtcctagcacctcctggttcttctgatagtctacattttgtgcatggtgggtatgccccaagagcagcccctcctaacagcatcagcacatatcctgccccggcttttgcgactcctaacaactcagtgacagttacccatgagcctgatatcccttgctatcgacctgccgtccctggctatccgcctgctacctcagcagcagcagcagcagcaagtgttcatgctgaaggtgctgctgcatcttcgagacatctaggtcatgtggctctaggttccagtggtagtgcaaggagtagaaggctgagggattcataccatgcttttcgtccactggttattgaagaaaataacttgagaggaccagcaaccgagcgttttatgatgctaaatcagttatttatccatgaatcgagagaagattctgaccctcactgggacatgaggctggacattgatgatatgagttatgaggagctgctggctttgggagaacgaataggcaatgtcaacacgggcctagctgatgaaaaactttcaagctgtgtgacggagataccctgctgcagctctgcccgtactcatgatgataatgagagcgcaagatgtgtaatttgcctggaggattacaaattcgaggactctgtcgggaagctaaaatgcaatcacaagtatcacgcagactgcatcaagaaatggctgcaggtgaagaacgcttgcccagtctgcaaagcttctgcggcagatgacggcggaggcaccgaatgaagcgccctgccgcccccattcaccctatctcaggcgaagctgtactggctgatctggtttgctgtgtgtaaataatggtcctgaaacggattatttgtgagctgaattaaactcgacatgtaaatttaatcctcaagctagttgcaaattgatggcagcggttagccctacgtgtcagccgtctgacgtaactgcagagagaaaacgtttgcatgcatatgtacagctcgatccaatagaggttattaaatgttaacaatttattagttagttaagccgtctttacgacgtccatcgtca

SEQ ID NO: 59059 - DNA, 4843 bp, Zea Mays
agaacacataagttctacactcggtttttctttagaagcagaagtactgaatctgttaaatggtacaacactgttgtcctttgctttgatggtaatgcatgaaattcgaacaccgacatgtcttctgcatcttcaggtttagtgagatctggcctctgcaatagtcacttccttgaaagcagatataaggattattatagttggagttcaatctttggggacatgaattgattctgttatttgtttgactccagtttggggcaatcacgggctttaggttgggtgaggtattgttgtttcaatgaattcaggtactatttgaacactgaactaaaaattggagtttcttttcttatttgacatcttgatgtgccaaaatcaagctctcgttaaaggtcaaacaaatgggcaaaatttgggctctttgattagttttttcagtgttaagtggtgaatctactgtggtaaatgggagagctgatccagttgatctatatgccttgtgaggactattttgtcctcaataagaatatatgttcaacatcactgttggacttgtgttgcccttagattgagatggtggcttctcttacaagattgtagcagccttttaactctcgaagagggggccccttcaattgtgagttttgagaagagccaattgctgctaccttcatatcattttgaggactggaaaaggtggaccagtgtcactcttagcatctaccacctagaactttagcccaatggtggtttatatgttgaaattcatcaagtataaaggcgagaagggtagtttcgttgcccacagttaacttgtagggagagaaatattgagatctgtggaaatattggctggagcagcagaatcactcaataattttgattttggatggtagaataggttggcgtaaatttggcaaaaagaacttaaacagttctttcacatcaaattagttgttctgaagattctttccaagtaaaaatcagcttatcatgtatgcttgggccatgaagtaacaattcttttgatcgctgaggatgtcatttgcagatagatattcaatgttgttggaaagagaaagatgctagttgaaaataggtgaattgatgatgttggaaacaagatgcatttattcataagacgaacaaagggacaacaatttcgaggaggaaccctttagctaggttgtgtgtgcatcattacatggacatgtgtgtacctgaaatgctagtgctatatctacctgccttcatattttctggggcttctggagctgatagatagtgtcatactttctgccttatgtccatttactttctgtttaacagaattatgtacaatttattattagtttctctcccaatgactaagcccgtttgacgggcttttcactccatgtaaagaattagaagattctagccaatcttcttatgttcaatataatgtatatgaactgtactgtttgataagtgctgccatataatttagttgcacactgtttcagcttctttggttattactgtattcctgttgttatagatgtttgtattgctgtcaataagttctttgccttcgaaaattggtcctttcacctggtgttgcacagagtcctggtgttgtgctgaactaatgttgtaaggcaactgtctttgttggttaggtattatgattttcatacttgatactggactactaaaatagcatctgtaatttgatcctaatcaatggattgtatagatgcttatctagtatttttctatcacatagagaaaagacaatgcagtctagatatgctgcttgtaattatcttttctaaagcttgtctaagttaaacgctatatatatctactagtctctttgttatcttcaaacaaacatcatcgtttgatactattacgacaataaatgatctccaatcctttatattggaggaataataatatgtaacattggttgggtgtagagattacattatatacgtctctaaccctaataggctacatgtgctaggctaggtccatgacacacaaccatgaagaggacccagatccttcatcacgaactttggttgaagtgtgtgtgtttgtgcatatataaaatcttaggcaccataataacatgacgtatacataatggttctcttcaacttgcatctacattattgacataacataggtatcgtctagctacttggtgaataaaacttcagagaatcatattttgttgttttcatatggtaaattcatatgttctttctcttcaacttgcatctacattattggcataacataggtatcgtctagctacttggtgactaaaacttcagaaagtcatatttcgttattttcatatggtaaaatcatatgttctatcattacttgtcaggccaagttactgccataaccaaagctataaaggtttctaattcttgtattgaggtctaaaagtcagatctccaccatatatattttattttgtagcagactattatgcaagtatgatgatgattccttctctagtttaattctgtaaactacatactgtagtcaaaaagttttatgtttactttgttaattacgtcggcatggtttctagtcttcttggatatatgacgaggacttcatttgtgttgtgtgttgcaccaaagttaaataagacactggatatgatggaatatttgggttttggcactggcagctctagcctgtgtgactgtaatctcacatcttgcggttctaaggtctgaatgattctttttagtttattacagaagtctaagtatttgtggttctctgtatatattttgtttctaaatctacaagtatatttgcagctgcaacttgcttttctagaatactaatgccaaccctatattttttcaggttaaacaaaatcaaatccccctgttcatgtgttatggcagggcatcatcataataacacacatgcctccaggatggatcatgtgaacaggttccagagtgaagcacagccttttggcccaaagttatttatgcattctagaactgatgcagcaaatggagctctaccatcaggttatgtgggcgcaccaataagaccaaatggcattccattctcaagtcacaccgggcaatctcatattcagcacagtgatgctcctggaaccatgcttgcatcctattctggctatcctcttgctggaagctccagtagcacctatgcaccacataatactcatcatctgcctgctttgagctatccacataggtctgatgataacttcattctgagttcccatatggatgacagaagggttgcactgaagcggagaaatccaattatttatccagtggatggagtcaataatgggagctgttatgctggcagttcatctaatcctcagttcccatgctacatgcctccaaatcctattcctgctcctgaaccctgccctcctcgaataacatcaaatatgggttcaagctactggactgatcagccctttggtagcaatggaggatctcagaggaatgtgagaggtcgccatgatcacaatcctatccatttgggacacaatccaggtgtagcttgcgcaacaagcagcactcatgggccaccacaccatgctaatgtaattggtcctcaaagtacagcagtgccacaaaatagagcatatttttctatacctccaagagtgactgccccaggcagcgatggaaactgtagcatggttttcagggaagggacatactactctgctccgcagaggaccaacataaatgccccccctgtcctagcacctcctggttcttctgatagtctacattttgtgcatggtgggtatgccccaagagcagcccctcctaacagcatcagcacatatcctgccccggcttttgcgactcctaacaactcagtgacagttacccatgagcctgatatcccttgctatcgacctgccgtccctggctatccgcctgctacctcagcagcagcagcagcagcaagtgttcatgctgaaggtgctgctgcatcttcgagacatctaggtcatgtggctctaggttccagtggtagtgcaaggagtagaaggctgagggattcataccatgcttttcgtccactggttattgaagaaaataacttgagaggaccagcaaccgagcgttttatgatgctaaatcagttatttatccatgaatcgagagaagattctgaccctcactgggacatgaggctggacattgatgatatgagttatgaggagctgctggctttgggagaacgaataggcaatgtcaacacgggcctagctgatgaaaaactttcaagctgtgtgacggagataccctgctgcagctctgcccgtactcatgatgataatgagagcgcaagatgtgtaatttgcctggaggattacaaattcgaggactctgtcgggaagctaaaatgcaatcacaagtatcacgcagactgcatcaagaaatggctgcaggtgaagaacgcttgcccagtctgcaaagcttctgcggcagatgacggcggaggcaccgaatgaagcgccctgccgcccccattcaccctatctcaggcgaagctgtactggctgatctggtttgctgtgtgtaaataatggtcctgaaacggattatttgtgagctgaattaaactcgacatgtaaatttaatcctcaagctagttgcaaattgatggcagcggttagccctacgtgtcagccgtctgacgtaactgcagagagaaaacgtttgcatgcatatgtacagctcgatccaatagaggttattaaatgttaacaatttattagttagttaagccgtctttacgacgtccatcgtca

SEQ ID NO: 59060 - DNA, 3062 bp, Zea Mays
caccgacatgtcttctgcatcttcaggtttagtgagatctggcctctgcaatagtcacttccttgaaagcagatataaggattattatagttggagttcaatctttggggacatgaattgattctgttatttgtttgactccagtttggggcaatcacgggctttaggttgggtgaggtattgttgtttcaatgaattcaggtactatttgaacactgaactaaaaattggagtttcttttcttatttgacatcttgatgtgccaaaatcaagctctcgttaaaggtcaaacaaatgggcaaaatttgggctctttgattagttttttcagtgttaagtggtgaatctactgtggtaaatgggagagctgatccagttgatctatatgccttgtgaggactattttgtcctcaataagaatatatgttcaacatcactgttggacttgtgttgcccttagattgagatggtggcttctcttacaagattgtagcagccttttaactctcgaagagggggccccttcaattgtgagttttgagaagagccaattgctgctaccttcatatcattttgaggactggaaaaggtggaccagtgtcactcttagcatctaccacctagaactttagcccaatggtggtttatatgttgaaattcatcaagtataaaggcgagaagggtagtttcgttgcccacagttaacttgtagggagagaaatattgagatctgtggaaatattggctggagcagcagaatcactcaataattttgattttggatggtagaataggttggcgtaaatttggcaaaaagaacttaaacagttctttcacatcaaattagttgttctgaagattctttccaagtaaaaatcagcttatcatgtatgcttgggccatgaagtaacaattcttttgatcgctgaggatgtcatttgcagatagatattcaatgttgttggaaagagaaagatgctagttgaaaataggtgaattgatgatgttggaaacaagatgcatttattcataagacgaacaaagggacaacaatttcgaggaggaaccctttagctaggttgtgtgtgcatcattacatggacatgttaaacaaaatcaaatccccctgttcatgtgttatggcagggcatcatcataataacacacatgcctccaggatggatcatgtgaacaggttccagagtgaagcacagccttttggcccaaagttatttatgcattctagaactgatgcagcaaatggagctctaccatcaggttatgtgggcgcaccaataagaccaaatggcattccattctcaagtcacaccgggcaatctcatattcagcacagtgatgctcctggaaccatgcttgcatcctattctggctatcctcttgctggaagctccagtagcacctatgcaccacataatactcatcatctgcctgctttgagctatccacataggtctgatgataacttcattctgagttcccatatggatgacagaagggttgcactgaagcggagaaatccaattatttatccagtggatggagtcaataatgggagctgttatgctggcagttcatctaatcctcagttcccatgctacatgcctccaaatcctattcctgctcctgaaccctgccctcctcgaataacatcaaatatgggttcaagctactggactgatcagccctttggtagcaatggaggatctcagaggaatgtgagaggtcgccatgatcacaatcctatccatttgggacacaatccaggtgtagcttgcgcaacaagcagcactcatgggccaccacaccatgctaatgtaattggtcctcaaagtacagcagtgccacaaaatagagcatatttttctatacctccaagagtgactgccccaggcagcgatggaaactgtagcatggttttcagggaagggacatactactctgctccgcagaggaccaacataaatgccccccctgtcctagcacctcctggttcttctgatagtctacattttgtgcatggtgggtatgccccaagagcagcccctcctaacagcatcagcacatatcctgccccggcttttgcgactcctaacaactcagtgacagttacccatgagcctgatatcccttgctatcgacctgccgtccctggctatccgcctgctacctcagcagcagcagcagcagcaagtgttcatgctgaaggtgctgctgcatcttcgagacatctaggtcatgtggctctaggttccagtggtagtgcaaggagtagaaggctgagggattcataccatgcttttcgtccactggttattgaagaaaataacttgagaggaccagcaaccgagcgttttatgatgctaaatcagttatttatccatgaatcgagagaagattctgaccctcactgggacatgaggctggacattgatgatatgagttatgaggagctgctggctttgggagaacgaataggcaatgtcaacacgggcctagctgatgaaaaactttcaagctgtgtgacggagataccctgctgcagctctgcccgtactcatgatgataatgagagcgcaagatgtgtaatttgcctggaggattacaaattcgaggactctgtcgggaagctaaaatgcaatcacaagtatcacgcagactgcatcaagaaatggctgcaggtgaagaacgcttgcccagtctgcaaagcttctgcggcagatgacggcggaggcaccgaatgaagcgccctgccgcccccattcaccctatctcaggcgaagctgtactggctgatctggtttgctgtgtgtaaataatggtcctgaaacggattatttgtgagctgaattaaactcgacatgtaaatttaatcctcaagctagttgcaaattgatggcagcggttagccctacgtgtcagccgtctgacgtaactgcagagagaaaacgtttgcatgcatatgtacagctcgatccaatagaggttattaaatgttaacaatttattagttagttaagccgtctttacgacgtccatcgtca

SEQ ID NO: 59061 - DNA, 1380 bp, Zea Mays
gtagacccttcattgtcatcagaaggttcacatgttgctgaaccaaagacacctcagaaatgttcaggaagcgtttgtttggcatgatgaatgacctgccaactgtttttgaagtcgtctccggtggtgtgaagcaatctaaggaaagggacagatccggtactgacaacagtggtagaaataaactgtcagcaaagcaaacaagcgagccacggttagaaaataatgccagggagcctgacgagggctacgatgaagacgacggctaccacagcgaaaccttgtgcgggacatgtggtggaatatacagcgcagacgagttctggatcgggtgtgatgtgtgcgagaagtggtaccatggcaagtgcgtgaagatcactcccgcgaaggcggagagcataaagcagtacaagtgcccgagctgctgcaattcaaaaagacctaggccgctgtaggcctgtagcaccgccctcctcactggaggacggccatggatggaagactgaacaaacaggaggtcagagctactccttggcgcaaggccaataccaccttgccatgtttactgtatcttttcgattaagcttacatatgatggtgatgctaatgtgggcgggaagatcacacctagtatttattataacctttttgtggtttctccatgccatggagagttatggtagcctgtatgttgccggagaaggaataggggcagaggaagcctttgtaacgtttctaaaggtgaattgggcagcttatgccaagataataacccgtgaggtttatgttaatatattttatttgatacagggctgatggtttgcgtgagcaaccatgtgtgattacgtaagctaccgccgacccactttgtggaataacatacagatgcacttcgacaactagtcgtttctctagtttagaaacctaaaccctcaatggatccccaacatgtgcatttcttggtagaggtatattatggagggttcaaagtcttcctcttgtcttttttagaccatgtcttgtgagaagatgtgtttcttcaatttgattctgatatatagggacaagaacagagtcagtagctgtgcttttcttgagacatgaccaataacattttgttgtgaattcacttgaggtggacgctaatgttggtcacccgtaagattcctatgtaagattcctataagggaccaaaacagggcaactgttgggaccatgcttcgtcgccgaaggtcctgcggaaagaaacagcttcggctgaagctgcttgtacgtgatgccgaaggtaccattcatgaagcttcggtattacagcatattcgaaggtgaagggtcgaaccgacttaaagatagaatgatcttttagtccataagggtctg

SEQ ID NO: 59062 - DNA, 1290 bp, Zea Mays
caaagacacctcagaaatgttcagtcgtctccggtggtgtgaagcaatctaaggaaagggacagatccggtactgacaacagtggtagaaataaactgtcagcaaagcaaacaagcgagccacggttagaaaataatgccagggagcctgacgagggctacgatgaagacgacggctaccacagcgaaaccttgtgcgggacatgtggtggaatatacagcgcagacgagttctggatcgggtgtgatgtgtgcgagaagtggtaccatggcaagtgcgtgaagatcactcccgcgaaggcggagagcataaagcagtacaagtgcccgagctgctgcaattcaaaaagacctaggccgctgtaggcctgtagcaccgccctcctcactggaggacggccatggatggaagactgaacaaacaggaggtcagagctactccttggcgcaaggccaataccaccttgccatgtttactgtatcttttcgattaagcttacatatgatggtgatgctaatgtgggcgggaagatcacacctagtatttattataacctttttgtggtttctccatgccatggagagttatggtagcctgtatgttgccggagaaggaataggggcagaggaagcctttgtaacgtttctaaaggtgaattgggcagcttatgccaagataataacccgtgaggtttatgttaatatattttatttgatacagggctgatggtttgcgtgagcaaccatgtgtgattacgtaagctaccgccgacccactttgtggaataacatacagatgcacttcgacaactagtcgtttctctagtttagaaacctaaaccctcaatggatccccaacatgtgcatttcttggtagaggtatattatggagggttcaaagtcttcctcttgtcttttttagaccatgtcttgtgagaagatgtgtttcttcaatttgattctgatatatagggacaagaacagagtcagtagctgtgcttttcttgagacatgaccaataacattttgttgtgaattcacttgaggtggacgctaatgttggtcacccgtaagattcctatgtaagattcctataagggaccaaaacagggcaactgttgggaccatgcttcgtcgccgaaggtcctgcggaaagaaacagcttcggctgaagctgcttgtacgtgatgccgaaggtaccattcatgaagcttcggtattacagcatattcgaaggtgaagggtcgaaccgacttaaagatagaatgatcttttagtccataagggtctg

SEQ ID NO: 59063 - DNA, 1472 bp, Zea Mays
cataacttaatgcatgttcgaatttgctcctgctctccgcgagtcgctttcgaagtggtgcccacgcacatgcatgtgttggcctctccggcgacatacaacacaaatcacaagcgatccggatttgcccccggcatggcaggatacgtgaacataacgcagcaccgcggcggcaaggtgtcgttcatcgtggacgacgcggcggacagcgtcaagcccgtcacctacgtgaagcagatcgagagccaccgctacgactactcggtgctccaggtcagcggcgtcctgtcctccccggaggccgaggcacccgtcgccccgccggcgcccgtcaacctcaccgacatcctctccaagaagtactgcaagagcttcgcgggcctcctcgccgccgaccccaaggtcttcgacaccctcaacggcaccaaggacaccgcgctcaccgtcttctgccccgtcgacgcggcggtggccgccttcatgcccaagttcaagaacctcacggccaaggccaagacggccatcctgctgtaccacgccgtgccggactactactccatgcagttcctcaagtccaacaagggcaaggtcaccacgctcgccaccaccagcgtcgccaagaaggactacacctacgaagcggagagcaaggacgacaccgtcacgctcgacaccaccgtcgtcacctccaccatccaggccaccgtcagggacgacgacccgctcgccgtctacgcttgctccaagttcctgcagcctaaggagctgttcaaggccaaaaccgctgatctcgcgcctgcgccggctccacaagggcccaagaagaagagcaagaagaagcccaccggcacttcggcggcctccgcgccctcggacgatgaatctgcagatggcccgtctgccgacgacgactcgtccgatgatgccgcggacaaggctgccgccgcgccgtcgtacctgtccgctcgatgggtgaccgccgcagtgacgaccgccgtcgcgctggcgctggcggcgtaaggtgtgcgctcatgtgctatgttttttttataacttattggaccccctatcttcttttcttttgtccaagtcgtgtcccttccttgttggtgaacaaaataagaagggctatttttgttttttatatttattaccgcattccattaaaaaaaaattagaggtgtgtgtgagtgatgtaagtcttgattttgttcattgggttgtggtgatcattttgtaatggtagtggccaatggaattggagagtgggttaagttttcacatatgatactatatataaggcatcatatggagtttagaggtgcagcagtgtttgttgtttacacatgctttcaaatgttagactatataagattttaccctgtacgtaacctattagaacgaataaaactaggttcgtatctttagaagtttaggatgtctccataggaaggagagactctagcggtcgg

SEQ ID NO: 59064 - DNA, 1961 bp, Zea Mays
gttcgaatttgctcctgctctccgcgagtcgctttcgaagtggtgcccacgcacatgcatgtgttggcctctccggcgacatacaacacaaatcacaaggttcccgaaacagtagcgtttttttttacactatggaatctctggattagcgggccagctgaaattcgccttttaccgatctcgaagtcaccgagtacagtacgctctttaaaataaaggaaaaggatacttgagtgcagactcatataaaaatcacaccatcagagaatcggtttttttctttctttttggtgctgagacaataaaaaaagatttttcagccaacctgaaagaaggggtcaaggcaatggttctggtcactttggtcccactccgactatatatggttcctaccattttcaacaagttttttttttcagcgtctatgatgctcagagggaactcaaatcgtagtctgacagctttggtggtcggtgcatcaaagttggggctaccgatcgatgcgatttgagtagagtagcaaattaaatttcacttgttttaattaatttcgtggcgcccttaacgatcatcctcatggatacgatatgatgtggcatgcagcgatccggatttgcccccggcatggcaggatacgtgaacataacgcagcaccgcggcggcaaggtgtcgttcatcgtggacgacgcggcggacagcgtcaagcccgtcacctacgtgaagcagatcgagagccaccgctacgactactcggtgctccaggtcagcggcgtcctgtcctccccggaggccgaggcacccgtcgccccgccggcgcccgtcaacctcaccgacatcctctccaagaagtactgcaagagcttcgcgggcctcctcgccgccgaccccaaggtcttcgacaccctcaacggcaccaaggacaccgcgctcaccgtcttctgccccgtcgacgcggcggtggccgccttcatgcccaagttcaagaacctcacggccaaggccaagacggccatcctgctgtaccacgccgtgccggactactactccatgcagttcctcaagtccaacaagggcaaggtcaccacgctcgccaccaccagcgtcgccaagaaggactacacctacgaagcggagagcaaggacgacaccgtcacgctcgacaccaccgtcgtcacctccaccatccaggccaccgtcagggacgacgacccgctcgccgtctacgcttgctccaagttcctgcagcctaaggagctgttcaaggccaaaaccgctgatctcgcgcctgcgccggctccacaagggcccaagaagaagagcaagaagaagcccaccggcacttcggcggcctccgcgccctcggacgatgaatctgcagatggcccgtctgccgacgacgactcgtccgatgatgccgcggacaaggctgccgccgcgccgtcgtacctgtccgctcgatgggtgaccgccgcagtgacgaccgccgtcgcgctggcgctggcggcgtaaggtgtgcgctcatgtgctatgttttttttataacttattggaccccctatcttcttttcttttgtccaagtcgtgtcccttccttgttggtgaacaaaataagaagggctatttttgttttttatatttattaccgcattccattaaaaaaaaattagaggtgtgtgtgagtgatgtaagtcttgattttgttcattgggttgtggtgatcattttgtaatggtagtggccaatggaattggagagtgggttaagttttcacatatgatactatatataaggcatcatatggagtttagaggtgcagcagtgtttgttgtttacacatgctttcaaatgttagactatataagattttaccctgtacgtaacctattagaacgaataaaactaggttcgtatctttagaagtttaggatgtctccataggaaggagagactctagcggtcgg

SEQ ID NO: 59065 - DNA, 832 bp, Zea Mays
ctttaaaatttacacaagtatattcatgtgtgttatgtatggatctttcacggtagcagcatgattagggaaagcacataatgtctcgatacaatgaccgatatgaccataacaaccgatatgatcgtcatggtcgacatggaagtaacaccaagttgtacgtgggccaaatttctccatatacccggacacaggatcttgaggacattttcagaaaatatgggagattgcgcaatgtggatatgaagagggagtttggcttcgttgagtttactgatcctcgggatgcagatgatgcaagacatgaccttgatggccggatatttgatgggagtcacctcattgttgaatttgctagaggggcccaacgtggtccaggaggtgttcctctagatggcaaaggaccatcttttcctggccgctgttataactgtggaatggatgggcactgggttcgtgattgcaaagctggtgattggcgagataagtgctttcggtgtggagaactgggccatatagaaagaaactgcaagaacagttctaaggatctgaagcgtgggaggagctacttgaggtctgcatctcctcaccatgggaagggccgagggagaagctactcaaggtctctatctccttaccttggaaggggccgagggagaagctactcgaggtctccatctcattatcatcgcaggggcagaagctggagttacagaagtataatgtcgtgttcaacatggtaggaggctctggacgagctgatttatcatcaggccatcacaatcacaagtggtacgccatatgccgtgggggttctatgtccgtggcctag

SEQ ID NO: 59066 - DNA, 3458 bp, Zea Mays
gaaccgccctcccgcccgccccaatctccgagatccacagggacgcaagacgctgctgatggcaaaaccaaggaaaactcgcacctcggctccagatccacccgtagccgcgttcggcttccggggtgtgctgtggtggggacagcggcgacgggtgacggggtggccgggtcggggtgggggtgcgggcagggcggtggtatggacggggtggacatcggcggcgggcttctcttctcgtggacttaccaccaccttgaccgcgacttgaattgctggtttggtgtctgatgcgggctcatctgcttgttgcaatccgctttccccgatttattcttacgatttccaagtagttttgtgttatcttctctctctctctcttgggaaaaggggtttcaattctgttgggatcgactcaccgagttttgaggtttttcgtgggcggtttgattttcggtcgatccgatctgtggcaggctttcatcagatgttgcaaaattcgctcgcaaccgtaatcgcagcgttattgtcagccgcaaacagtccttttcttggttgtactgcgctttccccactaatgcatctattcgatctaaccggtcttcgctccgcattggactgtcgcagatcagcgaccatgggaacccgcggcgtcgccctgctgctcctcacggtggtgttgctccaggcgctcctccccgcgtcgtcggagggcctggtgcgggtcgcgctgaagaaacagcccgtcgaccagaacggtcgcgtcgccacatgcctctccgtcgaggagaggcagcgcctcctcctccgcggcgccaacgccctgggctcaggcggtgaagacgactccgacgtcatcgcgctcaagaactacatgaacgcgcagtacgttggggagatcggcgtcggctcgccgcagcataagttcactgtcatcttcgacaccggcagttccaacctctgggtgccgtcctccaagtgctacttcttgatcgcttgctacttccactcgcgctacaagtcagggcagtcaagcacttacaagaagaacgggcgttcagaactataaaagtttcaagaagacagtagcacgattggaagaggctgctgtatcatgccgtgggggtgaaagagttgaattgttgaaacgttggttaggagcattgcaagatgttgatgctgaaaatggaagttcagatttaaaggtgtctgaagctaatgacccttctggtgaaatggacactttgaaagcacaaactgttttgttctatgatgctgatattgatggtgcacctatgaatttttgtgatgtattcttgtacagccaagcacttgaaggtattacattgtccatgattctcgaacctccttctgaggaggaagtttcactgcttttggaaatattcagcatatgccttactggagggaaagaagtgaacaaagaaatcatgagtaatgtacaagacttggccaaggcattttcagaatacaaagatgaagtcctggtgaaacgtgaagagctgcttgagtatgcccaaagtatcatttcaggactgaagagaaatgctgacattgtgaggatagatgctgaaaccctagaattgcagagaaaactagacgagaagcagaaatcacgaggtcaatcacctgaatatcaagataaaacgtcagataagattgctgctgcaaatcttgaggtcttcaaagaagcacttggtgaactccgcttatgctctagagttgaagaacttctgctgaagaagaaatcaatcactcttggtgactccctggagattcattctcagaaggtagataaactaaaggttttagcagattccctggcatgttcatcctccaaagcagaacagcgtattttggagcacaggcgccagaaagaagatgctctcaactttcgtgtgaaaaaagagaatgaagtcagtgtttctgaaaaggaattgcttgatgagattactgaattggaaaagcaaagagatgagcttgaggcacagctgaagaaggttaatatatcactaaatgctgctgctggacggctcaaacaaactagggaagagagggaccaatttgacgaagcaaacaatcaaatcatatttagcttgaaaaaaaaggaggatgacctctcaaaatccattgccttatgtaatgtggaatccaatgttgtcaagatctggatcggtttccttgaggactcgtggaagctgcagtcctcatacaatgaacagaaggataataaaacgtgtgatgagctggagaaatgtgtgagtgattttctaaagttgacaaaacatcatctttcagcattcaaggaagtcctaagccaattgattgagaatatcgaaacatatgtcggtaacttggctgtcttaacctcaagggaagaggaaaaagaacatggggatgatgaggcatctgagaggacagatccacgtaaatcccttgaagaggaatatctagaaacagaaaagaagattataattgcgttcagcatagttgatcacataaagaaattgttttattctggggaaggggctgattcaaggagagatgacccagaggtcaagagcttaattgaggagattgagaaaatgagggaatcgttcgagtctatagaaaggccaacactaagcatagaatctgagaaagcaaaaccactacctgttgagggatcgaaactgagtccttcacctcttcaggctcctgctaccccaaaagctgcacacgttgactcaccaaaatctcccatgaaacctgagcagcatttcgattcagatgcggagcttgcaaccctgggatcagagatcgggaaagaagacaaagagtactcagttgaggagataagcgggtgggagtttgacgagctcgaagaggaccttaagagctgacacaaagaatcgacaaacagaacacaattcgatttggttatcttcactgacatgtattatttgtctgggccttgcgtgggcaagaaatacacactggttgatatgtacatagtgctgtttgattgtgtattgtcgcgcactcgcgctgtcaatttgtcactgtcttaagatatacggactgagctggtgtaacttgggcgaggcatttgctatttgtttgctcttgccgcgaatatttttatcttacatgtataccgaaccctgttgtaacagttgtaaacgcggaaaacaaaattcgaacatttgacagaatttgctccgtagaacattggattgttgggtttgagttttacattgcattcctaatggatgaatctatcaggattcaggcttccccaacaactataatatctcatttcatatttcaaactttgctctacaaacactggatttaggcttctactgtaactattttatctcatttcatatttcaaactttacaaacattgttatttttttttgacgaaggggcagagcccctatttcattaggaaatag

SEQ ID NO: 59067 - DNA, 2624 bp, Zea Mays
gtgaacctggcagcagggcccacacgacatccaaatcgaagaacacgtcgctgacacaccacctctccctcgccgcattctccactctctggtcttcgccgtggtcggtgccttccaaatccaaaaaaccccaagccctagctgtagccgtcccccaaggtcgccgagatgtcttcgtggctgcgcagcgcggtgagccgggcagtggaggccggcggccgcagcggcgtcgcccgcgcggtcaaggggtacgccgataccgtcgcgcaccacgccggtcaggccgtcgcggacatcctccacgaccgcatgggcgttcagaactataaaagtttcaagaagacagtagcacgattggaagaggctgctgtatcatgccgtgggggtgaaagagttgaattgttgaaacgttggttaggagcattgcaagatgttgatgctgaaaatggaagttcagatttaaaggtgtctgaagctaatgacccttctggtgaaatggacactttgaaagcacaaactgttttgttctatgatgctgatattgatggtgcacctatgaatttttgtgatgtattcttgtacagccaagcacttgaaggtattacattgtccatgattctcgaacctccttctgaggaggaagtttcactgcttttggaaatattcagcatatgccttactggagggaaagaagtgaacaaagaaatcatgagtaatgtacaagacttggccaaggcattttcagaatacaaagatgaagtcctggtgaaacgtgaagagctgcttgagtatgcccaaagtatcatttcaggactgaagagaaatgctgacattgtgaggatagatgctgaaaccctagaattgcagagaaaactagacgagaagcagaaatcacgaggtcaatcacctgaatatcaagataaaacgtcagataagattgctgctgcaaatcttgaggtcttcaaagaagcacttggtgaactccgcttatgctctagagttgaagaacttctgctgaagaagaaatcaatcactcttggtgactccctggagattcattctcagaaggtagataaactaaaggttttagcagattccctggcatgttcatcctccaaagcagaacagcgtattttggagcacaggcgccagaaagaagatgctctcaactttcgtgtgaaaaaagagaatgaagtcagtgtttctgaaaaggaattgcttgatgagattactgaattggaaaagcaaagagatgagcttgaggcacagctgaagaaggttaatatatcactaaatgctgctgctggacggctcaaacaaactagggaagagagggaccaatttgacgaagcaaacaatcaaatcatatttagcttgaaaaaaaaggaggatgacctctcaaaatccattgccttatgtaatgtggaatccaatgttgtcaagatctggatcggtttccttgaggactcgtggaagctgcagtcctcatacaatgaacagaaggataataaaacgtgtgatgagctggagaaatgtgtgagtgattttctaaagttgacaaaacatcatctttcagcattcaaggaagtcctaagccaattgattgagaatatcgaaacatatgtcggtaacttggctgtcttaacctcaagattataattgcgttcagcatagttgatcacataaagaaattgttttattctggggaaggggctgattcaaggagagatgacccagaggtcaagagcttaattgaggagattgagaaaatgagggaatcgttcgagtctatagaaaggccaacactaagcatagaatctgagaaagcaaaaccactacctgttgagggatcgaaactgagtccttcacctcttcaggctcctgctaccccaaaagctgcacacgttgactcaccaaaatctcccatgaaacctgagcagcatttcgattcagatgcggagcttgcaaccctgggatcagagatcgggaaagaagacaaagagtactcagttgaggagataagcgggtgggagtttgacgagctcgaagaggaccttaagagctgacacaaagaatcgacaaacagaacacaattcgatttggttatcttcactgacatgtattatttgtctgggccttgcgtgggcaagaaatacacactggttgatatgtacatagtgctgtttgattgtgtattgtcgcgcactcgcgctgtcaatttgtcactgtcttaagatatacggactgagctggtgtaacttgggcgaggcatttgctatttgtttgctcttgccgcgaatatttttatcttacatgtataccgaaccctgttgtaacagttgtaaacgcggaaaacaaaattcgaacatttgacagaatttgctccgtagaacattggattgttgggtttgagttttacattgcattcctaatggatgaatctatcaggattcaggcttccccaacaactataatatctcatttcatatttcaaactttgctctacaaacactggatttaggcttctactgtaactattttatctcatttcatatttcaaactttacaaacattgttatttttttttgacgaaggggcagagcccctatttcattaggaaatag

SEQ ID NO: 59068 - DNA, 2733 bp, Zea Mays
ctggcagcagggcccacacgacatccaaatcgaagaacacgtcgctgacacaccacctctccctcgccgcattctccactctctggtcttcgccgtggtcggtgccttccaaatccaaaaaaccccaagccctagctgtagccgtcccccaaggtcgccgagatgtcttcgtggctgcgcagcgcggtgagccgggcagtggaggccggcggccgcagcggcgtcgcccgcgcggtcaaggggtacgccgataccgtcgcgcaccacgccggtcaggccgtcgcggacatcctccacgaccgcatgggcgttcagaactataaaagtttcaagaagacagtagcacgattggaagaggctgctgtatcatgccgtgggggtgaaagagttgaattgttgaaacgttggttaggagcattgcaagatgttgatgctgaaaatggaagttcagatttaaaggtgtctgaagctaatgacccttctggtgaaatggacactttgaaagcacaaactgttttgttctatgatgctgatattgatggtgcacctatgaatttttgtgatgtattcttgtacagccaagcacttgaaggtattacattgtccatgcatatgccttactggagggaaagaagtgaacaaagaaatcatgagtaatgtacaagacttggccaaggcattttcagaatacaaagatgaagtcctggtgaaacgtgaagagctgcttgagtatgcccaaagtatcatttcaggactgaagagaaatgctgacattgtgaggatagatgctgaaaccctagaattgcagagaaaactagacgagaagcagaaatcacgaggtcaatcacctgaatatcaagataaaacgtcagataagattgctgctgcaaatcttgaggtcttcaaagaagcacttggtgaactccgcttatgctctagagttgaagaacttctgctgaagaagaaatcaatcactcttggtgactccctggagattcattctcagaaggtagataaactaaaggttttagcagattccctggcatgttcatcctccaaagcagaacagcgtattttggagcacaggcgccagaaagaagatgctctcaactttcgtgtgaaaaaagagaatgaagtcagtgtttctgaaaaggaattgcttgatgagattactgaattggaaaagcaaagagatgagcttgaggcacagctgaagaaggttaatatatcactaaatgctgctgctggacggctcaaacaaactagggaagagagggaccaatttgacgaagcaaacaatcaaatcatatttagcttgaaaaaaaaggaggatgacctctcaaaatccattgccttatgtaatgtggaatccaatgttgtcaagatctggatcggtttccttgaggactcgtggaagctgcagtcctcatacaatgaacagaaggataataaaacgtgtgatgagctggagaaatgtgtgagtgattttctaaagttgacaaaacatcatctttcagcattcaaggaagtcctaagccaattgattgagaatatcgaaacatatgtcggtaacttggctgtcttaacctcaaggtattttagttcttttcctaaagtcatgtactttgttgtccaatttgtttggtaggtttttacttgccttgtagggaagaggaaaaagaacatggggatgatgaggcatctgagaggacagatccacgtaaatcccttgaagaggaatatctagaaacagaaaagaagattataattgcgttcagcatagttgatcacataaagaaattgttttattctggggaaggggctgattcaaggagagatgacccagaggtcaagagcttaattgaggagattgagaaaatgagggaatcgttcgagtctatagaaaggccaacactaagcatagaatctgagaaagcaaaaccactacctgttgagggatcgaaactgagtccttcacctcttcaggctcctgctaccccaaaagctgcacacgttgactcaccaaaatctcccatgaaacctgagcagcatttcgattcagatgcggagcttgcaaccctgggatcagagatcgggaaagaagacaaagagtactcagttgaggagataagcgggtgggagtttgacgagctcgaagaggaccttaagagctgacacaaagaatcgacaaacagaacacaattcgatttggttatcttcactgacatgtattatttgtctgggccttgcgtgggcaagaaatacacactggttgatatgtacatagtgctgtttgattgtgtattgtcgcgcactcgcgctgtcaatttgtcactgtcttaagatatacggactgagctggtgtaacttgggcgaggcatttgctatttgtttgctcttgccgcgaatatttttatcttacatgtataccgaaccctgttgtaacagttgtaaacgcggaaaacaaaattcgaacatttgacagaatttgctccgtagaacattggattgttgggtttgagttttacattgcattcctaatggatgaatctatcaggattcaggcttccccaacaactataatatctcatttcatatttcaaactttgctctacaaacactggatttaggcttctactgtaactattttatctcatttcatatttcaaactttacaaacattgttatttttttttgacgaaggggcagagcccctatttcattaggaaatag

SEQ ID NO: 59069 - DNA, 3580 bp, Zea Mays
ggcccacacgacatccaaatcgaagaacacgtcgctgacacaccacctctccctcgccgcattctccactctctggtcttcgccgtggtcggtgccttccaaatccaaaaaaccccaagccctagctgtagccgtcccccaaggtcgccgagatgtcttcgtggctgcgcagcgcggtgagccgggcagtggaggccggcggccgcagcggcgtcgcccgcgcggtcaaggggtacgccgataccgtcgcgcaccacgccggtcaggccgtcgcggacatcctccacgaccgcatgggcgttcagaactataaaagtttcaagaagacagtagcacgattggaagaggctgctgtatcatgccgtgggggtgaaagagttgaattgttgaaacgttggttaggagcattgcaagatgttgatgctgaaaatggaagttcagatttaaaggtgtctgaagctaatgacccttctggtgaaatggacactttgaaagcacaaactgttttgttctatgatgctgatattgatggtgcacctatgaatttttgtgatgtattcttgtacagccaagcacttgaaggtattacattgtccatggtaagttagtcgaaccattttctcttagcaacattgctattgtttatttgcacttaggttattgccaattactaattatcttttcatataataagattctcgaacctccttctgaggaggaagtttcactgcttttggaaatattcagcatatgccttactggagggaaagaagtgaacaaagaaatcatgagtaatgtacaagacttggccaaggcattttcagaatacaaagatgaagtcctggtgaaacgtgaagagctgcttgagtatgcccaaagtatcatttcaggactgaagagaaatgctgacattgtgaggatagatgctgaaaccctagaattgcagagaaaactagacgagaagcagaaatcacgaggtcaatcacctgaatatcaagataaaacgtcagataagattgctgctgcaaatcttgaggtcttcaaagaagcacttggtgaactccgcttatgctctagagttgaagaacttctgctgaagaagaaatcaatcactcttggtgactccctggagattcattctcagaaggtagataaactaaaggttttagcagattccctggcatgttcatcctccaaagcagaacagcgtattttggagcacaggcgccagaaagaagatgctctcaactttcgtgtgaaaaaagagaatgaagtcagtgtttctgaaaaggaattgcttgatgagattactgaattggaaaagcaaagagatgagcttgaggcacagctgaagaaggttaatatatcactaaatgctgctgctggacggctcaaacaaactagggaagagagggaccaatttgacgaagcaaacaatcaaatcatatttagcttgaaaaaaaaggaggatgacctctcaaaatccattgccttatgtaatgtggaatccaatgttgtcaagatctggatcggtttccttgaggactcgtggaagctgcagtcctcatacaatgaacagaaggataataaaacgtgtgatgagctggagaaatgtgtgagtgattttctaaagttgacaaaacatcatctttcagcattcaaggaagtcctaagccaattgattgagaatatcgaaacatatgtcggtaacttggctgtcttaacctcaagggaagaggaaaaagaacatggggatgatgaggcatctgagaggacagatccacgtaaatcccttgaagaggaatatctagaaacagaaaagaaggttatactcagtcaccttactttaacttggtctcatacatggttcttaaagcggtaaggcgaggtaaggcattgaaccaccgctggacgcctaggcgccgccaaaggcgagcaaggcgacaccttatcaacatgagaaccagcaaaacagcagcatggaggaggaacaaaaagaaaaaaaaagaaaaaaaggaaatggaaaaaggagaaggggtaggagccccggccaaccggcaagcccatatgctcactctgtttccctctctctcccccgattgagctgctgctttccttctcccccttttcagccacggcttccttctctcccccagattcagccgctgccactcatgatttcgccgccgccacccccgatttggttgccgctggccccgattcggccaccgctgcccctgatctcgccgccgctgccccctgaatcctcgatttgccgcctccagccccgattcggccgccgctggcccgattcggcgccgccccttttcatcccctctgttctcttgctgatttagttaggcgacggggatgcctaggagagttggggggcgcctagacgcctaggcgacacctttaaaacagaggtctcatagttctagttcattcataacatgatttgatatgcctgaagaacccaaagttgaattgacatctatcagtcgccatatgtattacttatagcaactcgcccaactcttcagttttgtaacttctaaaccttagagaaactagaccaaactgtcttatgtattgacaatattttcagattataattgcgttcagcatagttgatcacataaagaaattgttttattctggggaaggggctgattcaaggagagatgacccagaggtcaagagcttaattgaggagattgagaaaatgagggaatcgttcgagtctatagaaaggccaacactaagcatagaatctgagaaagcaaaaccactacctgttgagggatcgaaactgagtccttcacctcttcaggctcctgctaccccaaaagctgcacacgttgactcaccaaaatctcccatgaaacctgagcagcatttcgattcagatgcggagcttgcaaccctgggatcagagatcgggaaagaagacaaagagtactcagttgaggagataagcgggtgggagtttgacgagctcgaagaggaccttaagagctgacacaaagaatcgacaaacagaacacaattcgatttggttatcttcactgacatgtattatttgtctgggccttgcgtgggcaagaaatacacactggttgatatgtacatagtgctgtttgattgtgtattgtcgcgcactcgcgctgtcaatttgtcactgtcttaagatatacggactgagctggtgtaacttgggcgaggcatttgctatttgtttgctcttgccgcgaatatttttatcttacatgtataccgaaccctgttgtaacagttgtaaacgcggaaaacaaaattcgaacatttgacagaatttgctccgtagaacattggattgttgggtttgagttttacattgcattcctaatggatgaatctatcaggattcaggcttccccaacaactataatatctcatttcatatttcaaactttgctctacaaacactggatttaggcttctactgtaactattttatctcatttcatatttcaaactttacaaacattgttatttttttttgacgaaggggcagagcccctatttcattaggaaatag

SEQ ID NO: 59070 - DNA, 2709 bp, Zea Mays
acacgacatccaaatcgaagaacacgtcgctgacacaccacctctccctcgccgcattctccactctctggtcttcgccgtggtcggtgccttccaaatccaaaaaaccccaagccctagctgtagccgtcccccaaggtcgccgagatgtcttcgtggctgcgcagcgcggtgagccgggcagtggaggccggcggccgcagcggcgtcgcccgcgcggtcaaggggtacgccgataccgtcgcgcaccacgccggtcaggccgtcgcggacatcctccacgaccgcatgggcgttcagaactataaaagtttcaagaagacagtagcacgattggaagaggctgctgtatcatgccgtgggggtgaaagagttgaattgttgaaacgttggttaggagcattgcaagatgttgatgctgaaaatggaagttcagatttaaaggtgtctgaagctaatgacccttctggtgaaatggacactttgaaagcacaaactgttttgttctatgatgctgatattgatggtgcacctatgaatttttgtgatgtattcttgtacagccaagcacttgaaggtattacattgtccatgattctcgaacctccttctgaggaggaagtttcactgcttttggaaatattcagcatatgccttactggagggaaagaagtgaacaaagaaatcatgagtaatgtacaagacttggccaaggcattttcagaatacaaagatgaagtcctggtgaaacgtgaagagctgcttgagtatgcccaaagtatcatttcaggactgaagagaaatgctgacattgtgagatgctgaaaccctagaattgcagagaaaactagacgagaagcagaaatcacgaggtcaatcacctgaatatcaagataaaacgtcagataagattgctgctgcaaatcttgaggtcttcaaagaagcacttggtgaactccgcttatgctctagagttgaagaacttctgctgaagaagaaatcaatcactcttggtgactccctggagattcattctcagaaggtagataaactaaaggttttagcagattccctggcatgttcatcctccaaagcagaacagcgtattttggagcacaggcgccagaaagaagatgctctcaactttcgtgtgaaaaaagagaatgaagtcagtgtttctgaaaaggaattgcttgatgagattactgaattggaaaagcaaagagatgagcttgaggcacagctgaagaaggttaatatatcactaaatgctgctgctggacggctcaaacaaactagggaagagagggaccaatttgacgaagcaaacaatcaaatcatatttagcttgaaaaaaaagatctggatcggtttccttgaggactcgtggaagctgcagtcctcatacaatgaacagaaggataataaaacgtgtgatgagctggagaaatgtgtgagtgattttctaaagttgacaaaacatcatctttcagcattcaaggaagtcctaagccaattgattgagaatatcgaaacatatgtcggtaacttggctgtcttaacctcaaggtattttagttcttttcctaaagtcatgtactttgttgtccaatttgtttggtaggtttttacttgccttgtagggaagaggaaaaagaacatggggatgatgaggcatctgagaggacagatccacgtaaatcccttgaagaggaatatctagaaacagaaaagaagattataattgcgttcagcatagttgatcacataaagaaattgttttattctggggaaggggctgattcaaggagagatgacccagaggtcaagagcttaattgaggagattgagaaaatgagggaatcgttcgagtctatagaaaggccaacactaagcatagaatctgagaaagcaaaaccactacctgttgagggatcgaaactgagtccttcacctcttcaggctcctgctaccccaaaagctgcacacgttgactcaccaaaatctcccatgaaacctgagcagcatttcgattcagatgcggagcttgcaaccctgggatcagagatcgggaaagaagacaaagagtactcagttgaggagataagcgggtgggagtttgacgagctcgaagaggaccttaagagctgacacaaagaatcgacaaacagaacacaattcgatttggttatcttcactgacatgtattatttgtctgggccttgcgtgggcaagaaatacacactggttgatatgtacatagtgctgtttgattgtgtattgtcgcgcactcgcgctgtcaatttgtcactgtcttaagatatacggactgagctggtgtaacttgggcgaggcatttgctatttgtttgctcttgccgcgaatatttttatcttacatgtataccgaaccctgttgtaacagttgtaaacgcggaaaacaaaattcgaacatttgacagaatttgctccgtagaacattggattgttgggtttgagttttacattgcattcctaatggatgaatctatcaggattcaggcttccccaacaactataatatctcatttcatatttcaaactttgctctacaaacactggatttaggcttctactgtaactattttatctcatttcatatttcaaactttacaaacattgttatttttttttgacgaaggggcagagcccctatttcattaggaaatag

SEQ ID NO: 59071 - DNA, 4032 bp, Zea Mays
acacgacatccaaatcgaagaacacgtcgctgacacaccacctctccctcgccgcattctccactctctggtcttcgccgtggtcggtgccttccaaatccaaaaaaccccaagccctagctgtagccgtcccccaaggtcgccgagatgtcttcgtggctgcgcagcgcggtgagccgggcagtggaggccggcggccgcagcggcgtcgcccgcgcggtcaaggggtacgccgataccgtcgcgcaccacgccggtcaggccgtcgcggacatcctccacgaccgcatgaactataaaagtttcaagaagacagtagcacgattggaagaggctgctgtatcatgccgtgggggtgaaagagttgaattgttgaaacgttggttaggagcattgcaagatgttgatgctgaaaatggaagttcagatttaaaggtgtctgaagctaatgacccttctggtgaaatggacactttgaaagcacaaactgttttgttctatgatgctgatattgatggtgcacctatgaatttttgtgatgtattcttgtacagccaagcacttgaaggtattacattgtccatggtaagttagtcgaaccattttctcttagcaacattgctattgtttatttgcacttaggttattgccaattactaattatcttttcatataataagattctcgaacctccttctgaggaggaagtttcactgcttttggaaatattcaggtgagtatgcatatggaatcacctgtttgatatgtgcttatctttgtattttttcccaaaagtgacaaaattcatatatgtctttgttcagcattactgattaaatatctgaatgaatcattcaaactttttctgaaatagcatggcaaaccgataatgagaactatgtcattgagtcaccaggtcgtaggttgaagcaacctctctgcatttgcgggagaaggcttgcctggtttatcccttccccagaccccactcatgtggaaatatccggcactgggtctgccccctttttcttcaaaagcatggaagacttgaacatatatattagcaattcccatatcagcacgttttgatagactgctccatttgccttgccattttttcgctctgctctttatggatttttgtatatgctgacttgcagcaatgattgtactggtttcctttttgataggatcttaacaaactgttgattttccacccacattctcttcttccaagattacagttgggttcaatgtttaaaaattggcatagttaacttctgctgaagccctgaaagggcgtaaacccttatttgttgaagattcattaacattatgttatggtgggcgtccagtacaggcgccgcaacaaggctggtagtcctaattagggggctgaaccggcttaggctaagtgggctgttagcaagggcccttttagcagtagaataaagaggctaaaggccttttaggttaatctgtaataggaggttatttataccttaattgcaataaaatgagaacaggctgtgatcaacatattgttgatcagccgccgccctgccctaatttctcctcccctgctgtcttctcccaggccgtgagaaccacggcctcctctcatcgccaaccgctcaaggagcggccacctaccacacacaactacaacctaaggagaagagggcataccacattaactaatggctatattccgaacatctcaagtacttcatccaccttatgtcccaattgaatcatatctgaccagtgaatatttgtaatttactgtattgaaaaattgaagagcaagcctggtgcactggtgagagctgtctcactgagtcatcaggtcacgggtttgaaacagcctctcagcatttgcggccggaggcttgccttggtttatcccttctctagaccccactcatgtgggagctccgtcattgggtctgtactttttttactgtatcaaaaactgcaatgctgttgatttctgcagcatatgccttactggagggaaagaagtgaacaaagaaatcatgagtaatgtacaagacttggccaaggcattttcagaatacaaagatgaagtcctggtgaaacgtgaagagctgcttgagtatgcccaaagtatcatttcaggactgaagagaaatgctgacattgtgagatgctgaaaccctagaattgcagagaaaactagacgagaagcagaaatcacgaggtcaatcacctgaatatcaagataaaacgtcagataagattgctgctgcaaatcttgaggtcttcaaagaagcacttggtgaactccgcttatgctctagagttgaagaacttctgctgaagaagaaatcaatcactcttggtagataaactaaaggttttagcagattccctggcatgttcatcctccaaagcagaacagcgtattttggagcacaggcgccagaaagaagatgctctcaactttcgtgtgaaaaaagagaatgaagtcagtgtttctgaaaaggaattgcttgatgagattactgaattggaaaagcaaagagatgagcttgaggcacagctgaagaaggttaatatatcactaaatgctgctgctggacggctcaaacaaactagggaagagagggaccaatttgacgaagcaaacaatcaaatcatatttagcttgaaaaaaaagatctggatcggtttccttgaggactcgtggaagctgcagtcctcatacaatgaacagaaggataataaaacgtgtgatgagctggagaaatgtgtgagtgattttctaaagttgacaaaacatcatctttcagcattcaaggaagtcctaagccaattgattgagaatatcgaaacatatgtcggtaacttggctgtcttaacctcaaggtattttagttcttttcctaaagtcatgtactttgttgtccaatttgtttggtaggtttttacttgccttgtagggaagaggaaaaagaacatggggatgatgaggcatctgagaggacagatccacgtaaatcccttgaagaggaatatctagaaacagaaaagaagattataattgcgttcagcatagttgatcacataaagaaattgttttattctggggaaggggctgattcaaggagagatgacccagaggtcaagagcttaattgaggagattgagaaaatgagggaatcgttcgagtctatagaaaggccaacactaagcatagaatctgagaaagcaaaaccactacctgttgagggatcgaaactgagtccttcacctcttcaggctcctgctaccccaaaagctgcacacgttgactcaccaaaatctcccatgaaacctgagcagcatttcgattcagatgcggagcttgcaaccctgggatcagagatcgggaaagaagacaaagagtactcagttgaggagataagcgggtgggagtttgacgagctcgaagaggaccttaagagctgacacaaagaatcgacaaacagaacacaattcgatttggttatcttcactgacatgtattatttgtctgggccttgcgtgggcaagaaatacacactggttgatatgtacatagtgctgtttgattgtgtattgtcgcgcactcgcgctgtcaatttgtcactgtcttaagatatacggactgagctggtgtaacttgggcgaggcatttgctatttgtttgctcttgccgcgaatatttttatcttacatgtataccgaaccctgttgtaacagttgtaaacgcggaaaacaaaattcgaacatttgacagaatttgctccgtagaacattggattgttgggtttgagttttacattgcattcctaatggatgaatctatcaggattcaggcttccccaacaactataatatctcatttcatatttcaaactttgctctacaaacactggatttaggcttctactgtaactattttatctcatttcatatttcaaactttacaaacattgttatttttttttgacgaaggggcagagcccctatttcattaggaaatag

SEQ ID NO: 59072 - DNA, 2594 bp, Zea Mays
acacgacatccaaatcgaagaacacgtcgctgacacaccacctctccctcgccgcattctccactctctggtcttcgccgtggtcggtgccttccaaatccaaaaaaccccaagccctagctgtagccgtcccccaaggtcgccgagatgtcttcgtggctgcgcagcgcggtgagccgggcagtggaggccggcggccgcagcggcgtcgcccgcgcggtcaaggggtacgccgataccgtcgcgcaccacgccggtcaggccgtcgcggacatcctccacgaccgcatgaactataaaagtttcaagaagacagtagcacgattggaagaggctgctgtatcatgccgtgggggtgaaagagttgaattgttgaaacgttggttaggagcattgcaagatgttgatgctgaaaatggaagttcagatttaaaggtgtctgaagctaatgacccttctggtgaaatggacactttgaaagcacaaactgttttgttctatgatgctgatattgatggtgcacctatgaatttttgtgatgtattcttgtacagccaagcacttgaaggtattacattgtccatgattctcgaacctccttctgaggaggaagtttcactgcttttggaaatattcagcatatgccttactggagggaaagaagtgaacaaagaaatcatgagtaatgtacaagacttggccaaggcattttcagaatacaaagatgaagtcctggtgaaacgtgaagagctgcttgagtatgcccaaagtatcatttcaggactgaagagaaatgctgacattgtgaggatagatgctgaaaccctagaattgcagagaaaactagacgagaagcagaaatcacgaggtcaatcacctgaatatcaagataaaacgtcagataagattgctgctgcaaatcttgaggtcttcaaagaagcacttggtgaactccgcttatgctctagagttgaagaacttctgctgaagaagaaatcaatcactcttggtgactccctggagattcattctcagaaggtagataaactaaaggttttagcagattccctggcatgttcatcctccaaagcagaacagcgtattttggagcacaggcgccagaaagaagatgctctcaactttcgtgtgaaaaaagagaatgaagtcagtgtttctgaaaaggaattgcttgatgagattactgaattggaaaagcaaagagatgagcttgaggcacagctgaagaaggttaatatatcactaaatgctgctgctggacggctcaaacaaactagggaagagagggaccaatttgacgaagcaaacaatcaaatcatatttagcttgaaaaaaaaggaggatgacctctcaaaatccattgccttatgtaatgtggaatccaatgttgtcaagatctggatcggtttccttgaggactcgtggaagctgcagtcctcatacaatgaacagaaggataataaaacgtgtgatgagctggagaaatgtgtgagtgattttctaaagttgacaaaacatcatctttcagcattcaaggaagtcctaagccaattgattgagaatatcgaaacatatgtcggtaacttggctgtcttaacctcaagattataattgcgttcagcatagttgatcacataaagaaattgttttattctggggaaggggctgattcaaggagagatgacccagaggtcaagagcttaattgaggagattgagaaaatgagggaatcgttcgagtctatagaaaggccaacactaagcatagaatctgagaaagcaaaaccactacctgttgagggatcgaaactgagtccttcacctcttcaggctcctgctaccccaaaagctgcacacgttgactcaccaaaatctcccatgaaacctgagcagcatttcgattcagatgcggagcttgcaaccctgggatcagagatcgggaaagaagacaaagagtactcagttgaggagataagcgggtgggagtttgacgagctcgaagaggaccttaagagctgacacaaagaatcgacaaacagaacacaattcgatttggttatcttcactgacatgtattatttgtctgggccttgcgtgggcaagaaatacacactggttgatatgtacatagtgctgtttgattgtgtattgtcgcgcactcgcgctgtcaatttgtcactgtcttaagatatacggactgagctggtgtaacttgggcgaggcatttgctatttgtttgctcttgccgcgaatatttttatcttacatgtataccgaaccctgttgtaacagttgtaaacgcggaaaacaaaattcgaacatttgacagaatttgctccgtagaacattggattgttgggtttgagttttacattgcattcctaatggatgaatctatcaggattcaggcttccccaacaactataatatctcatttcatatttcaaactttgctctacaaacactggatttaggcttctactgtaactattttatctcatttcatatttcaaactttacaaacattgttatttttttttgacgaaggggcagagcccctatttcattaggaaatag

SEQ ID NO: 59073 - DNA, 3471 bp, Zea Mays
acacgacatccaaatcgaagaacacgtcgctgacacaccacctctccctcgccgcattctccactctctggtcttcgccgtggtcggtgccttccaaatccaaaaaaccccaagccctagctgtagccgtcccccaaggtcgccgagatgtcttcgtggctgcgcagcgcggtgagccgggcagtggaggccggcggccgcagcggcgtcgcccgcgcggtcaaggggtacgccgataccgtcgcgcaccacgccggtcaggccgtcgcggacatcctccacgaccgcatgaactataaaagtttcaagaagacagtagcacgattggaagaggctgctgtatcatgccgtgggggtgaaagagttgaattgttgaaacgttggttaggagcattgcaagatgttgatgctgaaaatggaagttcagatttaaaggtgtctgaagctaatgacccttctggtgaaatggacactttgaaagcacaaactgttttgttctatgatgctgatattgatggtgcacctatgaatttttgtgatgtattcttgtacagccaagcacttgaaggtattacattgtccatgattctcgaacctccttctgaggaggaagtttcactgcttttggaaatattcagcatatgccttactggagggaaagaagtgaacaaagaaatcatgagtaatgtacaagacttggccaaggcattttcagaatacaaagatgaagtcctggtgaaacgtgaagagctgcttgagtatgcccaaagtatcatttcaggactgaagagaaatgctgacattgtgaggatagatgctgaaaccctagaattgcagagaaaactagacgagaagcagaaatcacgaggtcaatcacctgaatatcaagataaaacgtcagataagattgctgctgcaaatcttgaggtcttcaaagaagcacttggtgaactccgcttatgctctagagttgaagaacttctgctgaagaagaaatcaatcactcttggtgactccctggagattcattctcagaaggtagataaactaaaggttttagcagattccctggcatgttcatcctccaaagcagaacagcgtattttggagcacaggcgccagaaagaagatgctctcaactttcgtgtgaaaaaagagaatgaagtcagtgtttctgaaaaggaattgcttgatgagattactgaattggaaaagcaaagagatgagcttgaggcacagctgaagaaggttaatatatcactaaatgctgctgctggacggctcaaacaaactagggaagagagggaccaatttgacgaagcaaacaatcaaatcatatttagcttgaaaaaaaaggaggatgacctctcaaaatccattgccttatgtaatgtggaatccaatgttgtcaagatctggatcggtttccttgaggactcgtggaagctgcagtcctcatacaatgaacagaaggataataaaacgtgtgatgagctggagaaatgtgtgagtgattttctaaagttgacaaaacatcatctttcagcattcaaggaagtcctaagccaattgattgagaatatcgaaacatatgtcggtaacttggctgtcttaacctcaagggaagaggaaaaagaacatggggatgatgaggcatctgagaggacagatccacgtaaatcccttgaagaggaatatctagaaacagaaaagaaggttatactcagtcaccttactttaacttggtctcatacatggttcttaaagcggtaaggcgaggtaaggcattgaaccaccgctggacgcctaggcgccgccaaaggcgagcaaggcgacaccttatcaacatgagaaccagcaaaacagcagcatggaggaggaacaaaaagaaaaaaaaagaaaaaaaggaaatggaaaaaggagaaggggtaggagccccggccaaccggcaagcccatatgctcactctgtttccctctctctcccccgattgagctgctgctttccttctcccccttttcagccacggcttccttctctcccccagattcagccgctgccactcatgatttcgccgccgccacccccgatttggttgccgctggccccgattcggccaccgctgcccctgatctcgccgccgctgccccctgaatcctcgatttgccgcctccagccccgattcggccgccgctggcccgattcggcgccgccccttttcatcccctctgttctcttgctgatttagttaggcgacggggatgcctaggagagttggggggcgcctagacgcctaggcgacacctttaaaacagaggtctcatagttctagttcattcataacatgatttgatatgcctgaagaacccaaagttgaattgacatctatcagtcgccatatgtattacttatagcaactcgcccaactcttcagttttgtaacttctaaaccttagagaaactagaccaaactgtcttatgtattgacaatattttcagattataattgcgttcagcatagttgatcacataaagaaattgttttattctggggaaggggctgattcaaggagagatgacccagaggtcaagagcttaattgaggagattgagaaaatgagggaatcgttcgagtctatagaaaggccaacactaagcatagaatctgagaaagcaaaaccactacctgttgagggatcgaaactgagtccttcacctcttcaggctcctgctaccccaaaagctgcacacgttgactcaccaaaatctcccatgaaacctgagcagcatttcgattcagatgcggagcttgcaaccctgggatcagagatcgggaaagaagacaaagagtactcagttgaggagataagcgggtgggagtttgacgagctcgaagaggaccttaagagctgacacaaagaatcgacaaacagaacacaattcgatttggttatcttcactgacatgtattatttgtctgggccttgcgtgggcaagaaatacacactggttgatatgtacatagtgctgtttgattgtgtattgtcgcgcactcgcgctgtcaatttgtcactgtcttaagatatacggactgagctggtgtaacttgggcgaggcatttgctatttgtttgctcttgccgcgaatatttttatcttacatgtataccgaaccctgttgtaacagttgtaaacgcggaaaacaaaattcgaacatttgacagaatttgctccgtagaacattggattgttgggtttgagttttacattgcattcctaatggatgaatctatcaggattcaggcttccccaacaactataatatctcatttcatatttcaaactttgctctacaaacactggatttaggcttctactgtaactattttatctcatttcatatttcaaactttacaaacattgttatttttttttgacgaaggggcagagcccctatttcattaggaaatag

SEQ ID NO: 59074 - DNA, 2692 bp, Zea Mays
acacgacatccaaatcgaagaacacgtcgctgacacaccacctctccctcgccgcattctccactctctggtcttcgccgtggtcggtgccttccaaatccaaaaaaccccaagccctagctgtagccgtcccccaaggtcgccgagatgtcttcgtggctgcgcagcgcggtgagccgggcagtggaggccggcggccgcagcggcgtcgcccgcgcggtcaaggggtacgccgataccgtcgcgcaccacgccggtcaggccgtcgcggacatcctccacgaccgcatgaactataaaagtttcaagaagacagtagcacgattggaagaggctgctgtatcatgccgtgggggtgaaagagttgaattgttgaaacgttggttaggagcattgcaagatgttgatgctgaaaatggaagttcagatttaaaggtgtctgaagctaatgacccttctggtgaaatggacactttgaaagcacaaactgttttgttctatgatgctgatattgatggtgcacctatgaatttttgtgatgtattcttgtacagccaagcacttgaagcatatgccttactggagggaaagaagtgaacaaagaaatcatgagtaatgtacaagacttggccaaggcattttcagaatacaaagatgaagtcctggtgaaacgtgaagagctgcttgagtatgcccaaagtatcatttcaggactgaagagaaatgctgacattgtgaggatagatgctgaaaccctagaattgcagagaaaactagacgagaagcagaaatcacgaggtcaatcacctgaatatcaagataaaacgtcagataagattgctgctgcaaatcttgaggtcttcaaagaagcacttggtgaactccgcttatgctctagagttgaagaacttctgctgaagaagaaatcaatcactcttggtgactccctggagattcattctcagaaggtagataaactaaaggttttagcagattccctggcatgttcatcctccaaagcagaacagcgtattttggagcacaggcgccagaaagaagatgctctcaactttcgtgtgaaaaaagagaatgaagtcagtgtttctgaaaaggaattgcttgatgagattactgaattggaaaagcaaagagatgagcttgaggcacagctgaagaaggttaatatatcactaaatgctgctgctggacggctcaaacaaactagggaagagagggaccaatttgacgaagcaaacaatcaaatcatatttagcttgaaaaaaaaggaggatgacctctcaaaatccattgccttatgtaatgtggaatccaatgttgtcaagatctggatcggtttccttgaggactcgtggaagctgcagtcctcatacaatgaacagaaggataataaaacgtgtgatgagctggagaaatgtgtgagtgattttctaaagttgacaaaacatcatctttcagcattcaaggaagtcctaagccaattgattgagaatatcgaaacatatgtcggtaacttggctgtcttaacctcaaggtattttagttcttttcctaaagtcatgtactttgttgtccaatttgtttggtaggtttttacttgccttgtagggaagaggaaaaagaacatggggatgatgaggcatctgagaggacagatccacgtaaatcccttgaagaggaatatctagaaacagaaaagaagattataattgcgttcagcatagttgatcacataaagaaattgttttattctggggaaggggctgattcaaggagagatgacccagaggtcaagagcttaattgaggagattgagaaaatgagggaatcgttcgagtctatagaaaggccaacactaagcatagaatctgagaaagcaaaaccactacctgttgagggatcgaaactgagtccttcacctcttcaggctcctgctaccccaaaagctgcacacgttgactcaccaaaatctcccatgaaacctgagcagcatttcgattcagatgcggagcttgcaaccctgggatcagagatcgggaaagaagacaaagagtactcagttgaggagataagcgggtgggagtttgacgagctcgaagaggaccttaagagctgacacaaagaatcgacaaacagaacacaattcgatttggttatcttcactgacatgtattatttgtctgggccttgcgtgggcaagaaatacacactggttgatatgtacatagtgctgtttgattgtgtattgtcgcgcactcgcgctgtcaatttgtcactgtcttaagatatacggactgagctggtgtaacttgggcgaggcatttgctatttgtttgctcttgccgcgaatatttttatcttacatgtataccgaaccctgttgtaacagttgtaaacgcggaaaacaaaattcgaacatttgacagaatttgctccgtagaacattggattgttgggtttgagttttacattgcattcctaatggatgaatctatcaggattcaggcttccccaacaactataatatctcatttcatatttcaaactttgctctacaaacactggatttaggcttctactgtaactattttatctcatttcatatttcaaactttacaaacattgttatttttttttgacgaaggggcagagcccctatttcattaggaaatag

SEQ ID NO: 59075 - DNA, 2691 bp, Zea Mays
acacgacatccaaatcgaagaacacgtcgctgacacaccacctctccctcgccgcattctccactctctggtcttcgccgtggtcggtgccttccaaatccaaaaaaccccaagccctagctgtagccgtcccccaaggtcgccgagatgtcttcgtggctgcgcagcgcggtgagccgggcagtggaggccggcggccgcagcggcgtcgcccgcgcggtcaaggggtacgccgataccgtcgcgcaccacgccggtcaggccgtcgcggacatcctccacgaccgcatgggcgttcagaactataaaagtttcaagaagacagtagcacgattggaagaggctgctgtatcatgccgtgggggtgaaagagttgaattgttgaaacgttggttaggagcattgcaagatgttgatgctgaaaatggaagttcagatttaaaggtgtctgaagctaatgacccttctggtgaaatggacactttgaaagcacaaactgttttgttctatgatgctgatattgatggtgcacctatgaatttttgtgatgtattcttgtacagccaagcacttgaaggtattacattgtccatgattctcgaacctccttctgaggaggaagtttcactgcttttggaaatattcagcatatgccttactggagggaaagaagtgaacaaagaaatcatgagtaatgtacaagacttggccaaggcattttcagaatacaaagatgaagtcctggtgaaacgtgaagagctgcttgagtatgcccaaagtatcatttcaggactgaagagaaatgctgacattgtgaggatagatgctgaaaccctagaattgcagagaaaactagacgagaagcagaaatcacgaggtcaatcacctgaatatcaagataaaacgtcagataagattgctgctgcaaatcttgaggtcttcaaagaagcacttggtgaactccgcttatgctctagagttgaagaacttctgctgaagaagaaatcaatcactcttggtgactccctggagattcattctcagaaggtagataaactaaaggttttagcagattccctggcatgttcatcctccaaagcagaacagcgtattttggagcacaggcgccagaaagaagatgctctcaactttcgtgtgaaaaaagagaatgaagtcagtgtttctgaaaaggaattgcttgatgagattactgaattggaaaagcaaagagatgagcttgaggcacagctgaagaaggttaatatatcactaaatgctgctgctggacggctcaaacaaactagggaagagagggaccaatttgacgaagcaaacaatcaaatcatatttagcttgaaaaaaaaggaggatgacctctcaaaatccattgccttatgtaatgtggaatccaatgttgtcaagatctggatcggtttccttgaggactcgtggaagctgcagtcctcatacaatgaacagaaggataataaaacgtgtgatgagctggagaaatgtgtgagtgattttctaaagttgacaaaacatcatctttcagcattcaaggaagtcctaagccaattgattgagaatatcgaaacatatgtcggtttttacttgccttgtagggaagaggaaaaagaacatggggatgatgaggcatctgagaggacagatccacgtaaatcccttgaagaggaatatctagaaacagaaaagaagattataattgcgttcagcatagttgatcacataaagaaattgttttattctggggaaggggctgattcaaggagagatgacccagaggtcaagagcttaattgaggagattgagaaaatgagggaatcgttcgagtctatagaaaggccaacactaagcatagaatctgagaaagcaaaaccactacctgttgagggatcgaaactgagtccttcacctcttcaggctcctgctaccccaaaagctgcacacgttgactcaccaaaatctcccatgaaacctgagcagcatttcgattcagatgcggagcttgcaaccctgggatcagagatcgggaaagaagacaaagagtactcagttgaggagataagcgggtgggagtttgacgagctcgaagaggaccttaagagctgacacaaagaatcgacaaacagaacacaattcgatttggttatcttcactgacatgtattatttgtctgggccttgcgtgggcaagaaatacacactggttgatatgtacatagtgctgtttgattgtgtattgtcgcgcactcgcgctgtcaatttgtcactgtcttaagatatacggactgagctggtgtaacttgggcgaggcatttgctatttgtttgctcttgccgcgaatatttttatcttacatgtataccgaaccctgttgtaacagttgtaaacgcggaaaacaaaattcgaacatttgacagaatttgctccgtagaacattggattgttgggtttgagttttacattgcattcctaatggatgaatctatcaggattcaggcttccccaacaactataatatctcatttcatatttcaaactttgctctacaaacactggatttaggcttctactgtaactattttatctcatttcatatttcaaactttacaaacattgttatttttttttgacgaaggggcagagcccctatttcattaggaaatag

SEQ ID NO: 59076 - DNA, 2607 bp, Zea Mays
cttaagttgcaaactggagcttcagttggtgcagtggtggctatggcagccagtgcccctatctcgctctgctccgaagtccgaactgaagcttgggtgcttcagtgtgtcgaaaattcctcttcatggcgttcagaactataaaagtttcaagaagacagtagcacgattggaagaggctgctgtatcatgccgtgggggtgaaagagttgaattgttgaaacgttggttaggagcattgcaagatgttgatgctgaaaatggaagttcagatttaaaggtgtctgaagctaatgacccttctggtgaaatggacactttgaaagcacaaactgttttgttctatgatgctgatattgatggtgcacctatgaatttttgtgatgtattcttgtacagccaagcacttgaaggtattacattgtccatgattctcgaacctccttctgaggaggaagtttcactgcttttggaaatattcagcatatgccttactggagggaaagaagtgaacaaagaaatcatgagtaatgtacaagacttggccaaggcattttcagaatacaaagatgaagtcctggtgaaacgtgaagagctgcttgagtatgcccaaagtatcatttcaggactgaagagaaatgctgacattgtgaggatagatgctgaaaccctagaattgcagagaaaactagacgagaagcagaaatcacgaggtcaatcacctgaatatcaagataaaacgtcagataagattgctgctgcaaatcttgaggtcttcaaagaagcacttggtgaactccgcttatgctctagagttgaagaacttctgctgaagaagaaatcaatcactcttggtgactccctggagattcattctcagaaggtagataaactaaaggttttagcagattccctggcatgttcatcctccaaagcagaacagcgtattttggagcacaggcgccagaaagaagatgctctcaactttcgtgtgaaaaaagagaatgaagtcagtgtttctgaaaaggaattgcttgatgagattactgaattggaaaagcaaagagatgagcttgaggcacagctgaagaaggttaatatatcactaaatgctgctgctggacggctcaaacaaactagggaagagagggaccaatttgacgaagcaaacaatcaaatcatatttagcttgaaaaaaaaggaggatgacctctcaaaatccattgccttatgtaatgtggaatccaatgttgtcaagatctggatcggtttccttgaggactcgtggaagctgcagtcctcatacaatgaacagaaggataataaaacgtgtgatgagctggagaaatgtgtgagtgattttctaaagttgacaaaacatcatctttcagcattcaaggaagtcctaagccaattgattgagaatatcgaaacatatgtcggtaacttggctgtcttaacctcaaggtattttagttcttttcctaaagtcatgtactttgttgtccaatttgtttggtaggtttttacttgccttgtagggaagaggaaaaagaacatggggatgatgaggcatctgagaggacagatccacgtaaatcccttgaagaggaatatctagaaacagaaaagaagattataattgcgttcagcatagttgatcacataaagaaattgttttattctggggaaggggctgattcaaggagagatgacccagaggtcaagagcttaattgaggagattgagaaaatgagggaatcgttcgagtctatagaaaggccaacactaagcatagaatctgagaaagcaaaaccactacctgttgagggatcgaaactgagtccttcacctcttcaggctcctgctaccccaaaagctgcacacgttgactcaccaaaatctcccatgaaacctgagcagcatttcgattcagatgcggagcttgcaaccctgggatcagagatcgggaaagaagacaaagagtactcagttgaggagataagcgggtgggagtttgacgagctcgaagaggaccttaagagctgacacaaagaatcgacaaacagaacacaattcgatttggttatcttcactgacatgtattatttgtctgggccttgcgtgggcaagaaatacacactggttgatatgtacatagtgctgtttgattgtgtattgtcgcgcactcgcgctgtcaatttgtcactgtcttaagatatacggactgagctggtgtaacttgggcgaggcatttgctatttgtttgctcttgccgcgaatatttttatcttacatgtataccgaaccctgttgtaacagttgtaaacgcggaaaacaaaattcgaacatttgacagaatttgctccgtagaacattggattgttgggtttgagttttacattgcattcctaatggatgaatctatcaggattcaggcttccccaacaactataatatctcatttcatatttcaaactttgctctacaaacactggatttaggcttctactgtaactattttatctcatttcatatttcaaactttacaaacattgttatttttttttgacgaaggggcagagcccctatttcattaggaaatag

SEQ ID NO: 59077 - DNA, 2129 bp, Zea Mays
gtggacttcaggcttccatacgagatctgataataataggagtatgcagtctcctgctgatacttttattggttgcattatatgatgattcctacttttaataacatagttgtagtactttacaacaaaagattgacaaaaaaccacttgtgtctttgatggagctgtccctaatgtgatctcagtattgagttgagtggaggggtccctgctgctagctgcaggagagcttatggagaagctggctggaaaacatgttttggccctgttaggctgtgtttttgttgttcactataatgttttggtccggtttcttatggactagtgacctctactttctcttttctattgacctctactttctctcttctataatgaaatgaaactcagtgtcctgtgttctctagaaaaaagtatgtattcttaggtagtttcgcttggttagagtttatgtggcccatagctttgtctggttcttttattttgttattgttgattgctgtaggactttcaggcctacctaaatattctagttgatgctctgtaatgctaacagcactcacaaattaccaggtagataaactaaaggttttagcagattccctggcatgttcatcctccaaagcagaacagcgtattttggagcacaggcgccagaaagaagatgctctcaactttcgtgtgaaaaaagagaatgaagtcagtgtttctgaaaaggaattgcttgatgagattactgaattggaaaagcaaagagatgagcttgaggcacagctgaagaaggttaatatatcactaaatgctgctgctggacggctcaaacaaactagggaagagagggaccaatttgacgaagcaaacaatcaaatcatatttagcttgaaaaaaaaggaggatgacctctcaaaatccattgccttatgtaatgtggaatccaatgttgtcaagatctggatcggtttccttgaggactcgtggaagctgcagtcctcatacaatgaacagaaggataataaaacgtgtgatgagctggagaaatgtgtgagtgattttctaaagttgacaaaacatcatctttcagcattcaaggaagtcctaagccaattgattgagaatatcgaaacatatgtcggtaacttggctgtcttaacctcaagattataattgcgttcagcatagttgatcacataaagaaattgttttattctggggaaggggctgattcaaggagagatgacccagaggtcaagagcttaattgaggagattgagaaaatgagggaatcgttcgagtctatagaaaggccaacactaagcatagaatctgagaaagcaaaaccactacctgttgagggatcgaaactgagtccttcacctcttcaggctcctgctaccccaaaagctgcacacgttgactcaccaaaatctcccatgaaacctgagcagcatttcgattcagatgcggagcttgcaaccctgggatcagagatcgggaaagaagacaaagagtactcagttgaggagataagcgggtgggagtttgacgagctcgaagaggaccttaagagctgacacaaagaatcgacaaacagaacacaattcgatttggttatcttcactgacatgtattatttgtctgggccttgcgtgggcaagaaatacacactggttgatatgtacatagtgctgtttgattgtgtattgtcgcgcactcgcgctgtcaatttgtcactgtcttaagatatacggactgagctggtgtaacttgggcgaggcatttgctatttgtttgctcttgccgcgaatatttttatcttacatgtataccgaaccctgttgtaacagttgtaaacgcggaaaacaaaattcgaacatttgacagaatttgctccgtagaacattggattgttgggtttgagttttacattgcattcctaatggatgaatctatcaggattcaggcttccccaacaactataatatctcatttcatatttcaaactttgctctacaaacactggatttaggcttctactgtaactattttatctcatttcatatttcaaactttacaaacattgttatttttttttgacgaaggggcagagcccctatttcattaggaaatag

SEQ ID NO: 59078 - DNA, 2599 bp, Zea Mays
cgccacttcttcctcctgtcttctcgctcccgtcgacccgacagcctacaacccagcaggcgccacgagccttacccccttgctctctccacccacccctccccatcaaacggtgctgggcgtcctaggttgcctcgcccttcacccgtcgtgagtttgacactctccctcccggacctctcgtccctgccgttgcccctgctggcccaccttgccctggggcacgaccaccgactcactttgccgccgatccatacgccggttcatgtccgaccaacgaccgctaccctcctcggatcccgtccaccgccctccccgcatcctggccggccgctgctctcccgccgcaggctcccgttcggcggcccgcgctccccgcgaacggcggctggcagcaagccgctggcggcgcacgacatctccacgtccatgtggcacgacacacgtctctgggacgtgctgctccgatgcggtatcaagggtgccgcggacagcgtcaccaacgtgtgatttgtggcgccgaggacctccccggtggggtcgacgacaactgcaagtacgacaccagcctgcaacgcatctcggatctcggattttttgccaccaatcagcaagagcggcaggagggagcagagctggagatggggcggtgctggtgctgctgccggtgcctaaagctgctctgcttggttctcctcccaccgatcagcttgtgcctcggccgcagctgctgctccaatctgtccccattctcatcgtcgaagatctgctctgtcttctatggtgcctagagtcagccttcagggagagaccgctcccgcaggccaagaagtcgtggggctccgagattgccagtagcggtggccggagctcctccgatgtttccacaccatatgctacaacgttttgtgcttccacgccggatgccacaatagacaagctgaggaagaaaggttaaaattgttgagacaaaggatatatgtaccatatcactgctcctctatcaagcatcgggttctcattctgtatatagttttaccattattacatccattttccttatcaaatgaatatccattttatccctaggaagaatgggataaatgttattaattaggtacgtgatattcgtgaaaggcactgtgactttactatatgaatatgctcaaatcactttaacataaaactctttatataacagatggtaacagaactgttacttatatttcctccaaccattctagacgatttaccctacaatctttcagttccttcattaatacttttcttttcaattcatgcctgatttcctatacaacacacaaatgactatatgtactaaggatagaaataaaactgctacttatgttttatagctccacctagtttagaatcatagattttcctccctgtgcaagcattatattattgtttttttggattggttaactaacagttctcgatgagtatttgctgcaaccactgttgttctttttcctttttaatctattcaaggattgctagtggccgaagggcactgccaccttcttttgcttttacgtgatgcaaggccattgttatgtattccatgtttattattacttcgaacatggctagaatacaatggttcagcatcagcttaatccatggaaggtatggggttggattgtcctcagctgtttattaatcctgtagcacgtcatttactgactattgtgtttaaatggggaaggatgatggagatacaataagcacgaaagtcattattaattttagccttggcgctatatgtttgttagccgaggttacattgttcttcttttggaatagacaaaaaaatgagagccttcactgttgtttatttagtagaggttgagatcgtatttcaaattattaagaacactactgttttagattctttcaaatattcatacgtttgaaaaaactcgcattctccatgattttttggtcatagagaatgtaataaaattttggtaaatagcattgatactcacatactatattattttcctttgtgttgaggattaatgcaaccacagtgttgtggtttgaacactaatcgagaaggcctctttactgttgtctagatctgttataattttcatttacatgcttccatacactttaatattagtaatacaattgtagttagcagattaaaaacttagttaaacatatgtgtactcacgtatttattgtttttctgtacatcaaggattcccatggacatgtggttgtccattgcacatatattgataggaatgttcagctcctttttaggtaagttctaagcactacctctttcagtgacaacatgtacactcatgtatttatattgcgatgttgcttgctttcgaccattgtgacacggacacaccgccaccaatatttttatctaacacgattaagaagtaggaatgcaatgttcttttagcatttttcctttggtttggaggggacccaagaaatgctacatgctttatttgcttctaatgaaaatgattgatctgtcatcggttccaagtgatagatctgtcggctaatcgtctcaaggagaaggatccatccctgattctgt

SEQ ID NO: 59079 - DNA, 3844 bp, Zea Mays
cgccacttcttcctcctgtcttctcgctcccgtcgacccgacagcctacaacccagcaggcgccacgagccttacccccttgctctctccacccacccctccccatcaaacggtgctgggcgtcctaggttgcctcgcccttcacccgtcgtgagtttgacactctccctcccggacctctcgtccctgccgttgcccctgctggcccaccttgccctggggcacgaccaccgactcactttgccgccgatccatacgccggttcatgtccgaccaacgaccgctaccctcctcggatcccgtccaccgccctccccgcatcctggccggccgctgctctcccgccgcaggctcccgttcggcggcccgcgctccccgcgaacggcggctggcagcaagccgctggcggcgcacgacatctccacgtccatgtggcacgacacacgtctctgggacgtgctgctccgatgcggtatcaagggtgccgcggacagcgtcaccaacgtgtgatttgtggcgccgaggacctccccggtggggtcgacgacaactgcaagtacgacaccagcctgcaacgcatctcggatctcggattttttgccaccaatcagcaagagcggcaggagggagcagagctggagatggggcggtgctggtgctgctgccggtgcctaaagctgctctgcttggttctcctcccaccgatcagcttgtgcctcggccgcagctgctgctccaatctgtccccattctcatcgtcgaagatctgctctgtcttctatggtgcctagagtcagccttcagggagagaccgctcccgcaggccaagaagtcgtggggctccgagattgccagtagcggtggccggagctcctccgatgtttccacaccatatgctacaacgttttgtgcttccacgccggatgccacaatagacaagctgaggaagaaaggttaaaattgttgagacaaaggatatatgtaccatatcactgctcctctatcaagcatcgggttctcattctgtatatagttttaccattattacatccattttccttatcaaatgaatatccattttatccctaggaagaatgggataaatgttattaattaggtacgtgatattcgtgaaaggcactgtgactttactatatgaatatgctcaaatcactttaacataaaactctttatataacagatggtaacagaactgttacttatatttcctccaaccattctagacgatttaccctacaatctttcagttccttcattaatacttttcttttcaattcatgcctgatttcctatacaacacacaaatgactatatgtactaaggatagaaataaaactgctacttatgttttatagctccacctagtttagaatcatagattttcctccctgtgcaagcattatattattgtttttttggattggttaactaacagttctcgatgagtatttgctgcaaccactgttgttctttttcctttttaatctattcaaggattgctagtggccgaagggcactgccaccttcttttgcttttacgtgatgcaaggccattgttatgtattccatgtttattattacttcgaacatggctagaatacaatggttcagcatcagcttaatccatggaaggtatggggttggattgtcctcagctgtttattaatcctgtagcacgtcatttactgactattgtgtttaaatggggaaggatgatggagatacaataagcacgaaagtcattattaattttagccttggcgctatatgtttgttagccgaggttacattgttcttcttttggaatagacaaaaaaatgagagccttcactgttgtttatttagtagaggttgagatcgtatttcaaattattaagaacactactgttttagattctttcaaatattcatacgtttgaaaaaactcgcattctccatgattttttggtcatagagaatgtaataaaattttggtaaatagcattgatactcacatactatattattttcctttgtgttgaggattaatgcaaccacagtgttgtggtttgaacactaatcgagaaggcctctttactgttgtctagatctgttataattttcatttacatgcttccatacactttaatattagtaatacaattgtagttagcagattaaaaacttagttaaacatatgtgtactcacgtatttattgtttttctgtacatcaaggattcccatggacatgtggttgtccattgcacatatattgataggaatgttcagctcctttttaggtccaccacatatatatcaatggaaatgcaatgtagatatttaagtagtgagtacataaagcgcttaaaggtgccgttgctcaagttgcagccggaggttgcagctacacaggacacaaattcaggtgcattttacacctacatatcttcctacaaacatgttttttctcctaacattttgtatgttaccgtaaaattactttgtacactatagatataaacggtttcatctcagatgacacaacaactgaaatattttgctttgacaacattgctaaacatattcttggaaaaccttatgaaccctgatgttgtgaacacctttatgcagtagatagctaatgtatttttatgatattaattatgcccctaggacatgttgctacaacagacccttctgcgtgtaagtataggactataggtgataggttgatatctcaggctaccaaccaacaaactttctagaaacgtacttatgctggtgagtacaatgctgcttggaacatgttgaactaatatggttaatatattttttatggcttttgttgtactcgattatacaagcctacatatattgcatcattagtacaagcaaatcttctatacatgggcttctacctgccaactcttttctattgactttacactatgagtttcatgataacttacttatcatgtttcttacatacatatactgagttttatattaacttatatatatcatgtttctgtatattttaaggtcctgcaatctaatttgacatcgcacatcgcgcgctggacgcgcgacatacactagtaatacaatccatattcctttgttttcaattttatgaccttatcactaggtgcatcatagtcatacgagccagcttgcagttttctgcgtggttcatcatgcaccttctcactcgattaattttgtgccgacagaaaaatggttgtggctcttatgtttcagtgtttctaagtagataaaagtagtaatggatgaacgaagagggacataacagatggtgtcctgatacgcacttatcttatcgaggaagaaaagattcaggacaggacgaatagaggagagcagtgtgaggtgagctcgaggatccaactctgtctccacgatcgctaggtgtgaaattctcgggggtgtggtgagagtgaggagcatccagctctttatctccacctgctgctggtgtgagtgtgacactgatgatgatggggtaactgttttcaagtcgttcgaataatcacgattaattgtcctagtaggtttagatcaatcatgattaatcgtccaagtcgccgcccaagttcgttagtcagaacgaccaacaagtcgtccgacttgaaaacaatgtggtcacactgtcacatggcatcagcctttaccgctattgttggtaaaggttgttggctaagtcgctatgctcctggtaaaccggattatataatctggattatataatctatacaaaataagctagactatataatcgtgcaagaaaacaaacaagccttaagtatacaatacttaaagtag

SEQ ID NO: 59080 - DNA, 3261 bp, Zea Mays
cgccacttcttcctcctgtcttctcgctcccgtcgacccgacagcctacaacccagcaggcgccacgagccttacccccttgctctctccacccacccctccccatcaaacggtgctgggcgtcctaggttgcctcgcccttcacccgtcgtgagtttgacactctccctcccggacctctcgtccctgccgttgcccctgctggcccaccttgccctggggcacgaccaccgactcactttgccgccgatccatacgccggttcatgtccgaccaacgaccgctaccctcctcggatcccgtccaccgccctccccgcatcctggccggccgctgctctcccgccgcaggctcccgttcggcggcccgcgctccccgcgaacggcggctggcagcaagccgctggcggcgcacgacatctccacgtccatgtggcacgacacacgtctctgggacgtgctgctccgatgcggtatcaagggtgccgcggacagcgtcaccaacgtgtgatttgtggcgccgaggacctccccggtggggtcgacgacaactgcaagtacgacaccagcctgcaacgcatctcggatctcggattttttgccaccaatcagcaagagcggcaggagggagcagagctggagatggggcggtgctggtgctgctgccggtgcctaaagctgctctgcttggttctcctcccaccgatcagcttgtgcctcggccgcagctgctgctccaatctgtccccattctcatcgtcgaagatctgctctgtcttctatggtgcctagagtcagccttcagggagagaccgctcccgcaggccaagaagtcgtggggctccgagattgccagtagcggtggccggagctcctccgatgtttccacaccatatgctacaacgttttgtgcttccacgccggatgccacaatagacaagctgaggaagaaaggttaaaattgttgagacaaaggatatatgtaccatatcactgctcctctatcaagcatcgggttctcattctgtatatagttttaccattattacatccattttccttatcaaatgaatatccattttatccctaggaagaatgggataaatgttattaattaggtacgtgatattcgtgaaaggcactgtgactttactatatgaatatgctcaaatcactttaacataaaactctttatataacagatggtaacagaactgttacttatatttcctccaaccattctagacgatttaccctacaatctttcagttccttcattaatacttttcttttcaattcatgcctgatttcctatacaacacacaaatgactatatgtactaaggatagaaataaaactgctacttatgttttatagctccacctagtttagaatcatagattttcctccctgtgcaagcattatattattgtttttttggattggttaactaacagttctcgatgagtatttgctgcaaccactgttgttctttttcctttttaatctattcaaggattgctagtggccgaagggcactgccaccttcttttgcttttacgtgatgcaaggccattgttatgtattccatgtttattattacttcgaacatggctagaatacaatggttcagcatcagcttaatccatggaaggattcccatggacatgtggttgtccattgcacatatattgataggaatgttcagctcctttttaggtccaccacatatatatcaatggaaatgcaatgtagatatttaagtagtgagtacataaagcgcttaaaggtgccgttgctcaagttgcagccggaggttgcagctacacaggacacaaattcaggtgcattttacacctacatatcttcctacaaacatgttttttctcctaacattttgtatgttaccgtaaaattactttgtacactatagatataaacggtttcatctcagatgacacaacaactgaaatattttgctttgacaacattgctaaacatattcttggaaaaccttatgaaccctgatgttgtgaacacctttatgcagtagatagctaatgtatttttatgatattaattatgcccctaggacatgttgctacaacagacccttctgcgtgtaagtataggactataggtgataggttgatatctcaggctaccaaccaacaaactttctagaaacgtacttatgctggtgagtacaatgctgcttggaacatgttgaactaatatggttaatatattttttatggcttttgttgtactcgattatacaagcctacatatattgcatcattagtacaagcaaatcttctatacatgggcttctacctgccaactcttttctattgactttacactatgagtttcatgataacttacttatcatgtttcttacatacatatactgagttttatattaacttatatatatcatgtttctgtatattttaaggtcctgcaatctaatttgacatcgcacatcgcgcgctggacgcgcgacatacactagtaatacaatccatattcctttgttttcaattttatgaccttatcactaggtgcatcatagtcatacgagccagcttgcagttttctgcgtggttcatcatgcaccttctcactcgattaattttgtgccgacagaaaaatggttgtggctcttatgtttcagtgtttctaagtagataaaagtagtaatggatgaacgaagagggacataacagatggtgtcctgatacgcacttatcttatcgaggaagaaaagattcaggacaggacgaatagaggagagcagtgtgaggtgagctcgaggatccaactctgtctccacgatcgctaggtgtgaaattctcgggggtgtggtgagagtgaggagcatccagctctttatctccacctgctgctggtgtgagtgtgacactgatgatgatggggtaactgttttcaagtcgttcgaataatcacgattaattgtcctagtaggtttagatcaatcatgattaatcgtccaagtcgccgcccaagttcgttagtcagaacgaccaacaagtcgtccgacttgaaaacaatgtggtcacactgtcacatggcatcagcctttaccgctattgttggtaaaggttgttggctaagtcgctatgctcctggtaaaccggattatataatctggattatataatctatacaaaataagctagactatataatcgtgcaagaaaacaaacaagccttaagtatacaatacttaaagtag

SEQ ID NO: 59081 - DNA, 2966 bp, Zea Mays
cgccacttcttcctcctgtcttctcgctcccgtcgacccgacagcctacaacccagcaggcgccacgagccttacccccttgctctctccacccacccctccccatcaaacggtgctgggcgtcctaggttgcctcgcccttcacccgtcgtgagtttgacactctccctcccggacctctcgtccctgccgttgcccctgctggcccaccttgccctggggcacgaccaccgactcactttgccgccgatccatacgccggttcatgtccgaccaacgaccgctaccctcctcggatcccgtccaccgccctccccgcatcctggccggccgctgctctcccgccgcaggctcccgttcggcggcccgcgctccccgcgaacggcggctggcagcaagccgctggcggcgcacgacatctccacgtccatgtggcacgacacacgtctctgggacgtgctgctccgatgcggtatcaagggtgccgcggacagcgtcaccaacgtgtgatttgtggcgccgaggacctccccggtggggtcgacgacaactgcaagtacgacaccagcctgcaacgcatctcggatctcggattttttgccaccaatcagcaagagcggcaggagggagcagagctggagatggggcggtgctggtgctgctgccggtgcctaaagctgctctgcttggttctcctcccaccgatcagcttgtgcctcggccgcagctgctgctccaatctgtccccattctcatcgtcgaagatctgctctgtcttctatggtgcctagagtcagccttcagggagagaccgctcccgcaggccaagaagtcgtggggctccgagattgccagtagcggtggccggagctcctccgatgtttccacaccatatgctacaacgttttgtgcttccacgccggatgccacaatagacaagctgaggaagaaaggttaaaattgttgagacaaaggatatatgtaccatatcactgctcctctatcaagcatcgggttctcattctgtatatagttttaccattattacatccattttccttatcaaatgaatatccattttatccctaggaagaatgggataaatgttattaattaggtacgtgatattcgtgaaaggcactgtgactttactatatgaatatgctcaaatcactttaacataaaactctttatataacagatggtaacagaactgttacttatatttcctccaaccattctagacgatttaccctacaatctttcagttccttcattaatacttttcttttcaattcatgcctgatttcctatacaacacacaaatgactatatgtactaaggatagaaataaaactgctacttatgttttatagctccacctagtttagaatcatagattttcctccctgtgcaagcattatattattgtttttttggattggttaactaacagttctcgatgagtatttgctgcaaccactgttgttctttttcctttttaatctattcaaggattgctagtggccgaagggcactgccaccttcttttgcttttacgtgatgcaaggccattgttatgtattccatgtttattattacttcgaacatggctagaatacaatggttcagcatcagcttaatccatggaaggtatggggttggattgtcctcagctgtttattaatcctgtagcacgtcatttactgactattgtgtttaaatggggaaggatgatggagatacaataagcacgaaagtcattattaattttagccttggcgctatatgtttgttagccgaggttacattgttcttcttttggaatagacaaaaaaatgagagccttcactgttgtttatttagtagaggttgagatcgtatttcaaattattaagaacactactgttttagattctttcaaatattcatacgtttgaaaaaactcgcattctccatgattttttggtcatagagaatgtaataaaattttggtaaatagcattgatactcacatactatattattttcctttgtgttgaggattaatgcaaccacagtgttgtggtttgaacactaatcgagaaggcctctttactgttgtctagatctgttataattttcatttacatgcttccatacactttaatattagtaatacaattgtagttagcagattaaaaacttagttaaacatatgtgtactcacgtatttattgtttttctgtacatcaaggattcccatggacatgtggttgtccattgcacatatattgataggaatgttcagctcctttttaggtgccgttgctcaagttgcagccggaggttgcagctacacaggacacaaattcagaaaaatggttgtggctcttatgtttcagtgtttctaagtagataaaagtagtaatggatgaacgaagagggacataacagatggtgtcctgatacgcacttatcttatcgaggaagaaaagattcaggacaggacgaatagaggagagcagtgtgaggtgagctcgaggatccaactctgtctccacgatcgctaggtgtgaaattctcgggggtgtggtgagagtgaggagcatccagctctttatctccacctgctgctggtgtgagtgtgacactgatgatgatggggtaactgttttcaagtcgttcgaataatcacgattaattgtcctagtaggtttagatcaatcatgattaatcgtccaagtcgccgcccaagttcgttagtcagaacgaccaacaagtcgtccgacttgaaaacaatgtggtcacactgtcacatggcatcagcctttaccgctattgttggtaaaggttgttggctaagtcgctatgctcctggtaaaccggattatataatctggattatataatctatacaaaataagctagactatataatcgtgcaagaaaacaaacaagccttaagtatacaatacttaaagtag

SEQ ID NO: 59082 - DNA, 3008 bp, Zea Mays
cgccacttcttcctcctgtcttctcgctcccgtcgacccgacagcctacaacccagcaggcgccacgagccttacccccttgctctctccacccacccctccccatcaaacggtgctgggcgtcctaggttgcctcgcccttcacccgtcgtgagtttgacactctccctcccggacctctcgtccctgccgttgcccctgctggcccaccttgccctggggcacgaccaccgactcactttgccgccgatccatacgccggttcatgtccgaccaacgaccgctaccctcctcggatcccgtccaccgccctccccgcatcctggccggccgctgctctcccgccgcaggctcccgttcggcggcccgcgctccccgcgaacggcggctggcagcaagccgctggcggcgcacgacatctccacgtccatgtggcacgacacacgtctctgggacgtgctgctccgatgcggtatcaagggtgccgcggacagcgtcaccaacgtgtgatttgtggcgccgaggacctccccggtggggtcgacgacaactgcaagtacgacaccagcctgcaacgcatctcggatctcggattttttgccaccaatcagcaagagcggcaggagggagcagagctggagatggggcggtgctggtgctgctgccggtgcctaaagctgctctgcttggttctcctcccaccgatcagcttgtgcctcggccgcagctgctgctccaatctgtccccattctcatcgtcgaagatctgctctgtcttctatggtgcctagagtcagccttcagggagagaccgctcccgcaggccaagaagtcgtggggctccgagattgccagtagcggtggccggagctcctccgatgtttccacaccatatgctacaacgttttgtgcttccacgccggatgccacaatagacaagctgaggaagaaaggttaaaattgttgagacaaaggatatatgtaccatatcactgctcctctatcaagcatcgggttctcattctgtatatagttttaccattattacatccattttccttatcaaatgaatatccattttatccctaggaagaatgggataaatgttattaattaggtacgtgatattcgtgaaaggcactgtgactttactatatgaatatgctcaaatcactttaacataaaactctttatataacagatggtaacagaactgttacttatatttcctccaaccattctagacgatttaccctacaatctttcagttccttcattaatacttttcttttcaattcatgcctgatttcctatacaacacacaaatgactatatgtactaaggatagaaataaaactgctacttatgttttatagctccacctagtttagaatcatagattttcctccctgtgcaagcattatattattgtttttttggattggttaactaacagttctcgatgagtatttgctgcaaccactgttgttctttttcctttttaatctattcaaggattgctagtggccgaagggcactgccaccttcttttgcttttacgtgatgcaaggccattgttatgtattccatgtttattattacttcgaacatggctagaatacaatggttcagcatcagcttaatccatggaaggtatggggttggattgtcctcagctgtttattaatcctgtagcacgtcatttactgactattgtgtttaaatggggaaggatgatggagatacaataagcacgaaagtcattattaattttagccttggcgctatatgtttgttagccgaggttacattgttcttcttttggaatagacaaaaaaatgagagccttcactgttgtttatttagtagaggttgagatcgtatttcaaattattaagaacactactgttttagattctttcaaatattcatacgtttgaaaaaactcgcattctccatgattttttggtcatagagaatgtaataaaattttggtaaatagcattgatactcacatactatattattttcctttgtgttgaggattaatgcaaccacagtgttgtggtttgaacactaatcgagaaggcctctttactgttgtctagatctgttataattttcatttacatgcttccatacactttaatattagtaatacaattgtagttagcagattaaaaacttagttaaacatatgtgtactcacgtatttattgtttttctgtacatcaaggattcccatggacatgtggttgtccattgcacatatattgataggaatgttcagctcctttttaggtccaccacatatatatcaatggaaatgcaatgtagatatttaagtagtgagtacataaagcgcttaaaggtgccgttgctcaagttgcagccggaggttgcagctacacaggacacaaattcagtgtttctaagtagataaaagtagtaatggatgaacgaagagggacataacagatggtgtcctgatacgcacttatcttatcgaggaagaaaagattcaggacaggacgaatagaggagagcagtgtgaggtgagctcgaggatccaactctgtctccacgatcgctaggtgtgaaattctcgggggtgtggtgagagtgaggagcatccagctctttatctccacctgctgctggtgtgagtgtgacactgatgatgatggggtaactgttttcaagtcgttcgaataatcacgattaattgtcctagtaggtttagatcaatcatgattaatcgtccaagtcgccgcccaagttcgttagtcagaacgaccaacaagtcgtccgacttgaaaacaatgtggtcacactgtcacatggcatcagcctttaccgctattgttggtaaaggttgttggctaagtcgctatgctcctggtaaaccggattatataatctggattatataatctatacaaaataagctagactatataatcgtgcaagaaaacaaacaagccttaagtatacaatacttaaagtag

SEQ ID NO: 59083 - DNA, 3479 bp, Zea Mays
cgccacttcttcctcctgtcttctcgctcccgtcgacccgacagcctacaacccagcaggcgccacgagccttacccccttgctctctccacccacccctccccatcaaacggtgctgggcgtcctaggttgcctcgcccttcacccgtcgtgagtttgacactctccctcccggacctctcgtccctgccgttgcccctgctggcccaccttgccctggggcacgaccaccgactcactttgccgccgatccatacgccggttcatgtccgaccaacgaccgctaccctcctcggatcccgtccaccgccctccccgcatcctggccggccgctgctctcccgccgcaggctcccgttcggcggcccgcgctccccgcgaacggcggctggcagcaagccgctggcggcgcacgacatctccacgtccatgtggcacgacacacgtctctgggacgtgctgctccgatgcggtatcaagggtgccgcggacagcgtcaccaacgtgtgatttgtggcgccgaggacctccccggtggggtcgacgacaactgcaagtacgacaccagcctgcaacgcatctcggatctcggattttttgccaccaatcagcaagagcggcaggagggagcagagctggagatggggcggtgctggtgctgctgccggtgcctaaagctgctctgcttggttctcctcccaccgatcagcttgtgcctcggccgcagctgctgctccaatctgtccccattctcatcgtcgaagatctgctctgtcttctatggtgcctagagtcagccttcagggagagaccgctcccgcaggccaagaagtcgtggggctccgagattgccagtagcggtggccggagctcctccgatgtttccacaccatatgctacaacgttttgtgcttccacgccggatgccacaatagacaagctgaggaagaaaggttaaaattgttgagacaaaggatatatgtaccatatcactgctcctctatcaagcatcgggttctcattctgtatatagttttaccattattacatccattttccttatcaaatgaatatccattttatccctaggaagaatgggataaatgttattaattaggtacgtgatattcgtgaaaggcactgtgactttactatatgaatatgctcaaatcactttaacataaaactctttatataacagatggtaacagaactgttacttatatttcctccaaccattctagacgatttaccctacaatctttcagttccttcattaatacttttcttttcaattcatgcctgatttcctatacaacacacaaatgactatatgtactaaggatagaaataaaactgctacttatgttttatagctccacctagtttagaatcatagattttcctccctgtgcaagcattatattattgtttttttggattggttaactaacagttctcgatgagtatttgctgcaaccactgttgttctttttcctttttaatctattcaaggattgctagtggccgaagggcactgccaccttcttttgcttttacgtgatgcaaggccattgttatgtattccatgtttattattacttcgaacatggctagaatacaatggttcagcatcagcttaatccatggaaggtatggggttggattgtcctcagctgtttattaatcctgtagcacgtcatttactgactattgtgtttaaatggggaaggatgatggagatacaataagcacgaaagtcattattaattttagccttggcgctatatgtttgttagccgaggttacattgttcttcttttggaatagacaaaaaaatgagagccttcactgttgtttatttagtagaggattcccatggacatgtggttgtccattgcacatatattgataggaatgttcagctcctttttaggtccaccacatatatatcaatggaaatgcaatgtagatatttaagtagtgagtacataaagcgcttaaaggtgccgttgctcaagttgcagccggaggttgcagctacacaggacacaaattcaggtgcattttacacctacatatcttcctacaaacatgttttttctcctaacattttgtatgttaccgtaaaattactttgtacactatagatataaacggtttcatctcagatgacacaacaactgaaatattttgctttgacaacattgctaaacatattcttggaaaaccttatgaaccctgatgttgtgaacacctttatgcagtagatagctaatgtatttttatgatattaattatgcccctaggacatgttgctacaacagacccttctgcgtgtaagtataggactataggtgataggttgatatctcaggctaccaaccaacaaactttctagaaacgtacttatgctggtgagtacaatgctgcttggaacatgttgaactaatatggttaatatattttttatggcttttgttgtactcgattatacaagcctacatatattgcatcattagtacaagcaaatcttctatacatgggcttctacctgccaactcttttctattgactttacactatgagtttcatgataacttacttatcatgtttcttacatacatatactgagttttatattaacttatatatatcatgtttctgtatattttaaggtcctgcaatctaatttgacatcgcacatcgcgcgctggacgcgcgacatacactagtaatacaatccatattcctttgttttcaattttatgaccttatcactaggtgcatcatagtcatacgagccagcttgcagttttctgcgtggttcatcatgcaccttctcactcgattaattttgtgccgacagaaaaatggttgtggctcttatgtttcagtgtttctaagtagataaaagtagtaatggatgaacgaagagggacataacagatggtgtcctgatacgcacttatcttatcgaggaagaaaagattcaggacaggacgaatagaggagagcagtgtgaggtgagctcgaggatccaactctgtctccacgatcgctaggtgtgaaattctcgggggtgtggtgagagtgaggagcatccagctctttatctccacctgctgctggtgtgagtgtgacactgatgatgatggggtaactgttttcaagtcgttcgaataatcacgattaattgtcctagtaggtttagatcaatcatgattaatcgtccaagtcgccgcccaagttcgttagtcagaacgaccaacaagtcgtccgacttgaaaacaatgtggtcacactgtcacatggcatcagcctttaccgctattgttggtaaaggttgttggctaagtcgctatgctcctggtaaaccggattatataatctggattatataatctatacaaaataagctagactatataatcgtgcaagaaaacaaacaagccttaagtatacaatacttaaagtag

SEQ ID NO: 59084 - DNA, 960 bp, Zea Mays
ccatgattttttggtcatagagaatgtaataaaattttggtaaatagcattgatactcacatactatattattttcctttgtgttgaggattaatgcaaccacagtgttgtggtttgaacactaatcgagaaggcctctttactgttgtctagatctgttataattttcatttacatgcttccatacactttaatattagtaatacaattgtagttagcagattaaaaacttagttaaacatatgtgtactcacgtatttattgtttttctgtacatcaaggattcccatggacatgtggttgtccattgcacatatattgataggaatgttcagctcctttttaggtccaccacatatatatcaatggaaatgcaatgtagatatttaagtagtgagtacataaagcgcttaaaggtgccgttgctcaagttgcagccggaggttgcagctacacaggacacaaattcagattcaggacaggacgaatagaggagagcagtgtgaggtgagctcgaggatccaactctgtctccacgatcgctaggtgtgaaattctcgggggtgtggtgagagtgaggagcatccagctctttatctccacctgctgctggtgtgagtgtgacactgatgatgatggggtaactgttttcaagtcgttcgaataatcacgattaattgtcctagtaggtttagatcaatcatgattaatcgtccaagtcgccgcccaagttcgttagtcagaacgaccaacaagtcgtccgacttgaaaacaatgtggtcacactgtcacatggcatcagcctttaccgctattgttggtaaaggttgttggctaagtcgctatgctcctggtaaaccggattatataatctggattatataatctatacaaaataagctagactatataatcgtgcaagaaaacaaacaagccttaagtatacaatacttaaagtag

SEQ ID NO: 59085 - DNA, 1687 bp, Zea Mays
tttggtcgaaataaacaagcagagcagaaaaccccccacacgctttagttggccgtccgtccgtccgtctctgaggagcacacagcagtcgattttaaactgcagctacagaggtcaggtcaggggacacagcctgagcggctggctggcgggggctagcgagcggcgccacagcgcagcacgcagagagccagggcggcggccatggcgagcgcggcgagtggcggcggcgggtcgctgaagcggatgggcccgctccgggtacagtactacatcgtgatgggcgcggtggcagcggcggtggtgctggccacgctgcgctacatgccggggccagccgtcccggcgaccaccgcccgtaccagcggaggcggcgtcgtgcgctcggccccagcagccgcggccgtccctgtgcccgtgcccgccgtggaggtagaaacgggggaggatgagcaggcgcagaggaggaggaggaggaggaagaagaagggtgacggggtcgtgctcttcaacttcggcgactccaacagcgacacgggcggcgtggcggcggtcatggggatccgcatcgcgccgccggagggcagggcctacttccaccaccccacggggcggctctccgacggacgcgtcatcctcgacttcatctggtccacggccatgccgggagtaaccaccttctcgctggacgtgcaggtggatcagttcgtcttcttcaaggagagatgcctcgactccatcgagagaggtgagagtgccccgattgttgagaaggcgttcccagatgctatatacaccatggacatcgggcacaacgatataaacggtgttctccacttgccctatcatacaatgctcgaaaatctccccccagtaattgctgaaatcaagaaagccatcgagaggttgcacgagaatggagccaggaagttctggatacatggaacgggagcattagggtgcatgcctcagaagctttctatgccgagggatgacgacagcgacctcgatgagcatggatgcatcgcaagcattaataatgtctgcaagaagttcaattccttgctgagtgaagccttggacgagctgcgtttgacactgaaaagttcgactatcgtctttgtggatatgttcgctatcaagtatgatcttgttgccaaccacacgaaatatgggattgagaagccattgatgacatgttgtggtcatggaggccccccttacaactatgaccccaaggagagctgcatgacttcggacaaatacctgtgcaagcttggcgaaaagttcataagctgggacggggttcacttcactgatgctgcaaatggcattgtggcttccaaagtactcagtggtgagtacaacattcccagggtcaagctggccagcctcgtccccgttccaaaatctgacgattaatggtgatgcagcaccttaattggcctttagtttggcctatcaaggatgatgaagatgaaactactaacaaaactgacaccaccgaagtttaattattttgaggttcttacgttacatccattgtagaagaagactttccttttgtttacttctctttttgtacaatcggcgcatatgtatatcctagggttaatatatggcgatgcaggtgtctgtaccatgtataattttctttttgaattttgggtctgttggtacgatttag

SEQ ID NO: 59086 - DNA, 1640 bp, Zea Mays
tttggtcgaaataaacaagcagagcagaaaaccccccacacgctttagttggccgtccgtccgtccgtctctgaggagcacacagcagtcgattttaaactgcagctacagaggtcaggtcaggggacacagcctgagcggctggctggcgggggctagcgagcggcgccacagcgcagcacgcagagagccagggcggcggccatggcgagcgcggcgagtggcggcggcgggtcgctgaagcggatgggcccgctccgggtacagtactacatcgtgatgggcgcggtggcagcggcggtggtgctggccacgctgcgctacatgccggggccagccgtcccggcgaccaccgcccgtaccagcggaggcggcgtcgtgcgctcggccccagcagccgcggccgtccctgtgcccgtgcccgccgtggaggtagaaacgggggaggatgagcaggcgcagaggaggaggaggaggaggaagaagaagggtgacggggtcgtgctcttcaacttcggcgactccaacagcgacacgggcggcgtggcggcggtcatggggatccgcatcgcgccgccggagggcagggcctacttccaccaccccacggggcggctctccgacggacgcgtcatcctcgacttcatctgtggatcagttcgtcttcttcaaggagagatgcctcgactccatcgagagaggtgagagtgccccgattgttgagaaggcgttcccagatgctatatacaccatggacatcgggcacaacgatataaacggtgttctccacttgccctatcatacaatgctcgaaaatctccccccagtaattgctgaaatcaagaaagccatcgagaggttgcacgagaatggagccaggaagttctggatacatggaacgggagcattagggtgcatgcctcagaagctttctatgccgagggatgacgacagcgacctcgatgagcatggatgcatcgcaagcattaataatgtctgcaagaagttcaattccttgctgagtgaagccttggacgagctgcgtttgacactgaaaagttcgactatcgtctttgtggatatgttcgctatcaagtatgatcttgttgccaaccacacgaaatatgggattgagaagccattgatgacatgttgtggtcatggaggccccccttacaactatgaccccaaggagagctgcatgacttcggacaaatacctgtgcaagcttggcgaaaagttcataagctgggacggggttcacttcactgatgctgcaaatggcattgtggcttccaaagtactcagtggtgagtacaacattcccagggtcaagctggccagcctcgtccccgttccaaaatctgacgattaatggtgatgcagcaccttaattggcctttagtttggcctatcaaggatgatgaagatgaaactactaacaaaactgacaccaccgaagtttaattattttgaggttcttacgttacatccattgtagaagaagactttccttttgtttacttctctttttgtacaatcggcgcatatgtatatcctagggttaatatatggcgatgcaggtgtctgtaccatgtataattttctttttgaattttgggtctgttggtacgatttag

SEQ ID NO: 59087 - DNA, 1226 bp, Zea Mays
caactcagcgcttgttggctagctcgtgcggcttctcatcaatctctcgtttcctttgtgcgcaagtgcaatcatttcttggcacctcccattcaatgcaagtgagagcctgggcatgccgcacctgagtccgttcatgaagccgctgggctccaacttctccaacggcgtcaacttcgccattgcagggtccacggccatgccgggagtaaccaccttctcgctggacgtgcaggtggatcagttcgtcttcttcaaggagagatgcctcgactccatcgagagaggtgagagtgccccgattgttgagaaggcgttcccagatgctatatacaccatggacatcgggcacaacgatataaacggtgttctccacttgccctatcatacaatgctcgaaaatctccccccagtaattgctgaaatcaagaaagccatcgagaggttgcacgagaatggagccaggaagttctggatacatggaacgggagcattagggtgcatgcctcagaagctttctatgccgagggatgacgacagcgacctcgatgagcatggatgcatcgcaagcattaataatgtctgcaagaagttcaattccttgctgagtgaagccttggacgagctgcgtttgacactgaaaagttcgactatcgtctttgtggatatgttcgctatcaagtatgatcttgttgccaaccacacgaaatatgggattgagaagccattgatgacatgttgtggtcatggaggccccccttacaactatgaccccaaggagagctgcatgacttcggacaaatacctgtgcaagcttggcgaaaagttcataagctgggacggggttcacttcactgatgctgcaaatggcattgtggcttccaaagtactcagtggtgagtacaacattcccagggtcaagctggccagcctcgtccccgttccaaaatctgacgattaatggtgatgcagcaccttaattggcctttagtttggcctatcaaggatgatgaagatgaaactactaacaaaactgacaccaccgaagtttaattattttgaggttcttacgttacatccattgtagaagaagactttccttttgtttacttctctttttgtacaatcggcgcatatgtatatcctagggttaatatatggcgatgcaggtgtctgtaccatgtataattttctttttgaattttgggtctgttggtacgatttag

SEQ ID NO: 59088 - DNA, 1853 bp, Zea Mays
gttttgtatgtccacgtatatcattattcaaactgtatttttatactaatttaatagggtgtatgtgtttttatgaagtcaacacaacagttcaggtagttcaggaatacctgaacccgaaatttcgggtacccgaattttcgggtattgtaaaactcgttataatttcgggtatcgattctcaaaacccgaaactttaaatatccgaattacccgacccgaaattttcgagtaacccgaacgcccacccctacctccggcgaacagacacgaaccttcaacgtaacaaagatgaactagggaccagttagactaaaactctcaccagatttgaaagagaattgagggctaggcatcataagtctatgttgatatttgagcgtgtaatcttcttcacttgtgcattcatcaatccaccatacaaaaaagaggatgtacaacattacgcatttgcggcctgaacctctataaatctctcgtgtgtcgataactaggcagtacccaggatcaacgtgcctccagactaggcccctcactctatccttcattcaccaatcctctcgggtacctaaggaaccctggtgttgttacatgacgacaatatctaactcccaagaagttgatcagctagcttagaatccaaataggcaaaaaagggaaacaagcattgaactcagattagttcttatcttacataagaaataacagatgaatacatctaagagtttgcaagtagcataattgatcaagtagcctaagggtgaaaagataatctacttgacatggataatttctcaatagtctatttatcaaagcagatgactgtggactgttgcatccccaagatggttgaactataaaccaaagagtctcaatttttgcggatgatgtggctattttttaaaacctgatattgaagaccttgaagttgtcaaggccattttaaggggttttggagcagcttctgtataagagaatgaagtgcttgttgtattgcatagaggagtgttacaatatagactcaaaaccaatgatttcaagtcgtccgactaatcgcgattagtcgggctagttggttctgttagcacgactagggaggccgacccaatctgctcaactaattgttcggtcatccgattagtcgtcgactaaacgtgattagtcgtccaatttgggtgggggcgattagttgccctggactcctagtttaggtcaatagtaagtctgtacttggcatttatgtagtaactagtaagtctgcaactctgcatcatatgaattagttagtgactactgagtagtaactgatgttcaattgttcgtgttctgaaatctgcaatctgaatgctgtcttccaatattcatatttgctatgtttggtaattagtattgcttcctatatgctacattgctatatataattgagttagtgactgatgttcatgttctaaaatctgaattgtccagttccaacattcatatttgttatgtacttatgtttggtattgtctcctataagctatattgctatatatatcaatattatatacataggtactgcaattatgctagagcgctatagggacgaccaagtcgactaggacctgattagtcaacctagtcgtcatcctaatcgtgattagtcgcctggtcgccaaagtgttccgactagcaagtcgcccgacttgaaatcattgctcagaaccctaaccttaatgggctgacgacccaacagtggtgtcgacccacatacatgagacatacactgtctaacatcccctcgcagtcgcaacgggagcaccgcgcactatgagactggagtcgaagccgaaggtaggagccgacgggttgaa

SEQ ID NO: 59089 - DNA, 1420 bp, Zea Mays
ctcatttgtccatgttcccgtgtcgtgatgacttgtgctatgccgttcatcttccctcagccgccctttatgccatagtctgctttcagctggtgaccgtaccctgcacctctcaaccccaccgtggtcgggtcgtctcgaggagtggctcgcccgtgtcggtcgcgtttgaatatcaagaagtgatttgtgaaggagcctgctccagtgttgttgatccagtggtggactccatctaactgcttattgtaatagaagatctcagatctcctcctgtaataagagaggttgggcaacattatcagcttctcagagtgttggagggattgaaatcgaggagaactgggacaaggttaagactatttttcttcctactgagaagccaacgacgtttgattaatgtgctcctttgattgcaatccatccattggaggtggggaggtatagaattccctctaccttttggaagagtactcagtcctacagaaagtttcatccatgaactagatgagaagggagttttccgtaccgctgacatgtgaacgatttatattgggacttccctactactgctttaacacttctggactatctatttgcggtgtttgtcagtttggtcattctatatataaactgtatgcaattcttttcctgagggttgaactaacgtgaacctcaaattccacagattgagataatattgggaaagagtgacaaattcgacgagttgatggttgctgccgccgacgagaggggagaagttgaagatggtgaagagcaggcttgaaaaaacagtgtcgaccatccctgcaacgcgtgacgcgtccaatgacccctgtaggatcctttcgtctcctgctgtggccccttcacccgcagccgcccaatcagcccatcctccacagctggcctgaacgccgcctcgatggcttccttgcttccctgtccggcagccccttgtcttccccgtccacctcttcttcgagggtgtaacaattgtcttaaggattaggtacttgtcaaaggaatgcccgatcaagtggttgaaggattagtttcaggaagagacatcaaaatgtttcttttgaatcccactaagccatatgcgttgttgcatatttagactttggagtgtggacctatgtaacagacataattagtacagctcatggcttggatatctgaaacttgattttgttgcaggaagcctgtgatcagttcaaggttatgaacgactacatagttcagttcgatgtttcaatatagcttagcaggatacttctctatatttggtattgttacagcgcccgataggacgcaaacttttctagtgtttttataaagaacccccagcgtttttactaatcaacccgtagtacacctgtacacaaagatcattacctccaagtcccgaaatttg

SEQ ID NO: 59090 - DNA, 1464 bp, Zea Mays
ctcctactctttgcttggtgcttgcaattgcgattcctcctagcgttgattcccctctcggaattctctgaccctatcattgcgaagaaatatggagcaaagccggacatagaaaccttggacatcctgaacactacagctacccagaaggatatcgtggtggttgtgaaagtcctgtggggtgatccgcgtgagaagctctgtcaagttatccatgataccccgctgagctgcttggttataggaagcaggggccttggcaagctcaagagggtgctcttgggaagtgtcagcgactatgttgtgaacaatgcaacctgccctgtcaccgtcgtcaagtcaacaagcaccgaaggttgatcttatcgccgagatgcctggatgtgatgttgtaataaagatggttggcctgatgaagaacatgcactagtttctagctatttgaaacatgttgaacgaggcaattctaatgtaataataatagacaaagtgccttatgaaggacatggttgacatgcctttgttgctgtatgagtgatgtttatagttttgagggtttgaagatgtggatcatttgcctattattcttccgctgtgctgtatgagcgatgtttatcaatatgcaatgcaaataaagaaacactacagatgcaaattcaaccactcaccagatcagggaacaccatgtaacgttaacttccaagcaagcatagaaaaggtacatccatgacaacgcttgttcatcatacaggtacactgatacgttcaaaccagagctaaatatcactggcaacagcatctagaaaacctaccatgtctcaggttctacaagaccaaaccactggtagcaaagtttaattctacacatcagatccaaccatccatccaccatctaacgagcaatgtacattagaacctgtttgacctgtggaagcagttcacagcggcccaaggaagtcaccagcgatcgtagcaaggagctggaattggcggtcagcctccatccagcggaaccctaggaccttgaagcgcacggcggtgtccttctccagcttcgagtggtcgttcatgaacatcgcattctccccacctatgtacttgtaattactcatcgacttctcagccaggaagatgctctccacgggtccggatttgaggaacacgccatgcttgaggatcctgtccacgtgcccaaccatgacctctcccttcataggcttctgtgtaatgcaagtaaatgaaactgggaacagaacatctccagttagctcacgcactttcccttcagatattgccttcagctgattaacagcaatgtagtagccatgctctttcgaagccctcctgtttgtgacatcctccagaagacgcacaatgatagccttgcggagcaggaggcccttgcggtccagctggctaggtgagatcaacacattccatgacatctctgcctcaagaaaaacc

SEQ ID NO: 59091 - DNA, 1594 bp, Zea Mays
aaccaattggtcctaaccgcacaaacactagcgctactgcgctagcacgacttccccctctatctttctcttcgtaacgcctgcaagatttggcggcatgtcaagtaaccttaccgcgcgatactaggcgatttcgtcgcttcgctggttgctcgttgtgcttaagccttaagcgttgattcccctctcggaattctctgaccctatcattgcgaagaaatatggagcaaagccggacatagaaaccttggacatcctgaacactacagctacccagaaggatatcgtggtggttgtgaaagtcctgtggggtgatccgcgtgagaagctctgtcaagttatccatgataccccgctgagctgcttggttataggaagcaggggccttggcaagctcaagagggtgctcttgggaagtgtcagcgactatgttgtgaacaatgcaacctgccctgtcaccgtcgtcaagtcaacaagcaccgaaggttgatcttatcgccgagatgcctggatgtgatgttgtaataaagatggttggcctgatgaagaacatgcactagtttctagctatttgaaacatgttgaacgaggcaattctaatgtaataataatagacaaagtgccttatgaaggacatggttgacatgcctttgttgctgtatgagtgatgtttatagttttgagggtttgaagatgtggatcatttgcctattattcttccgctgtgctgtatgagcgatgtttatcaatatgcaatgcaaataaagaaacactacagatgcaaattcaaccactcaccagatcagggaacaccatgtaacgttaacttccaagcaagcatagaaaaggtacatccatgacaacgcttgttcatcatacaggtacactgatacgttcaaaccagagctaaatatcactggcaacagcatctagaaaacctaccatgtctcaggttctacaagaccaaaccactggtagcaaagtttaattctacacatcagatccaaccatccatccaccatctaacgagcaatgtacattagaacctgtttgacctgtggaagcagttcacagcggcccaaggaagtcaccagcgatcgtagcaaggagctggaattggcggtcagcctccatccagcggaaccctaggaccttgaagcgcacggcggtgtccttctccagcttcgagtggtcgttcatgaacatcgcattctccccacctatgtacttgtaattactcatcgacttctcagccaggaagatgctctccacgggtccggatttgaggaacacgccatgcttgaggatcctgtccacgtgcccaaccatgacctctcccttcataggcttctgtgtaatgcaagtaaatgaaactgggaacagaacatctccagttagctcacgcactttcccttcagatattgccttcagctgattaacagcaatgtagtagccatgctctttcgaagccctcctgtttgtgacatcctccagaagacgcacaatgatagccttgcggagcaggaggcccttgcggtccagctggctaggtgagatcaacacattccatgacatctctgcctcaagaaaaacc

SEQ ID NO: 59092 - DNA, 1570 bp, Zea Mays
atttagtgtccaacagtgtgcctgcaacggatcatgccttgaattaaatctgtgtaaaattcgtcatcattttactcgatttttcactggccggccgaccaccagtggatgctattgctagttcagtgtcatttcctaagaaagacttgcgttgattcccctctcggaattctctgaccctatcattgcgaagaaatatggagcaaagccggacatagaaaccttggacatcctgaacactacagctacccagaaggatatcgtggtggttgtgaaagtcctgtggggtgatccgcgtgagaagctctgtcaagttatccatgataccccgctgagctgcttggttataggaagcaggggccttggcaagctcaagagggtgctcttgggaagtgtcagcgactatgttgtgaacaatgcaacctgccctgtcaccgtcgtcaagtcaacaagcaccgaaggttgatcttatcgccgagatgcctggatgtgatgttgtaataaagatggttggcctgatgaagaacatgcactagtttctagctatttgaaacatgttgaacgaggcaattctaatgtaataataatagacaaagtgccttatgaaggacatggttgacatgcctttgttgctgtatgagtgatgtttatagttttgagggtttgaagatgtggatcatttgcctattattcttccgctgtgctgtatgagcgatgtttatcaatatgcaatgcaaataaagaaacactacagatgcaaattcaaccactcaccagatcagggaacaccatgtaacgttaacttccaagcaagcatagaaaaggtacatccatgacaacgcttgttcatcatacaggtacactgatacgttcaaaccagagctaaatatcactggcaacagcatctagaaaacctaccatgtctcaggttctacaagaccaaaccactggtagcaaagtttaattctacacatcagatccaaccatccatccaccatctaacgagcaatgtacattagaacctgtttgacctgtggaagcagttcacagcggcccaaggaagtcaccagcgatcgtagcaaggagctggaattggcggtcagcctccatccagcggaaccctaggaccttgaagcgcacggcggtgtccttctccagcttcgagtggtcgttcatgaacatcgcattctccccacctatgtacttgtaattactcatcgacttctcagccaggaagatgctctccacgggtccggatttgaggaacacgccatgcttgaggatcctgtccacgtgcccaaccatgacctctcccttcataggcttctgtgtaatgcaagtaaatgaaactgggaacagaacatctccagttagctcacgcactttcccttcagatattgccttcagctgattaacagcaatgtagtagccatgctctttcgaagccctcctgtttgtgacatcctccagaagacgcacaatgatagccttgcggagcaggaggcccttgcggtccagctggctaggtgagatcaacacattccatgacatctctgcctcaagaaaaacc

SEQ ID NO: 59093 - DNA, 1734 bp, Zea Mays
cacaccgaaaccaaggcgtgcgcccgtgatcgccgacaacgtgggggacaacgtcggcgacatcgccgggatggggtcggacctgttcgggtcgtacgcggagtcgtcctgcgcggcgctcttcgtggcttccatctcctccttcggggcggagcacaacctcacggcgatgatgtacccgctgctcatcagcgccgtgggcctgctcgtgtgcgcgatcaccaccgtcgtcgccaccgacgtcaccgaggtgaagggctccgacgaggttgggccggcgctcaagcggcagatcctcatctccaccgtgcttatgaccgccggcatcgccgccgtcaccttcctcgccctgccgcccagcttcaccctcttcgacttcggcaacgacaagcacgtcaagaactggcacctattcatctgcgtgtcggccggtctgtgggcggggctcgtgatcggctacgtcaccgagtacttcacgagcaacgcgtacggcccggtgcaggcggtggcgcggtcgtgcaggacgggcgcggcgacgaacgtcatcttcggcctggcggtgggttacaagtcggtgatcgtgcccatcatggccatcgcggcggccatctacgccagcttccgcctggcggccatgtacggcatcgcgctggcggcgctggggatgctgagcaccatcgccacggggctcgccatcgacgcctacgggcccatcagcgacaacgccggcggcatcgcggagatggccggcatgccgcaccgggtccgggagcggacggacgcgctcgacgccgcgggcaacaccacggccgccatcggcaaaggcttcgccatcggctccgcggcgctggtgtcgctggcgctgttcggcgcgtacgtcagccgcgccgggatcacggcggtggacgtgctgagcccgcgtgtgttcgtgggactcctcctcggcgccatgctcccctactggttctcggcgatgaccatgcggagcgtcggaagcgcggcgctgaggatggtggaggaggtgcgccgccagttcgacaccatcccgggcctcgccgagggcctcgccgtgccggactacgccacctgcgtcaggatctccaccgacgcctcgctcaagaagatgatggcgccgggcgcgctcgtcatgttcagcccgctcgtcgccggtacgctcttcggggtcgagacgctcgcggggctcctcgccggcgcactcgtctccggcgtccaggtcgccatctctgcctccaacagcgggggtgcatgggacaacgccaagaagtacatcgaggccggcttgtcggaggaggcgaggtcgctggggcccaagggatcggaggcgcacaaagcggcggtgatcggggacaccatcggcgacccgctcaaggacacctccggaccgtccctcaacatcctcatcaagcttatggccgtggagtcgctcgtcttcgcgcccttcttcgccgcgcacggtggcatcatcttcgaccacctctgatcaatgcatgctgctgacgttccatggcaaaggcgccggctgtcgccgcaagccgcctctttgaatttgccgtgatcagttagtaagaataatcgtcgtgtatgtagcctgtaacaagtaatgccagaccaccagagttggaggcttattcatgtctggccctcttatcttacccttgaatatgttgctcggtatgctgcaactgcaatacaaagcgcgaacactagtcggct

SEQ ID NO: 59094 - DNA, 1882 bp, Zea Mays
ggccgccacgcttcgtttgcttcccgctcccaccgccaccacccaccaatcgcactcgcagttggcgcgcgctcccgtcctaaccaagcaaaacccacaaccctagcctccgccggcgccgccatctgccgggcctccctccggtcccggccgaccgtagcctcgcagcaccctaaccctatccctcccccgctgccgcgggagcagggtaaaaaaatgccgcgtgagatcatcacgatccaggtggggcaatgtggaaaccagatcgggatggagttctggaagcagctctgtctcgagcacggtatcggcaaggacggcctgctcgaggacttcgccactcaggggggcgacaggaaggacgtcttcttttaccaggctgatgatcagcacttcatacccaggtctctgcttattgacctggagccgagagtgatcaatggaatccagaacagtgagtacaggaacctgtacaaccacgagaacatatttgtcgctgagcatggtggtggtgccgggaacaactgggccagtgggtatcatcagggtgaacaagttgttgatgatatcatggacatggttgacagagaagcagatggaagtgatagccttgagggttttgtcctttgtcattctattgctggtggaactggttcaggtatgggttcttatctgttggagacactgaatgatcgatacagtaaaaagcttgtgcagacatatagtgttttcccaaatcagatggaaacaagtgatgttgtcgtccaaccttacaactcacttttaactctgaagcgtctgacactgaatgctgactgtgtggtggttcttgacaatacggctcttaataggattgcggtcgagcgtcttcatttatcaaatcctacatttgcacaaacaaactctttggtctccacagttatgtctgcaagcacaactacattgcggtatcctggatatatgaacaatgatctggttggccttcttgcctccctgatccccactccaaggtgtcattttttgatgacaggctatactccactgactgttgagcgccaggttaacatgatacgcaaaacaacagtattggatgttatgagaagacttctacaaagaatgtaatggtgtcatcatatgctcgaacaaaagaagccagccaggctaaatatatctccatattgaacatcattcaaggggaggtggaccctacacaggttcatgagagcctgcaaaggatacgtgaaaggaagcttgttaactttatagactgggcacctgcaagcattcaggttgccctgtcaagaaaatccccatatgttcaaacaacccacagggttagtggtctgatgttagctaatcatacgagcatccgccacctgttcggcaaatgcctgggacaatatgaaaagctaaggaaaaagcaggcttttcttgacaactataggaaattcccaatgtttgcagataatgatctctctgaatttgatgaatctcgagagataatagagagcctagttgatgaatacaaggcctgtgagtcgccagactacattaaatggggaatggaggaccctggagaggcaaacgttgcagcagatcttgactctaagttggtagtgtaaatataaaggtaccatttcatgaatcatgatcaggcactttatatgcggaaacaatttgatgtcctatcatattgattattgattgaattgacaatccacttgaacaccactctttcttttgatagccatgtggactacatcaattattataaatgatccacaatctctgctacatgttgaaaatgattgctaaatccctgggcatatcttttgttagagtacctgtctagggttttggggttagccccttgtaattattg

SEQ ID NO: 59095 - DNA, 1769 bp, Zea Mays
ggccgccacgcttcgtttgcttcccgctcccaccgccaccacccaccaatcgcactcgcagttggcgcgcgctcccgtcctaaccaagcaaaacccacaaccctagcctccgccggcgccgccatctgccgggcctccctccggtcccggccgaccgtagcctcgcagcaccctaaccctatccctcccccgctgccgcgggagcagggtaaaaaaatgccgcgtgagatcatcacgatccaggtggggcaatgtggaaaccagatcgggatggagttctggaagcagctctgtctcgagcacggtatcggcaaggacggcctgctcgaggacttcgccactcaggggggcgacaggaaggacgtcttcttttaccaggctgatgatcagcacttcatacccaggtctctgcttattgacctggagccgagagtgatcaatggaatccagaacagtgagtacaggaacctgtacaaccacgagaacatatttgtcgctgagcatggtggtggtgccgggaacaactgggccagtgggtatcatcagggtgaacaagttgttgatgatatcatggacatggttgacagagaagcagatggaagtgatagccttgagggttttgtcctttgtcattctattgctggtggaactggttcaggtatgggttcttatctgttggagacactgaatgatcgatacagtaaaaagcttgtgcagacatatagtgttttcccaaatcagatggaaacaagtgatgttgtcgtccaaccttacaactcacttttaactctgaagcgtctgacactgaatgctgactgtgtggtggttcttgacaatacggctcttaataggattgcggtcgagcgtcttcatttatcaaatcctacatttgcacaaacaaactctttggtctccacagttatgtctgcaagcacaactacattgcggtatcctggatatatgaacaatgatctggttggccttcttgcctccctgatccccactccaaggtgtcattttttgatgacaggctatactccactgactgttgagcgccaggttaacatgatacgcaaaacaacagtattggatgttatgagaagacttctgcagacaaagaatgtaatggtgtcatcatatgctcgaacaaaagaagccagccaggctaaatatatctccatattgaacatcattcaaggggaggtggaccctacacaggttcatgagagcctgcaaaggatacgtgaaaggaagcttgttaactttatagactgggcacctgcaagcattcaggttgccctgtcaagaaaatccccatatgttcaaacaacccacagggttagtggtctgatgttagctaatcatacgagcatccgccacctgttcggcaaatgcctgggacaatatgaaaagctaaggaaaaagcaggcttttcttgacaactataggaaattcccaatgtttgcagataatgatctctctgaatttgatgaatctcgagagataatagagagcctagttgatgaatacaaggcctgtgagtcgccagactacattaaatggggaatggaggaccctggagaggcaaacgttgcagcagatcttgactctaagttggtagtgtaaatataaagccatgtggactacatcaattattataaatgatccacaatctctgctacatgttgaaaatgattgctaaatccctgggcatatcttttgttagagtacctgtctagggttttggggttagccccttgtaattattg

SEQ ID NO: 59096 - DNA, 1691 bp, Zea Mays
ggccgccacgcttcgtttgcttcccgctcccaccgccaccacccaccaatcgcactcgcagttggcgcgcgctcccgtcctaaccaagcaaaacccacaaccctagcctccgccggcgccgccatctgccgggcctccctccggtcccggccgaccgtagcctcgcagcaccctaaccctatccctcccccgctgccgcgggagcagggtaaaaaaatgccgcgtgagatcatcacgatccaggtggggcaatgtggaaaccagatcgggatggagttctggaagcagctctgtctcgagcacggtatcggcaaggacggcctgctcgaggacttcgccactcaggggggcgacaggaaggacgtcttcttttaccaggctgatgatcagcacttcatacccaggtctctgcttattgacctggagccgagagtgatcaatggaatccagaacagtgagtacaggaacctgtacaaccacgagaacatatttgtcgctgagcatggtggtggtgccgggaacaactgggccagtgggtatcatcagggtgaacaagttgttgatgatatcatggacatggttgacagagaagcagatggaagtgatagccttgagggttttgtcctttgtcattctattgctggtggaactggttcaggtatgggttcttatctgttggagacactgaatgatcgatacagtaaaaagcttgtgcagacatatagtgttttcccaaatcagatggaaacaagtgatgttgtcgtccaaccttacaactcacttttaactctgaagcgtctgacactgaatgctgactgtgtggtggttcttgacaatacggctcttaataggattgcggtcgagcgtcttcatttatcaaatcctacatttgcacaaacaaactctttggtctccacagttatgtctgcaagcacaactacattgcggtatcctggatatatgaacaatgatctggttggccttcttgcctccctgatccccactccaaggtgtcattttttgatgacaggctatactccactgactgttgagcgccaggttaacatgatacgcaaaacaacagtattggatgttatgagaagacttctgcagacaaagaatgtaatggtgtcatcatatgctcgaacaaaagaagccagccaggctaaatatatctccatattgaacatcattcaaggggaggtggaccctacacaggttcatgagagcctgcaaaggatacgtgaaaggaagcttgttaactttatagactgggcacctgcaagcattcaggttgccctgtcaagaaaatccccatatgttcaaacaacccacagggttagtggtctgatgttagctaatcatacgagcatccgccacctgttcggcaaatgcctgggacaatatgaaaagctaaggaaaaagcaggcttttcttgacaactataggaaattcccaatgtttgcagataatgatctctctgaatttgatgaatctcgagagataatagagagcctagttgatgaatacaaggcctgtgagtcgccagactacattaaatggggaatggaggaccctggagaggcaaacgttgcagcagatcttgactctaagttggtagtgtaaatataaagcaaggagtcgaacaaaagtccaagaacatgctcccaagctgctgcataagatctccc

SEQ ID NO: 59097 - DNA, 1812 bp, Zea Mays
ggccgccacgcttcgtttgcttcccgctcccaccgccaccacccaccaatcgcactcgcagttggcgcgcgctcccgtcctaaccaagcaaaacccacaaccctagcctccgccggcgccgccatctgccgggcctccctccggtcccggccgaccgtagcctcgcagcaccctaaccctatccctcccccgctgccgcgggagcagggtaaaaaaatgccgcgtgagatcatcacgatccaggtggggcaatgtggaaaccagatcgggatggagttctggaagcagctctgtctcgagcacggtatcggcaaggacggcctgctcgaggacttcgccactcaggaaggacgtcttcttttaccaggctgatgatcagcacttcatacccaggtctctgcttattgacctggagccgagagtgatcaatggaatccagaacagtgagtacaggaacctgtacaaccacgagaacatatttgtcgctgagcatggtggtggtgccgggaacaactgggccagtgggtatcatcagggtgaacaagttgttgatgatatcatggacatggttgacagagaagcagatggaagtgatagccttgagggttttgtcctttgtcattctattgctggtggaactggttcaggtatgggttcttatctgttggagacactgaatgatcgatacagtaaaaagcttgtgcagacatatagtgttttcccaaatcagatggaaacaagtgatgttgtcgtccaaccttacaactcacttttaactctgaagcgtctgacactgaatgctgactgtgtggtggttcttgacaatacggctcttaataggattgcggtcgagcgtcttcatttatcaaatcctacatttgcacaaacaaactctttggtctccacagttatgtctgcaagcacaactacattgcggtatcctggatatatgaacaatgatctggttggccttcttgcctccctgatccccactccaaggtgtcattttttgatgacaggctatactccactgactgttgagcgccaggttaacatgatacgcaaaacaacagtattggatgttatgagaagacttctgcagacaaagaatgtaatggtgtcatcatatgctcgaacaaaagaagccagccaggctaaatatatctccatattgaacatcattcaaggggaggtggaccctacacaggttcatgagagcctgcaaaggatacgtgaaaggaagcttgttaactttatagactgggcacctgcaagcattcaggttgccctgtcaagaaaatccccatatgttcaaacaacccacagggttagtggtctgatgttagctaatcatacgagcatccgccacctgttcggcaaatgcctgggacaatatgaaaagctaaggaaaaagcaggcttttcttgacaactataggaaattcccaatgtttgcagataatgatctctctgaatttgatgaatctcgagagataatagagagcctagttgatgaatacaaggcctgtgagtcgccagactacattaaatggggaatggaggaccctggagaggcaaacgttgcagcagatcttgactctaagttggtagtgtaaatataaagattctgcagcaaggagtcgaacaaaagtccaagaacatgctcccaagctgctgcataagatctccctgcagcaccagcactttaaagaggggttaataaatagattgaagcatttctttttatttattgttccaagttttagttttaagttttggatttaatttgtaaacctttctttgtaaacccaat

SEQ ID NO: 59098 - DNA, 4535 bp, Zea Mays
gtcatttaatggaagtccaccatcagtaaacatggtggtacactaagtaaatttcaaccaaatagagacagggacaaaagaaaccttcaaatcgccaggttcaccatcaatcttaggctctccttcctcgaaaaacaaaacctcctgaaaaaaatcatatgattctatcaaataaaaactagaagtgcagacaacctataaataacaggcgaaacgaaatgaaccatttaagatcgttaaatgtctctaaccaagtgtcagactatggcatattaacattttactttaacaggcaagcgtacaaacttagcagtccacaaaaagtaacacttggatgtatgaatgtatcagatgtttaaaacatggaaagtgttcaggcagaacactacaaaaatgacatcaaaaggcaaaggaagagaaattcagatgacacccttaaattagtttgtgaagaggaacctagaaaagaggatgtcctttgtagtgtcacaaatcagaacttaccatgttttgaagggataaggctgcaataactagtagcaattcatccctaataagtcacaagcagcagtgttgacactagcaaagcagaaaaccagctagtttgtctgaataattcaaagaattgctacgtttgagttatatagttttagacattcaccatagtgttgtaaccaagtagtacataataagtacacagcatgtatcgtttaccaacacggcttaaatggtaatttggtatgctatataaaaatcataatataggtcggagcaaggagatagaatcaacttagtcaagcttgtcatgaatgatttggtcttaaacgtaattaacttgtagacatgatgagagtgctaagagacttttctagaaaaactttgatggcatgattagaattatacctatcagtgagaaacttttcataagagatcttaatgggcatataggtatagcaagtgcaggttttgaggcggtccatggagattttgggtatagtagtaggaagcaagagggagagaaagtcatggactttgcggtagcttttgacctagccatcattttctttagtaagtgagaaacccatttggtgactttagtgaccaatactatagtcaagttgactttgtcctcacaagagaggataaacaagcaagatttttacttggggagtgtgttctcttaacataagcttgtggcggcagtctttcgttttcatgtgcatgcccataaagataagcaaaccaagcttgcgggaacatagtaaaaactaaaaactaaaaggggagatgtcataagtcttcaaggaaaaagccatcaaacagggcacttggaagtagagatggcaatggggacacgattccgattccccgcggggaattcctccattaggggatggggaagaaacttcccccgcggagatgtaaacggggaaaattcatcccccgatgggtaaacggggatggggacggggaaattccccatccccgttctccacggggacccattaaacttgcacgcaacgatgtttttcatgtactagttaatgataaaaataaataattaccttgtcaagagaccactcattgtataaatgtgttcattttgatatatacataaatgatttcttacatctgacaatgtgtataaataacaatgttttactttacattaataacaaaggacatatgtcctaattataaatttaagcggggatggggatccccgtcagggatttatccccgcggggaacagagatgaggaagaaatgtgcccccgcaagcgttcgtggggatcgccgcgggaattttttttcgtcgcaaggacggggatggggagctattcgacgacagggaattccccattgcgatccctacttggaaggaaagatgacacaaacaacatgtgggaaaagatggcaacttgcattcgtaaggtggactgagtggtgtgtggaacaaccaaagagagtgaagacaaagctaaagatatttggtggttgaacaaaaaaagttcaaagggctattaaggagaagaaagaatgttgtagacgtttgtaccatgccagaaatgtagacaacatagagaagacaaggtagcaaagaaaaccgcaaagcaagctataagtgtagcaaagggtagggagtacgaggacttttaccactatttgagtacggaggaaggagggaaggacatttgagtacaaatgaaggagatgacatatatgtaggatggctatgatccgtgaaaagaagacaggggatttcaaccaagttaagtgctttaagaatgaaacaaagcacctcttgataaaggatggtgagatcagacataactaacgagagtattttaataaagtgttcaatcgggaaaatggagacaaccattcagttgggtgacttttgttgacaccaatacacgctttgtgcataggatccaagaatttaagattagagaggcattgaaaggatgaaagagggtaaggtgacaggctctgatggtatcccaattgaggcatggagatgttcgaggacatagttatagtatgactaaccaagttattcaatcatatcttccgatcgaataagatgcctaaccaatggagaaatatattgataccaatctacaagaattaagggaggtatttaaagttgtactaattgatgacgaattaggttaatgaaacatactatcaaactaggagttgcgcgtaggcgcggcgtgctaggaggagctcggcgccgcgtggctgccggggcgtgggcgagttgcctaggcggaggcgcatcagcgcggaccacggaggatcgggccagggtgtggtggaggcgtggaggctatggccggggcgtggtcggaagcagctggtcaggacacagccgacggagctcggaggtcgcggccaggtgcatcacggacgcgcggctgtcacctgtcagaaaggagacgagctcgacgcgatggccagggggagcatgacactggggaggagctcgacgtggcacgtcgtgacgtggagatggggcgagctccggctatggcgcgcgacgaagcgcaacaagcgcgcgcaggcgaggcgctgacggggccgcgtggccgtgcgcacgtgaaggagtggagtggatgagcgcgcgcgagaagcttcgactgtagcagcgagagatttgggtcgggaacgacgctggacgacgaggaagtcgtgctgcgcgaagccggaccggcggttgccgaatccgcgataccgtgaagcgcgaaggccgaatgagaggccagtggacgctgggaaaccagcgagcacgaaagccacgggcacgaaagccggcgggcgctgggaagccggcaagaacaaatctcgcggccagcggctaggaaccctaacctttagctatgtaccataatagcaaaaaactcttcattttagtcttttctgtaatagtatctacaagttgattcatccttcaaaatagtattctaaccattttcaatcatttttattttctttttttatttctcagaacataagttgaccctatcattaccctcgcagctatacaaataatagaaacacaaataatccaggcagagacgcaggagtgcagacgatgagcaacactgctatcttctgtctggtggttcagaccgtagcaaagggtggcagttggccgcacggtcaccatccagcagcaccggcgtgctgctgcaatgtttttttgtgtgccgtcggtgcgatgctgaatgcgagaagagagaggagtcgagccgacgatggggagcaaggagagaataaaatagagagatgcaatatggtcaatgagaagatcaaattgagagtactaaaggagagaagccccacaaaatcaatattataatagcaaaaaactctgttaggagagaatgaaatggcaatttgtgtattccatagggctcaaagagaaaatgtacatagagtaagtttacagagagaaccataaattttagagaaaatacaatacaagaaatgaactatatatatacacactaacaatataaaacagcttatacctgtgcatctttcattcccttctcaatatcaacagtcaagaattcaccttctcgtacgaatttcacatttggacattggtcacagaccttagaaataagaagcatcattaatatatcaaaactctcaatggattaaaatatagatcatgaacaatgtagcaagaaaaagacctgctcagtcatctgttgatacattccaggacctatttgtcgatggtaaacttcgttcctacagttgcagcgcctctttcctggtgctggctttatgacgtttttctctctccaaacctatgacattgaaaatagaaaagtaaatataaacactatatgtttcccttatgcacaacacagtacagctttgtcaaaaattaacaaggaacagtatctagtggatgcattttgttaaagcatgattgaatgacagcataacactttaaaaagcaaggttaaaacatagctatatacttatcacagtctgtcggctaggcaaatcatg

SEQ ID NO: 59099 - DNA, 1504 bp, Zea Mays
gtcctttggttgaagaagactgatgtggtgccgcagcctctgcatcccgagccgaatgccatggagcagcctgtggcgaaacaaaagcactggtgtggccactgcaaaaagcttgcccccgagtatgaaaaacttggcgccagcttcaagaaggctaaatctgtactgatagcaaaggttgactgtgatgagcacaagagtgtatgcagcaagtatggagtttctgggtaccccacaattcaatggtttcccaaaggttccctggagccaaagaagtatgagggtcaacgttctgtggaagcccttgcagaatttgttaacagcgaagcaggtaccaatgtcaagatagctgccattccttcaagcgtcgtggttctgacttcagagacctttgactcaattgtccttgatgaaaccaaagatgtccttgttgagttttatgccccatggtgtggtcactgcaagcatcttgctccgatttatgagaagctggcttcagttttcaagcaggacgacggtgttgtgattgccaatattgatgctgacaagcacactgacttggctgaaaaatatggtgtttctggtttccctacattgaagttcttccctaagggaaacaaagccggtgaagattatgatggtggccgggacttggatgactttgtcaagttcattaatgagaagtgtggcaccagccgggatccaaagggccacctgaatcaagaggctgggcttgtgccaagcttgaatcctcttgtgaaggagtttctcaatgctgctgatgacaagcggaaggaagtcctctctaaaatagaagaggatgttgctaagctcagcggttctgcagccaagcatggaaagatatatgtgacagctgcaaagaagatcatagacaagggctctgactacactaagaaggagactgagaggcttcaccgcatgctggagaagtcaatcagtccttccaaagctgatgaattcatcgttaagaagaacattctttcgatattctcttcgtgaaggtgatgatccacagccacggcctgccagtgacttgaactgatagcgaaccaccactttacggaaaacagaacaaatcggatgatgtgagagaaaggtggtagtgaagtccagtagtggcagagctacttcgtgcacgtagatctcttttgcattttctggttccagggattgacttcgtactcacagtttacttcacacagaaggtttatgtagccatcctgtgataacatctactttctttttgatccaataaattggttattcagcttccgtgaattattttgccctaatgtaatcttggtgcatcttgtttggattggtcactcttagctggcaacatgggaattacctaaattgttgttggctagagggtcactcgtagagatgtcaatgtaagggcttgttcggttagctctcaatccatgtggattgagtgggattgattgggtttaaatctcaaacaagtcaaatttcttcacaa

SEQ ID NO: 59100 - DNA, 1599 bp, Zea Mays
ccaagtaactgcacttctccccgattttccattcgaactcgcatcatggcgttccctcagatctcccgcagagccctcggcctcctgctcgtcatcgccgcagcggccgcgatcgtctcgcccgccaccgccgacgaggtggtggccctgacggaagccgacttcgagaaggaggtcggccaggaccgcggcgccctcgtcgagttctacgcgccatggtgtggccactgcaaaaagcttgcccccgagtatgaaaaacttggcgccagcttcaagaaggctaaatctgtactgatagcaaaggttgactgtgatgagcacaagagtgtatgcagcaagtatggagtttctgggtaccccacaattcaatggtttcccaaaggttccctggagccaaagaagtatgagggtcaacgttctgtggaagcccttgcagaatttgttaacagcgaagcaggtaccaatgtcaagatagctgccattccttcaagcgtcgtggttctgacttcagagacctttgactcaattgtccttgatgaaaccaaagatgtccttgttgagttttatgccccatggtgtggtcactgcaagcatcttgctccgatttatgagaagctggcttcagttttcaagcaggacgacggtgttgtgattgccaatattgatgctgacaagcacactgacttggctgaaaattcttccctaagggaaacaaagccggtgaagattatgatggtggccgggacttggatgactttgtcaagttcattaatgagaagtgtggcaccagccgggatccaaagggccacctgaatcaagaggctgggcttgtgccaagcttgaatcctcttgtgaaggagtttctcaatgctgctgatgacaagcggaaggaagtcctctctaaaatagaagaggatgttgctaagctcagcggttctgcagccaagcatggaaagatatatgtgacagctgcaaagaagatcatagacaagggctctgactacactaagaaggagactgagaggcttcaccgcatgctggagaagtcaatcagtccttccaaagctgatgaattcatcgttaagaagaacattctttcgatattctcttcgtgaaggtgatgatccacagccacggcctgccagtgacttgaactgatagcgaaccaccactttacggaaaacagaacaaatcggatgatgtgagagaaaggtggtagtgaagtccagtagtggcagagctacttcgtgcacgtagatctcttttgcattttctggttccagggattgacttcgtactcacagtttacttcacacagaaggtttatgtagccatcctgtgataacatctactttctttttgatccaataaattggttattcagcttccgtgaattattttgccctaatgtaatcttggtgcatcttgtttggattggtcactcttagctggcaacatgggaattacctaaattgttgttggctagagggtcactcgtagagatgtcaatgtaagggcttgttcggttagctctcaatccatgtggattgagtgggattgattgggtttaaatctcaaacaagtcaaatttcttcacaa

SEQ ID NO: 59101 - DNA, 3186 bp, Zea Mays
cagcctcctccctcgcagcctcccaggccccccaactctcttcctcctctccctccccacaccaattcccattcccaattcgccctcctcaaatccggcgcccgcattcccgaccaccccgcagatctgggatccgccaccgccggatccctcgctgcccgcggcgccccgggacgcgcgtgatcctacccacaaccgtcaagttggcgccccagcgaaggtcgcagcgcctctccggcggcggcgcgggctccgccgccgcgcagccgcccggagcctccggcgcacaggcagcgatgggtgactcaggcgacgccgtcatggcgcgctggctgcagtccgcggggctgcagcacctcgcgacctcctccgccgctggtgctggcggtgccgactaccgcggtgggatgcctgggcttgggggcgctggcgcggggagcatgctgtcgagcctgctcatgcagggctatgggccagaatcggttgaagaaaagcatagactttatactcttctaagaggtttaaattttaacggagagtctgcacccacatcaatgtctgagccttacacaccaacggctcagagctttggtggtgggaaccctgtggaggggttttattcacctgaacttagaggggaacttggtgctggacttctagaccttcacgctattgatgatactgagcttctgtctgaggatgtagcatcggaaccatttgagccatcaccttttatgccaaaggatattgatgatgatgatgaggacgtgatatcagggagtcaacaagcaccattagataattatggtttagtgaccagtgaaaaagagagcactactagagaaaataatgttgcaaagattaaagtagtggtaaggaaaagacctttgaacagaaaggagctatctcgaaaggaagaagacatcataaccgtgcatgattcatcatgtttgacagtatacgagcctaagctgaaggtggatttgacagcttatgtggagaagcatgaattttgtttcgatgctgtcctggacgaacatgtttccaatgatgaggtttaccgtgaaacagttgagcccataattccaattatatttcagagaacaaaagcaacatgttttgcttatggtcaaacaggcagtggcaagacatacacaatgcaacctttgcctctgagagctgcacaagacatggttcgtctattgcaccaacctgtctatcggaatcagaattttaagttgtggcttagctatttcgaaatatatggtgggaaactctttgatcttctatctgacagaaggcaactattgatgagggaagatggcaagaaacaagtttgcattgttggtctacaggaatttgaggtttctgatgttcagattgtcaaggaatatattgaaagagggaatgcagccaggagcacagggtcaacaggggccaatgaggaatcatcaaggtcacacgctattctgcaactggctgtgaagaagcatatcatagtaaaagataccaggagacagagagatcgtgatgctaatgaagctaaaaatacaaaggctgtggggaaaatatcatttattgatcttgctggaagtgagcgtggtgctgatactactgataatgatagacagacaaggattgagggagcagagataaataaaagtctgttagctcttaaggaatgcattcgagctcttgataatgatcagatacacattcctttcagaggaagcaaacttacagaggttcttcgtgattcatttgttggtaactctaggacggtgatgatttcttgcatttctccaaacgcaggctcatgtgaacacacactaaataccttgagatacgctgatagggtcaaaagtctttccaagggtggaaacacaagaaaagagcagcccacaggaccaactaccacttctagccgggagtcttcgtcagctccatcatattcattgcctgctgaagctgaagaaattcctaaccagattcaagagaagagaccagttgatacttatcggaaaggcactgaaaattttacctccaacccttccgcggagcctgatagaaattccttcagtatggttccaaattattctaataaagggagagaagacaatggtgcagcatctggtaatgatagggagaggtatgatttgaagtccacccaaactgcttacactagtaaggcacagttggttcagaattcaacaaacacacaggaggagaaagtcacaaaagtctcacctcctcggagaaaggcttataaagaagacaaatctgatcggcagggcaactacgtgaaaaaggataatggtcctgagacaggtcggactgggtataagatacaacaggcaaagcagctgcaacagcagcaaaggccaacatctgcttcagcttcgtcaaggcaatctgaaaaggaaagttcttgtgatgatgtagaaattgatgcaattcttgaggaagaggaggccctcattgcagctcacaggaaggagatcgagaatactatggagatcgtacgggaaaagttgatcaaccaggtagcctgattgacaactacgtgacccaactgagctttctgctgtcacgcaaggctgcaggcttggtcagcctccaagcacgcttggcacggttccagcaccggctcaaagagcaagagatccttagccgcaagaaacctcccagatagtatgatgatcagcaatgactctgtccttgtgccttgtaatctgattgcttggagctcagttgtggtccatcagctgttttttacgtgtgcgctccagtaaattctatagccccaagcaggccaagacatgtgggagtggcttagggcggtcttgatgtcgagggcgtggtcctggttgatatcacctgacactttttgtcagggccgataaccagtttggtaatagtcctttttctatacagtggggctgcttgggtgtggttgtttttggcttgcccacttttacctttgttttctttttcacatattgtacgagggaaagctggaactgggattttgcagatatcagtgggtcgattttcgctggaggggtctgcggaaacagatacattgttgtcgtatattcattactgatattatttgcattgcggaaggaaaaggatgtgtgaatggtgaaacacttgaaattgccttttccccatttccgagatact

SEQ ID NO: 59102 - DNA, 2973 bp, Zea Mays
gcagcctcccaggccccccaactctcttcctcctctccctccccacaccaattcccattcccaattcgccctcctcaaatccggcgcccgcattcccgaccaccccgcagatctgggatccgccaccgccggatccctcgctgcccgcggcgccccgggacgcgcgtgatcctacccacaaccgtcaagttggcgccccagcgaaggtcgcagcgcctctccggcggcggcgcgggctccgccgccgcgcagccgcccggagcctccggcgcacaggcagcgatgggtgactcaggcgacgccgtcatggcgcgctggctgcagtccgcggggctgcagcacctcgcgacctcctccgccgctggtgctggcggtgccgactaccgcggtgggatgcctgggcttgggggcgctggcgcggggagcatgctgtcgagcctgctcatgcagggctatgggccagaatcggttgaagaaaagcatagactttatactcttctaagaggtttaaattttaacggagagtctgcacccacatcaatgtctgagccttacacaccaacggctcagagctttggtggtgggaaccctgtggaggggttttattcacctgaacttagaggggaacttggtgctggacttctagaccttcacgctattgatgatactgagcttctgtctgaggatgtagcatcggaaccatttgagccatcaccttttatgccaaaggatattgatgatgatgatgaggacgtgatatcagggagtcaacaagcaccattagataattatggtttagtgaccagtgaaaaagagagcactactagagaaaataatgttgcaaagattaaagtagtggtaaggaaaagacctttgaacagaaaggagctatctcgaaaggaagaagacatcataaccgtgcatgattcatcatgtttgacagtatacgagcctaagctgaaggtggatttgacagcttatgtggagaagcatgaattttgtttcgatgctgtcctggacgaacatgtttccaatgatgaggtttaccgtgaaacagttgagcccataattccaattatatttcagagaacaaaagcaacatgttttgcttatggtcaaacaggcagtggcaagacatacacaatgcaacctttgcctctgagagctgcacaagacatggttcgtctattgcaccaacctgtctatcggaatcagaattttaagttgtggcttagctatttcgaaatatatggtgggaaactctttgatcttctatctgacagaaggcaactattgatgagggaagatggcaagaaacaagtttgcattgttggtctacaggaatttgaggtttctgatgttcagattgtcaaggaatatattgaaagagggaatgcagccaggagcacagggtcaacaggggccaatgaggaatcatcaaggtcacacgctattctgcaactggctgtgaagaagcatatcatagtaaaagataccaggagacagagagatcgtgatgctaatgaagctaaaaatacaaaggctgtggggaaaatatcatttattgatcttgctggaagtgagcgtggtgctgatactactgataatgatagacagacaaggattgagggagcagagataaataaaagtctgttagctcttaaggaatgcattcgagctcttgataatgatcagatacacattcctttcagaggaagcaaacttacagaggttcttcgtgattcatttgttggtaactctaggacggtgatgatttcttgcatttctccaaacgcaggctcatgtgaacacacactaaataccttgagatacgctgatagggtcaaaagtctttccaagggtggaaacacaagaaaagagcagcccacaggaccaactaccacttctagccgggagtcttcgtcagctccatcatattcattgcctgctgaagctgaagaaattcctaaccagattcaagagaagagaccagttgatacttatcggaaaggcactgaaaattttacctccaacccttccgcggagcctgatagaaattccttcagtatggttccaaattattctaataaagggagagaagacaatggtgcagcatctggtaatgatagggagaggtatgatttgaagtccacccaaactgcttacactagtaaggcacagttggttcagaattcaacaaacacacaggaggagaaagtcacaaaagtctcacctcctcggagaaaggcttataaagaagacaaatctgatcggcagggcaactacgtgaaaaaggataatggtcctgagacaggtcggactgggtataagatacaacaggcaaagcagctgcaacagcagcaaaggccaacatctgcttcagcttcgtcaaggcaatctgaaaaggaaagttcttgtgatgatgtagaaattgatgcaattcttgaggaagaggaggccctcattgcagctcacaggaaggagatcgagaatactatggagatcgtacgggaagaaatgaaccttttggcagaagttgatcaaccaggtagcctgattgacaactacgtgacccaactgagctttctgctgtcacgcaaggctgcaggcttggtcagcctccaagcacgcttggcacggttccagcaccggctcaaagagcaagagatccttagccgcaagaaacctcccagatagtatgatgatcagcaatgactctgtccttgtgccttgtaatctgattgcttggagctcagttgtggtccatcagctgttttttacgtgtgcgctccagtaaattctatagccccaagcaggccaagacatgtgggagtggcttagggcggtcttgatgtcgagggcgtggtcctggttgatatcacctgacactttttgtcagggccgataaccagtttggaactaagagattttcggactacttgctctggtccttggcggggatttcaatcttat

SEQ ID NO: 59103 - DNA, 1169 bp, Zea Mays
aacctccatttgttccacaatccacattccccaccccccacggcccccgggcccacccaccctctccctcttcttcctcactcctctctccctctctctctctctctctctctctctcgtcctgcgccacacgccgcggccgtctccgggcaggaaggaagggggcgggaagatgatgatgacgcgggcaccgatggggccgatggagggcgcggcggtggacgagatggtgcgccgcctcgtggagggcggccgaggcgggcgccaggtgcagctgtccgaggcggagatccggcagctctgcgtagagggcaagcgggtgctcctctcccagcccaatctcctccgaatccacgccccagtcaagatctgcggtgatatccatggccagtttgtcgaccttctgagattattcgatttgggtggttatcctccagcttcaacttacgtattcctcggagactatgtcgatagaggcaaacagagcctggagactatatgcttgctgctggcgtacaaaatccggtaccccgaaaatattttcctgttgaggggtaaccacgaggatgcaaagatcaacagagtctatggtttttatgacgaatgtaagaggaggttcaatgttcggctgtggaagatattctctgattgcttcaactgcctgcccatcgcagcgctcatcgatgacaagatactgtgcatgcatggtggcctctcgcccgaattgactagtttggaccagataaaagatattgagcgacctgctgagattcctgattatggtctcctgtgtgatctgctttggtctgatcctagccccgatggagaagggtggggggagagtgacaggggtgtctcgtgtacgtttggtgcagataaacttgtagagtttttggagaagaatgatctcgatcttatatgccgagctcatcaggtggttgaagatggctatgagttctttgcacaacgaagattagtgacaatcttttcagctccaaattattgtggagagtttgataatgttggcgctcttttaagcatagatgagagcctaatgtgttcatttcagatcctgaagccaactgatatgggtccaccgcatgcaagaaaacaaattccaaataaggcgcatgatttgatggcaagcaaactgattacatcactctgtc

SEQ ID NO: 59104 - DNA, 1435 bp, Zea Mays
aacctccatttgttccacaatccacattccccaccccccacggcccccgggcccacccaccctctccctcttcttcctcactcctctctccctctctctctctctctctctctctctcgtcctgcgccacacgccgcggccgtctccgggcaggaaggaagggggcgggaagatgatgatgacgcgggcaccgatggggccgatggagggcgcggcggtggacgagatggtgcgccgcctcgtggagggcggccgaggcgggcgccaggtgcagctgtccgaggcggagatccggcagctctgcgtagagggcaagcgggtgctcctctcccagcccaatctcctccgaatccacgccccagtcaagatctgcggtgatatccatggccagtttgtcgaccttctgagattattcgatttgggtggttatcctccagcttcaacttacgtattcctcggagactatgtcgatagaggcaaacagagcctggagactatatgcttgctgctggcgtacaaaatccggtaccccgaaaatattttcctgttgaggggtaaccacgaggatgcaaagatcaacagagtctatggtttttatgacgaatgtaagaggaggttcaatgttcggctgtggaagatattctctgattgcttcaactgcctgcccatcgcagcgctcatcgatgacaagatactgtgcatgcatggtggcctctcgcccgaattgactagtttggaccagataaaagatattgagcgacctgctgagattcctgattatggtctcctgtgtgatctgctttggtctgatcctagccccgatggagaagggtggggggagagtgacaggggtgtctcgtgtacgtttggtgcagataaacttgtagagtttttggagaagaatgatctcgatcttatatgccgagctcatcagatcctgaagccaactgatatgggtccaccgcatgcaagaaaacaaattccaaataagccaacaagagggtgaagccttggaccagcatccaatacttccagttccagtatcatgatgatcgtcagtcagctcaaagggggtgatctgttgtttggatagttggatccaccagggcctgacattagacatccatcagccaattaatccctttagccaccctttactcgtgtcttgggaggcggcttggctgtaaaggatattctgtacagcatttagttggattcaacacatcatctgttttactgttcttcctgccggcaagggacctcattggcagcatgacatacaatagatgttagtagtctcaatttgttttccttagcttctgccttgcgtttttttttttttggtgcgggacttgatgtatggtgattttatatctttgtaatatgtagatgttgcaggaaataggtctgcacaaacccatcagcagcaccgccc

SEQ ID NO: 59105 - DNA, 1073 bp, Zea Mays
atcgcgacaacgagcagagaggaagcgagaggcgaggagagagaaagttctcgagctagacgagcgccgtgcgaggagagaagcgagatgagcggtgaggcggcggccgtgggcggaggcgaaggagaggcgaatggcatcccgccgaacgtcaccatctatatcaacaacctcaacgagaagatcaagctcgaagaacttaagaagtccctaacagccgttttttcccagtttgggaaaattcttgatgtgcttgctttcaagactttgaagcataaaggtcaagcttgggttgtcttcgaagatgtcgcatcagctactgaggctctgaagaggatgcagggctttcccttctatgacaaaactatgagaattcaatatgccaagaccaaatcagatattatagcaaaggctgatggcacctttgtacctcgagaaagaagaaagaggactgatgaaaaatctgaaaagaagcagaagcgcgagcatcaccatgatgctggtgctagtcaaattggcatgggtgtaactgcttaccctggtgtttatggggctccacaggaggacaaagggtcatgatgccagagattatcgtaccaaacaacatcttgtttgtccaaaacttgccacacgagacgacgcccatgatgctccagatgctcttctgccagtaccctggcttcaaggaggttcggatgatcgaggcgaagcctgggattgctttcgtggagtatggagacgagacccaggccactgctgccatgaacaaccttcaaagcttcaaaattacaaaagaaaaccagatggtcatcacatatgcgaagaagtaatgagctcccgagcaatgtttacctgatgtgtgagatgttgtattccgagttttacacaactggtaaatttccttcatgtgttaggtagacagcatcctgaacaacctgttaattgtacccactgggctgcagctatgtgcacttcaggaacggagatgaaatgcaaactgttattatttggtctgctcttgtattcacacgtagcaagtagcaactgcttcgcttaattgggcatttgtttgc

SEQ ID NO: 59106 - DNA, 838 bp, Zea Mays
atcgcgacaacgagcagagaggaagcgagaggcgaggagagagaaagttctcgagctagacgagcgccgtgcgaggagagaagcgagatgagcggtgaggcggcggccgtgggcggaggcgaaggagaggcgaatggcatcccgccgaacgtcaccatctatatcaacaacctcaacgagaagatcaagctcgaagaacttaagaagtccctaacagccgttttttcccagtttgggaaaattcttgatgtgcttgctttcaagactttgaagcataaaggtcaagcttgggttgtcttcgaagatgtcgcatcagctactgaggctctgaagaggatgcagggctttcccttctatgacaaaactatgagaattcaatatgccaagaccaaatcagatattatagcaaaggctgatggcacctttgtacctcgagaaagaagaaagaggactgatgaaaaatctgaaaagaagcagaagcgcgagcatcaccatgatgctggtgctagtcaaattggcatgggtgtaactgcttaccctggtgtttatggggctccacagctcacccagatacctatagcaggaggacaaagggtcatgatgccagagattatcgtaccaaacaacatcttgtttgtccaaaacttgccacacgagacgacgcccatgatgctccagatgctcttctgccagtaccctggcttcaaggaggttcggatgatcgaggcgaagcctgggattgctttcgtggagtatggagacgagacccaggccactgctgccatgaacaacaacgttctgttcgacctgatctaggcacatgatacaatacaaaaat

SEQ ID NO: 59107 - DNA, 963 bp, Zea Mays
aattcaaaaccctagcagcaccacccgtcttcctcttcacccacattataaagatcctccacttcgcactttcgccgccgcctctctccttcccgagcaggaggcggacaaggtaagcagcaatcgcaggaaccctagcgccgccgcacccgcaggaatgggtatcgacctcgtcgccggtgggaggaataagaagaccaagcgcactgcgcccaagtctgacgatgtctacctcaagctcctcgtcaagctctaccgtttcttggtcaggaggaccaagagcaatttcaacgctgtcattctcaagaggcttttcatgagtaaaaccaaccgaccaccaatctccatgcgccgccttgtcaagtttatggaaggaaaggagaagaacattgctgtcattgttggcacagtcacagatgacaaaaggatccaggaggttccagcaatgaaggttactgccctgaggttcacggagacagcaagggccaggattgtcaatgctggtggcgagtgcctcacatttgaccagcttgctcttcgtgctccacttggcgagaacacggtcctcttgaggggccccaagaatgcccgtgaggcagtgaggcactttggcaaggctcctggagtgccgcacagccacaccaagccgtatgtgcgctccaagggaaggaagttcgagaaggctcgtggcaggaggaacagccgtggattcaaggtttaaaacaaattgtggccctccgtgttgccatcagcatagtgcaaccgttgtgtttgatcagtcgacagtaattagtcatcactctgtaccgagattagtagcacaatttgttgtcctggtttgaattttggaagatatttgatgtcgtctccttattatctactcgttactggttgagcacgaagattgttttgtgatactcctacatgatttaagacggttcccgacgttccatgaaaaaaaaa

SEQ ID NO: 59108 - DNA, 1055 bp, Zea Mays
ggatttgtccggcatgcccgaagaccccacacatgagctgagatagaagcaagctctcatcacaagggacctgtccaggttggagaatctcctctctctctcctcagctcccccctgcctcgctagcgatataacaacccatgtcagcctgcttgccagctcccaccagagatcagagcctcttggctaagctagagtgggagggagggagggagagctcgccgtttccgacacatcggcagcgccggagatcctgaaaagagaaagtttgcagatgaggacgacagggaccatcatgaaccttcaccgagacatggacggcagggagcagatgaggacgaccatccagaaccaagaacaggtcttcagacaacaggtacacgagctgcaccggctgtaccacgtacagaagcagctgatgcaggtgcggcaggcacacgcgcctgctcctgcgacccgtgctccagcagtgctcgacgacgccaagccaagaagaccgcagctagacatctggtgcagcgagacggcgcgaaacccccctcagcagcagttcatcagcttcaacacggccacggcaccggcgcctgctgccccggccgagaactgcaaccttgagctgacactcgcaacgggaccgagcagcagcggcagctgcgacgccggaaggtggcaggggaagcggctcaaggcgtcgcccaactcgggctccgccgccaccgcggtgtcttccacgtcgacggattcggagctggcgcggttcggggacatcgacgtcgtggcgacgccggtggccaggtttcacggcgaggttactaggaggatggacgaggtggcgcagggcccgtggatgtaccgctgcctgagcttgaagacggcgtgacgagtttgtgttgtatgtaggtaggaatggccccatggggatttggagttgtagagttcagacttcagagggagacagagcatttttctgtgatacatgcacacgactatacatcacattcatcgtggtgtttcagaagaccaaaatgagatatagaaaaagaaggataagatag

SEQ ID NO: 59109 - DNA, 896 bp, Zea Mays
gctcgccgtttccgacacatcggcagcgccggagatcctgaaaagagaaagtttgcagatgaggacgacagggaccatcatgaaccttcaccgagacatggacggcagggagcagatgaggacgaccatccagaaccaagaacaggtcttcagacaacaggtacccgcaaaacgagcacctgcagtctgcacacgtacagtatgctgaatttcacttgtacacgagctgcaccggctgtaccacgtacagaagcagctgatgcaggtgcggcaggcacacgcgcctgctcctgcgacccgtgctccagcagtgctcgacgacgccaagccaagaagaccgcagctagacatctggtgcagcgagacggcgcgaaacccccctcagcagcagttcatcagcttcaacacggccacggcaccggcgcctgctgccccggccgagaactgcaaccttgagctgacactcgcaacgggaccgagcagcagcggcagctgcgacgccggaaggtggcaggggaagcggctcaaggcgtcgcccaactcgggctccgccgccaccgcggtgtcttccacgtcgacggattcggagctggcgcggttcggggacatcgacgtcgtggcgacgccggtggccaggtttcacggcgaggttactaggaggatggacgaggtggcgcagggcccgtggatgtaccgctgcctgagcttgaagacggcgtgacgagtttgtgttgtatgtaggtaggaatggccccatggggatttggagttgtagagttcagacttcagagggagacagagcatttttctgtgatacatgcacacgactatacatcacattcatcgtggtgtttcagaagaccaaaatgagatatagaaaaagaaggataagatag

SEQ ID NO: 59110 - DNA, 874 bp, Zea Mays
gtttccgacacatcggcagcgccggagatcctgaaaagagtgccagcagagtacctgatcctcgaactttctcgtggaacagaaagtttgcagatgaggacgacagggaccatcatgaaccttcaccgagacatggacggcagggagcagatgaggacgaccatccagaaccaagaacaggtcttcagacaacaggtacacgagctgcaccggctgtaccacgtacagaagcagctgatgcaggtgcggcaggcacacgcgcctgctcctgcgacccgtgctccagcagtgctcgacgacgccaagccaagaagaccgcagctagacatctggtgcagcgagacggcgcgaaacccccctcagcagcagttcatcagcttcaacacggccacggcaccggcgcctgctgccccggccgagaactgcaaccttgagctgacactcgcaacgggaccgagcagcagcggcagctgcgacgccggaaggtggcaggggaagcggctcaaggcgtcgcccaactcgggctccgccgccaccgcggtgtcttccacgtcgacggattcggagctggcgcggttcggggacatcgacgtcgtggcgacgccggtggccaggtttcacggcgaggttactaggaggatggacgaggtggcgcagggcccgtggatgtaccgctgcctgagcttgaagacggcgtgacgagtttgtgttgtatgtaggtaggaatggccccatggggatttggagttgtagagttcagacttcagagggagacagagcatttttctgtgatacatgcacacgactatacatcacattcatcgtggtgtttcagaagaccaaaatgagatatagaaaaagaaggataagatag

SEQ ID NO: 59111 - DNA, 668 bp, Zea Mays
gtttggtatgaaaacaatgaaacagtctacttgcaagcttaaacatcttaattaaattttaaaaatagtgcatgtaactacgcaaatacaatcccatgagaaatatgcaaacatagagctaggaagcttaaatgacttcattaaaccacaagatggataagcaataaaaataaaacaaacttgcatggatccatttttagatgagggaatgactttttgaaaatgagtaaatgtatcaccctataagagctctcaagcctatccttgtacttctcagccaaaatctccccacttaatgtcagttccctttcaacaactgcctctgtctcaaactgttcacacaacaaggaaattagttcttttggataaacatttttacccagctaggtgaaaattaaagcgtgatctgacacctgaataacaatgtgaggatacaaagtttgtcctttgcgaattggtggatcaagtgtgataaccacaaaggtatgtggattgtgtgactgcatatatgtgaaaaggcaaggatggaatcatatgttagtaggtgcaataaaagatctcagcatgcatgcaaaataaatacaacctttggtaaaacaaataggcggagaatactactatactggattttgaaatcattagcttgtccttggagtcgcaagaatgac

SEQ ID NO: 59112 - DNA, 264 bp, Zea Mays
cataggaattcttaggaataacataccaaacaacatacattaatggcaaatgtcaggcgacaacaagtcaagataccgaagtaccagtcgactctatcaagtttgggaacataaagagcattttcaagaaggcctacagagaggctggcagaacaaagcggaaaccagagttctacaggtctcaaagttacctccatcgagggcctcccagcctgatgacctcctcagcgcatgaatcacggtgaagcttttcagcatcactgt

SEQ ID NO: 59113 - DNA, 2242 bp, Zea Mays
caacggtcgatacatcacgctccgtggagatcgacggctgagaatgagatggatggagctaccatcgtcgtcttccgtacgcccacccgacaccaagctgtaaactcgagctcccccacactgcgagtccgccgaaaactccaaaagctctgcgctttctgccccctcctccactcctcgagatcccatccatggtggcggccttcgcacctcgcccccggatctgagcccctccagctactgcgggatattttctccagcgcctccgcttcgctggtccgaccgccgcacggttctctgccgtgcaagattcgccgctcagttttcgtggagtcggtagttgtccgtggctcggccatgtgttcctgaaacgggcctttgatgccagtggtgggcgcccacgctctcctgccgctatgtggaagcagtttctcggcaaaatctcgcggaagtcccccaaatcaggcgggcgcgggggctcgcggccggcgaagtcgccgtcgtcgcgtggcgccgccaatggggcgccgccggagctgagcgcttcgtcgccggcggcggcggcgtcgcccttccccccgccgtccggggcggagaccagggaggacgtgttcctccgcaagctcaacgtctgctgcgtggtgttcgacttcgcggccgagcgggggaaggactcgccggaggtggaaaggaagcggcaggtgctcgtgtccctcgtcgactgcgtctctgaggcggaggagcccctcacggaggcgatgctctcggcctgcgtacgcatgttcgccatcaacctcttcagggtcttcccgcccaagctccggtccggtgccagtgccgccaccgacgaggacgagccgttctttgacccctcgtggtaccacctccagggagagggaatgcttgaagacagtgctgcacaggatatacgggaaatttatgggcaatcgcccgttcattcgcaaggctgtgagcaacatcttctataggtttgtgtttgagacagatcaccacaatgggattgccgagctactggaggtgtttgggagtgtgattaccggctttgcgaagccattgaaggaggagcataagttgtttctatggaaggcattgattccacttcacaaaccaaagacggttggagtatatttaccacagttgacatactgcattacccagtttatcgagaaggaaccaaagctcacagggactgttatcagaggcctcctgaagtactggccggtgacgaacagtcagaaggagatgatgttcttaggagagttggaggaggtgctggagctgacagaaatggcagatttccagaagtgtgctgttcctttgtttcgcaggatcgcacagtgcctgaatagctctcattttcaggttgctgaaagggccttattcctgtggaataatgaacatttgttcgacctgatctcccaaaactgccaagttatcctgccaatcatctatccagctctggagaggaatgcccgttggcactggaaccagtcagttctaaatgttacaatgaatgtcaggaaaatgttctttgacatggatgagagattgctgctggcttgtcagaccaattttcaagaggaggaaaagaagcgggctgcatctgaggagcgaagaagacttgtgtgggagcatctcgagaggaatgccgcatttcatcctgtaaccggagacattggctttgcagttcctcctacatctgctcctctggttgctcccactatgacatgattaataatgggctcatatgtaattcataccgcctgattgttagctaggtttgggtgtttggtgttgccccaggaattttgttgcctttgtaagccccttgtgaagtctgtaattaatagatgctggtttgacaatgaatgcttgattctttggtgtactctcaagttatggtcatatctttgtatctcaagataatgcctagttctactttgctggaggggtgaaaaggtgtttccttagaaaatttccaggggagctgaacagctgatgctatgcacatattgatgcatttcttttatcttttgggttctcatggatctacacaaatgtcatgtttaatgggtgaacatgaaactgaggtaagttcatatcacttatcacgatttgataagtccaatgtttttttttcttttttactcgtaagggatcggaatttgcaactagaatttgtagttgttcatggaaattgtaagtcctgtcaggccatctt

SEQ ID NO: 59114 - DNA, 973 bp, Zea Mays
gtcagatttgaacaagatttgacatattgtttcgtctgcatgtgtggggtatcttatcaagaaacaaaaacatgattgaattggccctttagaatttatgaagcttgagatatggttgctgaaagggccttattcctgtggaataatgaacatttgttcgacctgatctcccaaaactgccaagttatcctgccaatcatctatccagctctggagaggaatgcccgttggcactggaaccagtcagttctaaatgttacaatgaatgtcaggaaaatgttctttgacatggatgagagattgctgctggcttgtcagaccaattttcaagaggaggaaaagaagcgggctgcatctgaggagcgaagaagacttgtgtgggagcatctcgagaggaatgccgcatttcatcctgtaaccggagacattggctttgcagttcctcctacatctgctcctctggttgctcccactatgacatgattaataatgggctcatatgtaattcataccgcctgattgttagctaggtttgggtgtttggtgttgccccaggaattttgttgcctttgtaagccccttgtgaagtctgtaattaatagatgctggtttgacaatgaatgcttgattctttggtgtactctcaagttatggtcatatctttgtatctcaagataatgcctagttctactttgctggaggggtgaaaaggtgtttccttagaaaatttccaggggagctgaacagctgatgctatgcacatattgatgcatttcttttatcttttgggttctcatggatctacacaaatgtcatgtttaatgggtgaacatgaaactgaggtaagttcatatcacttatcacgatttgataagtccaatgtttttttttcttttttactcgtaagggatcggaatttgcaactagaatttgtagttgttcatggaaattgtaagtcctgtcaggccatctt

SEQ ID NO: 59115 - DNA, 835 bp, Zea Mays
catcctcccgcccattgctacaaattcccctcgccaccccaccggtcgcaaacccaagcttaaaccacaacgcaaacaaccaccaaagcaatcgaaaagcaaccctgcaagtgcaggcaaagagagggcgcgaccaaacagatccaatccaatggcgatggcaccgtccgcagcatgcgtcgtctcgttccccgcccgcccggcggcgtccacggccgggccccgcgccgccgcgggcgccggggcggtccacgctttcgcggggtcggcggagggcgccaagtggtgggcgccgctgctggggtggtcggggaaggccgactacctggaggcgccgcggaggcagttcgtgggggtgatgacggaggagaaggcccgggagctgcgggcgcggatggcgcagacggagtccttccacgacgccatgtaccactccgccatcgcgtcgcgcctcgcacgctcctcctagggttggtgcgcgcgcggccagctcgccggtgggttgcgccgccgccgtagcccggtctctgtctggccgtctctgtgtacatatggtagatttgtcagtagctggctagctgctcccgctgttggtgaaggaggggggaacgaaagagcaaggagatctggatttttttttttagcgtgtgctccttgcttgttccatctccctccgccgcgttggttgctcttgctccccggcaggatcactcttcttttttccggttgtgattcgacatttccggtgtgaactggcattatgctccgcaccaagaacctgtaacccattgttgtagtctcaatttgctttcctcagttgcccgtgtccattaca

SEQ ID NO: 59116 - DNA, 1561 bp, Zea Mays
tccgtccgtgtccgtctcctcccccatccgctccggctccctccctgctataaataccggaccgaccctaggcctccgacagcaatcagcaataatctcgccgtctcatcgcaaaacccagcgccccaaagcgaccccaccgaagcgtcccagcccgaccggaatggcgatggcaccgtgcgcacccgcctccgtctcctccttccccgcccgcccagtgcgggccccttccgctgtccggccgcgcgccgccgcgatccgcgccactgcggcggcggcggagggtggcaggtggtgggcgccgctgctggggtggtcggggaaggccgactaccttgaggccccggccccggtgccggcggtgctgcaggatgacgacgcggccgcggcgcgcaggcagttcgtgggggggctgacggaggagaaggcccgccagctgcgggcgcggatggcgcagacggagtccttccacgacgccatgtaccactccgccatcgcctcacgcctcgcccgctccgcctaaaccggccggccggccggccagctggccgccgccgtagatctagagctccgcccgcttttgtgtatactggtttcgccttcattttcggggatgtctttgtttccactaccccattgtcgtcgtcgtcgtcgtggagcaggaggggcagggatctgctggttttatgaggcgccctacccctccctcccattgtccaccgcggcggccgctccgggatgtgcccgatctgcgcagatccgcgaagcgttgctgcaacctactactatgtactagtactgttactcttcaaagttccctctcttattagttgttgctaaattaatgctccaatgtcagatgtggtagcgtgacagatactatttggttttcccgagtcaatcatcacatcgacatatctataataattcaactagtaatcgcagacaccgacctcccatcattaatttaagccaacacgctaaccaaaactcgatcgatccagtgcaccatcgacgccgcagatctgtccagcaaaaatggagcaagtggccggcccgtgcagaaacagcagattattttagccaacatgacgtgcttattaaagccgagggaacatggaatctttcactatgagtattcgctaacaactgaaaaaatatcattatcagaggggggcaactttttctttttgcaatattcttttttttttctataaaccgcaggagcagcatccttcaaagcttaacatgtttcaagcagcagacagttgttcaatccgtaccagcgatgagagatgtcaaagaccattcgtgaagaataaccaagtccaaaccagttcttcacggcttgacgcgtagccaactaaacatcgctaccagatcagctgtacaatggacaaacctcgccgaatgccagcgatagagctcaatgacggtgataacaagaaccgaacaaatgctgcagttgcatcacgccctaaggatgtctccagcaacgtttctctgtatccgtcttttacagagtctcctttacagtctcctttaaaagattatattctct

SEQ ID NO: 59117 - DNA, 1147 bp, Zea Mays
acataaattatatagattcattaattatctaaaagaaattttaatttgggacggagagagtaatatactatatcatggatacaatcgaaattacaaaattagccaacacgagcatgtaaggaatcgtttggaagctagaggattgaacgggattgaagaggctaaaatcctcggatgatattaaccctttcaatcctctcacaatccttcggctctcccaaacaagcactaaatggaataccatcgctgaaaatatttctcaatctggaattactttatttgctcaaccattccatccttttgccaaacataatagcaagaccaaagaaaacatatgggtacatagcacactagttagtctgaattgccatgtcagctctcatccaacaatctggaatcccgatggaatcaaattttgctacctgaaaacttatcccctcatccttcgagggatgcccatcatttgctctccacatcatacagttccgatatgagattgcccccgccccataaaaccccgcgcccacctccgcccacctgcgcacgccggaaacctcgccgccaaatccgcccaccaccgcacagctccgcacgcctgcgcacgccggaaacctcgccgccaaatccgcctacctccgcacagctccgttcgcctgctcccaagccgcagtcccgccgcgtcccacctccgcccacctccgctcgcctgcgcacgtcggaaacctcgccgccaaatccgcctacatccgcccacctccgctcgcctgctcccaagccgcagtcccgccgcgtccgccgcgaaatctgcgagccaccctaccaccatccccacgccgcaagcccgtcgagaccgccgcgaaagccgctcacacgccgcaatcccacacgccccacacgcctctgcatccgtcgcgacctccgcgaaccgcccgcgccaaccattgctacacgccatggtcgatccatggaaccccacacgcctcaaaccaagccgcgacccatggcgagccgccctaacgcccgccctaacgccagcacgcggcaatcccgcaaatcccgtcgtggccactgcagccacctcaaatctgttgcgcatcgattgcggcgggacaaactccctaatcctactcactgcgccttccattga

SEQ ID NO: 59118 - DNA, 1009 bp, Zea Mays
atgtccggatacttcaacgaagtatccacagctgctttccagcttgggaatcgaatcgaagattgaagagatcctaaggaactctgccaattttgaaaatggtggtgtatattattattcaaagagaggtgaccgactgattgatcttgatgctttccatgaaaaacttctccagatttcacaagaattgaactcacaattaaccgagcctgagaaagctggactaaaagaataagttcatcgtttcctcaaatgggcgtggcgatataacaaaaaacttgaagagcaggctgcccaacttcacatgttgactggctggtcacagattgttgaagttgctgtatcaagaaggatgtcattattcgaggactgttatcagctattgtttgagagaagcataccaagttctcagtgaccctacacagcgccaagcttatgactcgcatgggaaagacgacatctcaacgtacgttcagttacaaataaattacttgctgccgcttttcaatggaaccagggcttgttggaacatgggaaagtttcttatttctatgtgaatcaaactgtttcaaaccagtccagtgccttttttttggcactgctgctgctttcagcaggaaaataaaacttgaagtgctaccaagtggcatgattctgctgcatcttattagtaggaaacagaggctgtaccaaaagggagggtgttaagctcagagagtcaggattcatgattaaccatcatgtatattgtatttggaactttagagaaaattatatcccctgctgaagaggctgttcaaaaggatcgggaagaaaaacttgcagagacactgaaaaaccggctacacatcactgtgcaaggaaataaggcagaattcatccagcatgctgaagcagaggtgtccaaacttagaaatgcagtgagctttttgaggaatatattggtcaactggcaatggcatcaatggcttcacttgataattttggtgaagatgagtagattgatgca

SEQ ID NO: 59119 - DNA, 698 bp, Zea Mays
tgtcattattcgaggactgttatcagctattgtttgaactgcttgatgcttcgttgaatgcctgttttgcccattctaggagaagcataccaagttctcagtgaccctacacagcgccaagcttatgactcgcatgggaaagacgacatctcaacgtacgttcagttacaaataaattacttgctgccgcttttcaatggaaccagggcttgttggaacatgggaaagtttcttatttctatgtgaatcaaactgtttcaaaccagtccagtgccttttttttggcactgctgctgctttcagcaggaaaataaaacttgaagtgctaccaagtggcatgattctgctgcatcttattagtaggaaacagaggctgtaccaaaagggagggtgttaagctcagagagtcaggattcatgattaaccatcatgtatattgtatttggaactttagagaaaattatatcccctgctgaagaggctgttcaaaaggatcgggaagaaaaacttgcagagacactgaaaaaccggctacacatcactgtgcaaggaaataaggcagaattcatccagcatgctgaagcagaggtgtccaaacttagaaatgcagtgagctttttgaggaatatattggtcaactggcaatggcatcaatggcttcacttgataattttggtgaagatgagtagattgatgca

SEQ ID NO: 59120 - DNA, 3845 bp, Zea Mays
ggaaggtgcggagaggaagaggaagcgaagcagcagcagcaccaccactgcgcggcattgcagcgagcaagcgggagggatctggggcatggtggcggtcgctgccgctgccgctcggatctagagggccgcacgggctgattgccctccgccggcctcgtcggtgtcggtggagtgtgaatcggtgtgtgtaggaggagcgcggagatggcggccaacaaggggatggtggcaggctctcacaaccgcaacgagttcgtcatgatccgccacgacggcgacgcgcctgtcccggctaagcccacgaagagtgcgaatgggcaggtctgccagatttgtggcgacactgttggcgtttcagccactggtgatgtctttgttgcctgcaatgagtgtgccttccctgtctgccgcccttgctatgagtacgagcgcaaggaagggaaccaatgctgccctcagtgcaagactagatacaagagacagaaaggtagccctcgagttcatggtgatgatgaggaggaagatgttgatgacctggacaatgaattcaactataagcaaggcaatgggaagggcccagagtggcagcttcaaggagatgacgctgatctgtcttcatctgctcgccatgacccacaccatcggattccacgccttacaagtggacaacagatatctggagagatccctgatgcatcccctgaccgtcattctatccgcagtccaacatcgagctatgttgatccaagcgttccagggttgatgatgcacgcctacctttgagccgcattgtgccaatttcctcaaaccagctcaacctttaccggatagtaatcattctccgtcttatcatcctgtgcttcttcttccaatatcgtatcagtcatccagtgcgtaatgcttatggattgtggctagtatctgttatctgtgaggtctggtttgccttgtcctggcttctagatcagttcccaaaatggtatccaatcaaccgtgagacatatctcgacaggcttgcattgaggtatgatagagagggagagccatcacagctggctcccattgatgtctttgtcagtacagtggatccattgaaggaacctccactgatcacagccaacactgttttgtccattcttgctgtggattaccctgttgacaaagtgtcatgctatgtttctgatgatggctcagctatgctgacttttgagtctctctctgaaactgccgaatttgctagaaagtgggttcccttttgtaagaagcacaatattgaaccaagagctccagaattttactttgctcaaaaaatagattacctgaaggacaaaattcaaccttcatttgttaaggaaagacgagcaatgaagagagagtatgaagaattcaaaataagaatcaatgcccttgttgccaaagcacagaaagtgcctgaagaggggtggaccatggctgatggaactgcttggcctgggaataaccctagggaccatcctggcatgattcaggtgttcttggggcacagtggtgggcttgacactgatggaaatgaattaccacgtcttgtctatgtctctcgtgaaaagagaccaggctttcagcatcacaagaaggctggtgcaatgaatgcactgattcgtgtatctgctgtgctgacaaatggtgcctatcttctcaatgtggattgtgaccattacttcaatagcagcaaagctcttagagaagcaatgtgcttcatgatggatccagctctaggaaggaaaacttgttatgtacaatttccacaaagatttgatggcattgacttgcacgatcgatatgctaataggaacatagtcttctttgatatcaacatgaaaggtctagatggcattcagggtccagtctatgtgggaacaggatgctgtttcaataggcaggctttgtatggatatgatcctgttttgactgaagctgatctggaacctaacattgttgttaagagctgctgtggtagaaggaagagaaagaacaagagttatatggatagtcaaagccgtattatgaagagaacagaatcttcagctcccatctttaacatggaagacatcgaggagggtattgaaggttatgaggatgaaaggtcagtgcttatgtcccagaggaaattggagaaacgctttggtcagtctccaatcttcattgcatccacctttatgactcaaggtggcataccaccttcaacaaacccagcttctctactgaaggaagctatccatgttatcagctgtgggtacgaggacaaaactgaatggggaaaagagattggctggatctatggttcagttacagaggatattctgactgggtttaaaatgcatgcaagaggctggcaatcaatctactgcatgccaccacgaccttgtttcaagggttctgcaccaatcaatctttctgatcgtcttaatcaggtgctccgttgggctcttgggtcagtggaaattctgcttagcagacattgtcctatatggtatggctacaatgggcgattgaagcttttggagaggctggcttacattaacaccattgtttatccaatcacatctgttccgcttatcgcctattgtgtgcttcctgctatctgtcttcttaccaataaatttatcattcctgagattagtaattatgctggaatgttcttcattcttctttttgcctccattttcgcaactggtatattggagctcagatggagtggtgttggcattgaagattggtggagaaatgagcagttttgggttattggtggcacctctgcccatctcttcgcggtgttccagggtctgctgaaagtgttggctgggattgataccaacttcacagttacctcaaaggcatctgatgaggatggcgactttgctgagctatatgtgttcaagtggaccagtttgctcatccctccgaccactgttcttgtcattaacctggtcggaatggtggcaggaatttcgtatgccattaacagcggctaccaatcctggggtccgctctttggaaagctgttcttctcgatctgggtgatcctccatctctaccccttcctcaagggtctcatgggcaggcagaaccgcacgccaacaatcgtcatcgtttggtccatcctccttgcgtctatcttctccttgctgtgggtgaagatcgatcctttcatctccccgacacagaaagctgccgccttggggcaatgtggtgtgaactgctgatccagattgtgactcttatctgaagaggctcagccaaagatctgccccctcgtgtaaatacctgagggggctagatgggaattttttgttgtagatgaggatggatctgcatccaagttatgcctctgtttattagcttcttcggtgccggtgctgctgcagacaatcatggagcctttctaccttgcttgtagtgctggccagcagcgtaaattgtgaattctgcatttttttatacgtggtgtttattgttttagagtaaattatcatttgtttgaggtaactattcacacgaactatatggcaatgctgttatttatacgcaaagactgatacattcttcggattgtgagcaaacagtcagaacactgtaatctcttaggacaactatataaggcagctgttgtatcatctctattgtttctaatggccgagggatatgtagatgtaaatcacttgcaacatcgtattgttggcagtctgtaatgtttgaaaagcatggagggactgatgcggcgtggtctttcatgaattggggaatcagatggcagtccggtagaacttctgctaccgtattttctgatggcattacctttccag

SEQ ID NO: 59121 - DNA, 3727 bp, Zea Mays
ggaaggtgcggagaggaagaggaagcgaagcagcagcagcaccaccactgcgcggcattgcagcgagcaagcgggagggatctggggcatggtggcggtcgctgccgctgccgctcggatctagagggccgcacgggctgattgccctccgccggcctcgtcggtgtcggtggagtgtgaatcggtgtgtgtaggaggagcgcggagatggcggccaacaaggggatggtggcaggctctcacaaccgcaacgagttcgtcatgatccgccacgacggcgacgcgcctgtcccggctaagcccacgaagagtgcgaatgggcaggtctgccagatttgtggcgacactgttggcgtttcagccactggtgatgtctttgttgcctgcaatgagtgtgccttccctgtctgccgcccttgctatgagtacgagcgcaaggaagggaaccaatgctgccctcagtgcaagactagatacaagagacagaaaggtagccctcgagttcatggtgatgatgaggaggaagatgttgatgacctggacaatgaattcaactataagcaaggcaatgggaagggcccagagtggcagcttcaaggagatgacgctgatctgtcttcatctgctcgccatgacccacaccatcggattccacgccttacaagtggacaacagatatctggagagatccctgatgcatcccctgaccgtcattctatccgcagtccaacatcgagctatgttgatccaagcgttccagttcctgtgaggattgtggacccctcgaaggacttgaattcctatgggcttaatagtgttgactggaaggaaagagttgagagctggagggttaaacaggacaaaaatatgttgcaagtgactaataaatatccagaggctagaggagacatggaggggactggctcaaatggagaagatatgcaaatggttgatgatgcacgcctacctttgagccgcattgtgccaatttcctcaaaccagctcaacctttaccggatagtaatcattctccgtcttatcatcctgtgcttcttcttccaatatcgtatcagtcatccagtgcgtaatgcttatggattgtggctagtatctgttatctgtgaggtctggtttgccttgtcctggcttctagatcagttcccaaaatggtatccaatcaaccgtgagacatatctcgacaggcttgcattgaggtatgatagagagggagagccatcacagctggctcccattgatgtctttgtcagtacagtggatccattgaaggaacctccactgatcacagccaacactgttttgtccattcttgctgtggattaccctgttgacaaagtgtcatgctatgtttctgatgatggctcagctatgctgacttttgagtctctctctgaaactgccgaatttgctagaaagtgggttcccttttgtaagaagcacaatattgaaccaagagctccagaattttactttgctcaaaaaatagattacctgaaggacaaaattcaaccttcatttgttaaggaaagacgagcaatgaagagagagtatgaagaattcaaaataagaatcaatgcccttgttgccaaagcacagaaagtgcctgaagaggggtggaccatggctgatggaactgcttggcctgggaataaccctagggaccatcctggcatgattcaggtgttcttggggcacagtggtgggcttgacactgatggaaatgaattaccacgtcttgtctatgtctctcgtgaaaagagaccaggctttcagcatcacaagaaggctggtgcaatgaatgcactgattcgtgtatctgctgtgctgacaaatggtgcctatcttctcaatgtggattgtgaccattacttcaatagcagcaaagctcttagagaagcaatgtgcttcatgatggatccagctctaggaaggaaaacttgttatgtacaatttccacaaagatttgatggcattgacttgcacgatcgatatgctaataggaacatagtcttctttgatatcaacatgaaaggtctagatggcattcagggtccagtctatgtgggaacaggatgctgtttcaataggcaggctttgtatggatatgatcctgttttgactgaagctgatctggaacctaacattgttgttaagagctgctgtggtagaaggaagagaaagaacaagagttatatggatagtcaaagccgtattatgaagagaacagaatcttcagctcccatctttaacatggaagacatcgaggagggtattgaaggttatgaggatgaaaggtcagtgcttatgtcccagaggaaattggagaaacgctttggtcagtctccaatcttcattgcatccacctttatgactcaaggtggcataccaccttcaacaaacccagcttctctactgaaggaagctatccatgttatcagctgtgggtacgaggacaaaactgaatggggaaaagagattggctggatctatggttcagttacagaggatattctgactgggtttaaaatgcatgcaagaggctggcaatcaatctactgcatgccaccacgaccttgtttcaagggttctgcaccaatcaatctttctgatcgtcttaatcaggtgctccgttgggctcttgggtcagtggaaattctgcttagcagacattgtcctatatggtatggctacaatgggcgattgaagcttttggagaggctggcttacattaacaccattgtttatccaatcacatctgttccgcttatcgcctattgtgtgcttcctgctatctgtcttcttaccaataaatttatcattcctgagattagtaattatgctggaatgttcttcattcttctttttgcctccattttcgcaactggtatattggagctcagatggagtggtgttggcattgaagattggtggagaaatgagcagttttgggttattggtggcacctctgcccatctcttcgcggtgttccagggtctgctgaaagtgttggctgggattgataccaacttcacagttacctcaaaggcatctgatgaggatggcgactttgctgagctatatgtgttcaagtggaccagtttgctcatccctccgaccactgttcttgtcattaacctggtcggaatggtggcaggaatttcgtatgccattaacaggggctagatgggaattttttgttgtagatgaggatggatctgcatccaagttatgcctctgtttattagcttcttcggtgccggtgctgctgcagacaatcatggagcctttctaccttgcttgtagtgctggccagcagcgtaaattgtgaattctgcatttttttatacgtggtgtttattgttttagagtaaattatcatttgtttgaggtaactattcacacgaactatatggcaatgctgttatttatacgcaaagactgatacattcttcggattgtgagcaaacagtcagaacactgtaatctcttaggacaactatataaggcagctgttgtatcatctctattgtttctaatggccgagggatatgtagatgtaaatcacttgcaacatcgtattgttggcagtctgtaatgtttgaaaagcatggagggactgatgcggcgtggtctttcatgaattggggaatcagatggcagtccggtagaacttctgctaccgtattttctgatggcattacctttccag

SEQ ID NO: 59122 - DNA, 3710 bp, Zea Mays
atttgggcagccccgtcggatgagattccgcactcgcaacctacattcgcgtcgacgcgtcgtctccacgccgactgaaatgccgccgccactccttcctgtcatgtaccttgtgtcgcctctcccccgccaactaatcatctcctgtagcagcagccggcagcaggtggcggccgccggccatggagctggcggtgggcgcgtcggaggcaaccctcaagtcactgctgagcaagctcggcgccctcctcgcagaggagtatgccctgatccgtggcgtccggggcgacatccaattcatcaccgacgagctagccagcatgcaggccttcctcagcaacctgagcaagtacgaggagggccacgacgaccagacggaggactggatgaagcagatccgggacgtcgcctacgacatcgaagactgcatcgacgacttcgcccacagcctccgtccagaccccaggggcagcggctgggtgacggccgtccgcaagattctctacgagatccggacgtggtacccccgccgcaacatcgccacccagatcgtcgatctgaagaaccgcgcgcagcatatcggcgagcgccgaaccaggtacggcgtccgcgacccgcagcctgggaagaagaagagcaacttggggggcgctacggggtatctcgctgctgagaatcaggacgtgacccggcaactcgtccgcgcccagcagcctgtgggggtgaaggatatgccggatcttaagaagtggatccatgaagatggcaagagggagaaaaccggcgtgctgagcattgtcgggtttggtggtgtgggtaaaaccaccatcgcaatggatctctacacaaaatacgggcctgaattccagcgtcgagcaatggtcactgtgtcccagaactcagatcctgaggcggtcgtcagaaatatactgaaccaggtcaaaccactgtccaacaacgcggagaggcgaggcgaagatagctctggcgccgtctccttggggaagaagaatccagtcattgcaactatattaagccgaattaggctgccgttcccaaatcaaaagcaagataatggtggcggtcgtgacaagcatgaacaaataaaaaaggagttgaagaattgcctcgcagatacaaggtacttactgttaattgatgatgtatggtcatcatcaacatggcaaagtatttggaaatattttcctgaagaaaataagaagggaagcagaataattgtcaccacacggtttcaagctgttgccacgacatgctctgcacataaagatcaagatcatattcatttggttgatgttctttccggtgaagaggccaacagtttattcatcaaaaccttgtccgagtgtagaggtaatagtgccagacaatcaaaccagaccaaggtgccagacagagtttggcagatgtgtggtggcttgccgttggccatagttaccatggcaggtgtggtggcatccaagccactgatgatcagagatgaatggattgccgtttgcaattccttgtttccggagccagaaaaatgtcataaaccagaggaatttatgaggataataaactattgctacaacgacttgcctagtgatctcaagacttgctgtctgtatcttagcatatttcctaagggccgtgaagttagcaggaagcggctgattcggaggtggatagcggaaggtttcgtcagtgagaagcaaggtttgagtgtggaggatgttgctgacacatgcttcaaacagctcattgaaaggaagatgatgaggcccgttgagcacaacagcaatggaagcgtcaaaagttgtcgggtccatgacatggtacttgagtacatcatttccaaggcagcagaggagaatttcatcactgtggtcggtagccactggtccatgtcaacaagtagcaagaaagttcgtaggctcactatccatggcagtgaccccaaacgtgcaaagaatgttgacagtatgaacttgtcacatgtccgatcactgactgtgttcgagaacctggacaaactgcacttcaaatcatttaaaactggaatagtgcaagtgttagatctcgaaggctgcaaaggtttcagggagagcgatgccaacgtttcagacatatgcgaaatgattctacttaagtatctgagcctacggaaaacagacataaaaaatcttcccaataatatttccaagctcaagtacctagagactctcgatgttagggagacagaagttaaacagctgcctacgactgtagggcagttggaacggataactaacatccttggtggtgataagagaagacagagaaccctgaaacttcctaaggagctcaagggaacaatgaaatctttacgcatattgtcgggggttgagattgtggagggatcaacagctgcatcagacttcagttacttcactactctgaggaagctggcaatttacaggatccaccacaatgaagatatattcaaaaatttgctgtcctcgatccagtacctcagtggttattcactccaaactcttttaatcgttgatgagtcatctgaattcttcaagaccctggagtcaatgtcgccatcccatctaactgacctgagagctctggagctgtctggcaaattgctttaccttccaaagtggctcgacactcttcaacatcttgtgaagttaacgctttcagcaacagccctatgcactgataactttttggtcatcagaaaactgaactcgttgttttccctcaccttttcaatcagcgaaaagcaagaccctgctttggcagccattcttgagaaaaataagtcagcttcaagaggagaaatcgttgtgccagctggaggcttcagtaagctcaagctgcttcggatatttgttcctcttcttccatcccttaccttctcaaagaatgctacaccacatctggaaaggattgaactgcgttttaaaaagctggaaggatttcatggtgtggatgaacttggaaagctccaagatgtggtcttaacagttgacgggcatgcaagtgagaggacaaattcgatactagacggattgaagcagaggctagaaggaaagtgcaacctcattgtcaacaagtatcacgactgattgaaatggatgtaaacatatttctttgagtagaaagatcaccagctcattaggtaaataagctttgtggctgtacacaaacctaggtgtttgacatctggattcctttcgtgttatcttcatttattgttggctttatgtcggttcggttttgtaacatgtcagacaagagtgaattttttttagaccaaaggccaaactttagcaccatcttttgttgagtacatgttctatatgctcccgggcatctgttgtggattttttatatatataaatgccaccgttttgaatattgacggctagcagctatcgccactctcattttgcagatttgcagtaaagggtcggagacacggagacggctgcatccctagactcccataggccgacccaccgcaaatcccacagcctcttatgcttcatggttctcggccatttcagtatttgcacccgaatctcggtgccttaacctatggcgccgagtgctgacgtggcggtggcgtcgaaggatggcgtgttttctcacgtggctccctagctcggcgccatagatcttggcaccgagctaggatatagcgtccgagtgca

SEQ ID NO: 59123 - DNA, 3491 bp, Zea Mays
cgtcggatgagattccgcactcgcaacctacattcgcgtcgacgcgtcgtctccacgccgactgaaatgccgccgccactccttcctgtcatgtaccttgtgtcgcctctcccccgccaactaatcatctcctgtagcagcagccggcagcaggtggcggccgccggccatggagctggcggtgggcgcgtcggaggcaaccctcaagtcactgctgagcaagctcggcgccctcctcgcagaggagtatgccctgatccgtggcgtccggggcgacatccaattcatcaccgacgagctagccagcatgcaggccttcctcagcaacctgagcaagtacgaggagggccacgacgaccagacggaggactggatgaagcagatccgggacgtcgcctacgacatcgaagactgcatcgacgacttcgcccacagcctccgtccagaccccaggggcagcggctgggtgacggccgtccgcaagattctctacgagatccggacgtggtacccccgccgcaacatcgccacccagatcgtcgatctgaagaaccgcgcgcagcatatcggcgagcgccgaaccaggtacggcgtccgcgacccgcagcctgggaagaagaagagcaacttggggggcgctacggggtatctcgctgctgagaatcaggacgtgacccggcaactcgtccgcgcccagcagcctgtgggggtgaaggatatgccggatcttaagaagtggatccatgaagatggcaagagggagaaaaccggcgtgctgagcattgtcgggtttggtggtgtgggtaaaaccaccatcgcaatggatctctacacaaaatacgggcctgaattccagcgtcgagcaatggtcactgtgtcccagaactcagatcctgaggcggtcgtcagaaatatactgaaccaggtcaaaccactgtccaacaacgcggagaggcgaggcgaagatagctctggcgccgtctccttggggaagaagaatccagtcattgcaactatattaagccgaattaggctgccgttcccaaatcaaaagcaagataatggtggcggtcgtgacaagcatgaacaaataaaaaaggagttgaagaattgcctcgcagatacaaggtacttactgttaattgatgatgtatggtcatcatcaacatggcaaagtatttggaaatattttcctgaagaaaataagaagggaagcagaataattgtcaccacacggtttcaagctgttgccacgacatgctctgcacataaagatcaagatcatattcatttggttgatgttctttccggtgaagaggccaacagtttattcatcaaaaccttgtccgagtgtagaggtaatagtgccagacaatcaaaccagaccaaggtgccagacagagtttggcagatgtgtggtggcttgccgttggccatagttaccatggcaggtgtggtggcatccaagccactgatgatcagagatgaatggattgccgtttgcaattccttgtttccggagccagaaaaatgtcataaaccagaggaatttatgaggataataaactattgctacaacgacttgcctagtgatctcaagacttgctgtctgtatcttagcatatttcctaagggccgtgaagttagcaggaagcggctgattcggaggtggatagcggaaggtttcgtcagtgagaagcaaggtttgagtgtggaggatgttgctgacacatgcttcaaacagctcattgaaaggaagatgatgaggcccgttgagcacaacagcaatggaagcgtcaaaagttgtcgggtccatgacatggtacttgagtacatcatttccaaggcagcagaggagaatttcatcactgtggtcggtagccactggtccatgtcaacaagtagcaagaaagttcgtaggctcactatccatggcagtgaccccaaacgtgcaaagaatgttgacagtatgaacttgtcacatgtccgatcactgactgtgttcgagaacctggacaaactgcacttcaaatcatttaaaactggaatagtgcaagtgttagatctcgaaggctgcaaaggtttcagggagagcgatgccaacgtttcagacatatgcgaaatgattctacttaagtatctgagcctacggaaaacagacataaaaaatcttcccaataatatttccaagctcaagtacctagagactctcgatgttagggagacagaagttaaacagctgcctacgactgtagggcagttggaacggataactaacatccttggtggtgataagagaagacagagaaccctgaaacttcctaaggagctcaagggaacaatgaaatctttacgcatattgtcgggggttgagattgtggagggatcaacagctgcatcagacttcagttacttcactactctgaggaagctggcaatttacaggatccaccacaatgaagatatattcaaaaatttgctgtcctcgatccagtacctcagtggttattcactccaaactcttttaatcgttgatgagtcatctgaattcttcaagaccctggagtcaatgtcgccatcccatctaactgacctgagagctctggagctgtctggcaaattgctttaccttccaaagtggctcgacactcttcaacatcttgtgaagttaacgctttcagcaacagccctatgcactgataactttttggtcatcagaaaactgaactcgttgttttccctcaccttttcaatcagcgaaaagcaagaccctgctttggcagccattcttgagaaaaataagtcagcttcaagaggagaaatcgttgtgccagctggaggcttcagtaagctcaagctgcttcggatatttgttcctcttcttccatcccttaccttctcaaagaatgctacaccacatctggaaaggattgaactgcgttttaaaaagctggaaggatttcatggtgtggatgaacttggaaagctccaagatgtggtcttaacagttgacgggcatgcaagtgagaggacaaattcgatactagacggattgaagcagaggctagaaggaaagtgcaacctcattgtcaacaagtatcacgactgattgaaatggatgtaaacatatttctttgagtagaaagatcaccagctcattagatttgcagtaaagggtcggagacacggagacggctgcatccctagactcccataggccgacccaccgcaaatcccacagcctcttatgcttcatggttctcggccatttcaggttcggttatttcgaatccacatccatgtggattgagggatcgagacggattttgacttgttatggatttaaaccgactcaatcccacttaatccacatcaattaagagcgaaccgaacaagctgtcatggttctcggccatagctgtagcgagcatgtataacggaacaactttcttatatgatgtaagtgcattcttagtaataattaagtaaac

SEQ ID NO: 59124 - DNA, 3555 bp, Zea Mays
tgagattccgcactcgcaacctacattcgcgtcgacgcgtcgtctccacgccgactgaaatgccgccgccactccttcctgtcatgtaccttgtgtcgcctctcccccgccaactaatcatctcctgtagcagcagccggcagcaggtggcggccgccggccatggagctggcggtgggcgcgtcggaggcaaccctcaagtcactgctgagcaagctcggcgccctcctcgcagaggagtatgccctgatccgtggcgtccggggcgacatccaattcatcaccgacgagctagccagcatgcaggccttcctcagcaacctgagcaagtacgaggagggccacgacgaccagacggaggactggatgaagcagatccgggacgtcgcctacgacatcgaagactgcatcgacgacttcgcccacagcctccgtccagaccccaggggcagcggctgggtgacggccgtccgcaagattctctacgagatccggacgtggtacccccgccgcaacatcgccacccagatcgtcgatctgaagaaccgcgcgcagcatatcggcgagcgccgaaccaggtacggcgtccgcgacccgcagcctgggaagaagaagagcaacttggggggcgctacggggtatctcgctgctgagaatcaggacgtgacccggcaactcgtccgcgcccagcagcctgtgggggtgaaggatatgccggatcttaagaagtggatccatgaagatggcaagagggagaaaaccggcgtgctgagcattgtcgggtttggtggtgtgggtaaaaccaccatcgcaatggatctctacacaaaatacgggcctgaattccagcgtcgagcaatggtcactgtgtcccagaactcagatcctgaggcggtcgtcagaaatatactgaaccaggtcaaaccactgtccaacaacgcggagaggcgaggcgaagatagctctggcgccgtctccttggggaagaagaatccagtcattgcaactatattaagccgaattaggctgccgttcccaaatcaaaagcaagataatggtggcggtcgtgacaagcatgaacaaataaaaaaggagttgaagaattgcctcgcagatacaagaagggcgggcctggtgcagcggtagagcctaccgtctgtaaccggaaggttccgggttcgagcctcagcctctgcatattatgcgggtaagacttgacgcttaaagatacccttccccacagaccccgtatagtgcgggaagcctacgacactgggtacttactgttaattgatgatgtatggtcatcatcaacatggcaaagtatttggaaatattttcctgaagaaaataagaagggaagcagaataattgtcaccacacggtttcaagctgttgccacgacatgctctgcacataaagatcaagatcatattcatttggttgatgttctttccggtgaagaggccaacagtttattcatcaaaaccttgtccgagtgtagaggtaatagtgccagacaatcaaaccagaccaaggtgccagacagagtttggcagatgtgtggtggcttgccgttggccatagttaccatggcaggtgtggtggcatccaagccactgatgatcagagatgaatggattgccgtttgcaattccttgtttccggagccagaaaaatgtcataaaccagaggaatttatgaggataataaactattgctacaacgacttgcctagtgatctcaagacttgctgtctgtatcttagcatatttcctaagggccgtgaagttagcaggaagcggctgattcggaggtggatagcggaaggtttcgtcagtgagaagcaaggtttgagtgtggaggatgttgctgacacatgcttcaaacagctcattgaaaggaagatgatgaggcccgttgagcacaacagcaatggaagcgtcaaaagttgtcgggtccatgacatggtacttgagtacatcatttccaaggcagcagaggagaatttcatcactgtggtcggtagccactggtccatgtcaacaagtagcaagaaagttcgtaggctcactatccatggcagtgaccccaaacgtgcaaagaatgttgacagtatgaacttgtcacatgtccgatcactgactgtgttcgagaacctggacaaactgcacttcaaatcatttaaaactggaatagtgcaagtgttagatctcgaaggctgcaaaggtttcagggagagcgatgccaacgtttcagacatatgcgaaatgattctacttaagtatctgagcctacggaaaacagacataaaaaatcttcccaataatatttccaagctcaagtacctagagactctcgatgttagggagacagaagttaaacagctgcctacgactgtagggcagttggaacggataactaacatccttggtggtgataagagaagacagagaaccctgaaacttcctaaggagctcaagggaacaatgaaatctttacgcatattgtcgggggttgagattgtggagggatcaacagctgcatcagacttcagttacttcactactctgaggaagctggcaatttacaggatccaccacaatgaagatatattcaaaaatttgctgtcctcgatccagtacctcagtggttattcactccaaactcttttaatcgttgatgagtcatctgaattcttcaagaccctggagtcaatgtcgccatcccatctaactgacctgagagctctggagctgtctggcaaattgctttaccttccaaagtggctcgacactcttcaacatcttgtgaagttaacgctttcagcaacagccctatgcactgataactttttggtcatcagaaaactgaactcgttgttttccctcaccttttcaatcagcgaaaagcaagaccctgctttggcagccattcttgagaaaaataagtcagcttcaagaggagaaatcgttgtgccagctggaggcttcagtaagctcaagctgcttcggatatttgttcctcttcttccatcccttaccttctcaaagaatgctacaccacatctggaaaggattgaactgcgttttaaaaagctggaaggatttcatggtgtggatgaacttggaaagctccaagatgtggtcttaacagttgacgggcatgcaagtgagaggacaaattcgatactagacggattgaagcagaggctagaaggaaagtgcaacctcattgtcaacaagtatcacgactgattgaaatggatgtaaacatatttctttgagtagaaagatcaccagctcattaggtaaataagctttgtggctgtacacaaacctaggtgtttgacatctggattcctttcgtgttatcttcatttattgttggctttatgtcggttcggttttgtaacatgtcagacaagagtgaattttttttagaccaaaggccaaactttagcaccatcttttgttgagtacatgttctatatgctcccgggcatctgttgtggattttttatatatataaatgccaccgttttgaatattgacg

SEQ ID NO: 59125 - DNA, 3486 bp, Zea Mays
tgagattccgcactcgcaacctacattcgcgtcgacgcgtcgtctccacgccgactgaaatgccgccgccactccttcctgtcatgtaccttgtgtcgcctctcccccgccaactaatcatctcctgtagcagcagccggcagcaggtggcggccgccggccatggagctggcggtgggcgcgtcggaggcaaccctcaagtcactgctgagcaagctcggcgccctcctcgcagaggagtatgccctgatccgtggcgtccggggcgacatccaattcatcaccgacgagctagccagcatgcaggccttcctcagcaacctgagcaagtacgaggagggccacgacgaccagacggaggactggatgaagcagatccgggacgtcgcctacgacatcgaagactgcatcgacgacttcgcccacagcctccgtccagaccccaggggcagcggctgggtgacggccgtccgcaagattctctacgagatccggacgtggtacccccgccgcaacatcgccacccagatcgtcgatctgaagaaccgcgcgcagcatatcggcgagcgccgaaccaggtacggcgtccgcgacccgcagcctgggaagaagaagagcaacttggggggcgctacggggtatctcgctgctgagaatcaggacgtgacccggcaactcgtccgcgcccagcagcctgtgggggtgaaggatatgccggatcttaagaagtggatccatgaagatggcaagagggagaaaaccggcgtgctgagcattgtcgggtttggtggtgtgggtaaaaccaccatcgcaatggatctctacacaaaatacgggcctgaattccagcgtcgagcaatggtcactgtgtcccagaactcagatcctgaggcggtcgtcagaaatatactgaaccaggtcaaaccactgtccaacaacgcggagaggcgaggcgaagatagctctggcgccgtctccttggggaagaagaatccagtcattgcaactatattaagccgaattaggctgccgttcccaaatcaaaagcaagataatggtggcggtcgtgacaagcatgaacaaataaaaaaggagttgaagaattgcctcgcagatacaagaagggcgggcctggtgcagcggtagagcctaccgtctgtaaccggaaggttccgggttcgagcctcagcctctgcatattatgcgggtacttactgttaattgatgatgtatggtcatcatcaacatggcaaagtatttggaaatattttcctgaagaaaataagaagggaagcagaataattgtcaccacacggtttcaagctgttgccacgacatgctctgcacataaagatcaagatcatattcatttggttgatgttctttccggtgaagaggccaacagtttattcatcaaaaccttgtccgagtgtagaggtaatagtgccagacaatcaaaccagaccaaggtgccagacagagtttggcagatgtgtggtggcttgccgttggccatagttaccatggcaggtgtggtggcatccaagccactgatgatcagagatgaatggattgccgtttgcaattccttgtttccggagccagaaaaatgtcataaaccagaggaatttatgaggataataaactattgctacaacgacttgcctagtgatctcaagacttgctgtctgtatcttagcatatttcctaagggccgtgaagttagcaggaagcggctgattcggaggtggatagcggaaggtttcgtcagtgagaagcaaggtttgagtgtggaggatgttgctgacacatgcttcaaacagctcattgaaaggaagatgatgaggcccgttgagcacaacagcaatggaagcgtcaaaagttgtcgggtccatgacatggtacttgagtacatcatttccaaggcagcagaggagaatttcatcactgtggtcggtagccactggtccatgtcaacaagtagcaagaaagttcgtaggctcactatccatggcagtgaccccaaacgtgcaaagaatgttgacagtatgaacttgtcacatgtccgatcactgactgtgttcgagaacctggacaaactgcacttcaaatcatttaaaactggaatagtgcaagtgttagatctcgaaggctgcaaaggtttcagggagagcgatgccaacgtttcagacatatgcgaaatgattctacttaagtatctgagcctacggaaaacagacataaaaaatcttcccaataatatttccaagctcaagtacctagagactctcgatgttagggagacagaagttaaacagctgcctacgactgtagggcagttggaacggataactaacatccttggtggtgataagagaagacagagaaccctgaaacttcctaaggagctcaagggaacaatgaaatctttacgcatattgtcgggggttgagattgtggagggatcaacagctgcatcagacttcagttacttcactactctgaggaagctggcaatttacaggatccaccacaatgaagatatattcaaaaatttgctgtcctcgatccagtacctcagtggttattcactccaaactcttttaatcgttgatgagtcatctgaattcttcaagaccctggagtcaatgtcgccatcccatctaactgacctgagagctctggagctgtctggcaaattgctttaccttccaaagtggctcgacactcttcaacatcttgtgaagttaacgctttcagcaacagccctatgcactgataactttttggtcatcagaaaactgaactcgttgttttccctcaccttttcaatcagcgaaaagcaagaccctgctttggcagccattcttgagaaaaataagtcagcttcaagaggagaaatcgttgtgccagctggaggcttcagtaagctcaagctgcttcggatatttgttcctcttcttccatcccttaccttctcaaagaatgctacaccacatctggaaaggattgaactgcgttttaaaaagctggaaggatttcatggtgtggatgaacttggaaagctccaagatgtggtcttaacagttgacgggcatgcaagtgagaggacaaattcgatactagacggattgaagcagaggctagaaggaaagtgcaacctcattgtcaacaagtatcacgactgattgaaatggatgtaaacatatttctttgagtagaaagatcaccagctcattaggtaaataagctttgtggctgtacacaaacctaggtgtttgacatctggattcctttcgtgttatcttcatttattgttggctttatgtcggttcggttttgtaacatgtcagacaagagtgaattttttttagaccaaaggccaaactttagcaccatcttttgttgagtacatgttctatatgctcccgggcatctgttgtggattttttatatatataaatgccaccgttttgaatattgacg

SEQ ID NO: 59126 - DNA, 1318 bp, Zea Mays
cgccactccttcctgtcatgtaccttgtgtcgcctctcccccgccaactaatcatctcctgtagcagcagccggcagcaggtggcggccgccggccatggagctggcggtgggcgcgtcggaggcaaccctcaagtcactgctgagcaagctcggcgccctcctcgcagaggagtatgccctgatccgtggcgtccggggcgacatccaattcatcaccgacgagctagccagcatgcaggccttcctcagcaacctgagcaagtacgaggagggccacgacgaccagacggaggactggatgaagcagatccgggacgtcgcctacgacatcgaagactgcatcgacgacttcgcccacagcctccgtccagaccccaggggcagcggctgggtgacggccgtccgcaagattctctacgagatccggacgtggtacccccgccgcaacatcgccacccagatcgtcgatctgaagaaccgcgcgcagcatatcggcgagcgccgaaccaggtacggcgtccgcgacccgcagcctgggaagaagaagagcaacttggggggcgctacggggtatctcgctgctgagaatcaggacgtgacccggcaactcgtccgcgcccagcagcctgtgggggtgaaggatatgccggatcttaagaagtggatccatgaagatggcaagagggagaaaaccggcgtgctgagcattgtcgggtttggtggtgtgggtaaaaccaccatcgcaatggatctctacacaaaatacgggcctgaattccagcgtcgagcaatggtcactgtgtcccagaactcagatcctgaggcggtcgtcagaaatatactgaaccaggtcaaaccactgtccaacaacgcggagaggcgaggcgaagatagctctggcgccgtctccttggggaagaagaatccagtcattgcaactatattaagccgaattaggctgccgttcccaaatcaaaagcaagataatggtggcggtcgtgacaagcatgaacaaataaaaaaggagttgaagaattgcctcgcagatacaagccggacgttcaccgtcctgttcctgcagttggaccttctacagctggacagagctcctcgcgatcgacgcgggatacgtttgcagacgtggacgacgacaacgacgctgctggtcaagacctgattggaccgtcacagctgcaggacgctcccacaactcagccgttacagctcacaccatgtagacgacgtccacgtgacccatacgctccaggcaccgactctcttgggggccaagagcaagggtaagactagtaggaggt

SEQ ID NO: 59127 - DNA, 296 bp, Zea Mays
gcctgaggatagctatcgagacctgagcgcccagatccgtcccgccgccgggagccggtggacctgagcgcccgatctgctccgccgacgagaggaggctacacgccggtggcggcggcgggcgagtcgcggccggagcgccagctggcgcggtcgcggcggtgatcatgtgctcgcccggcattggggagggcgtctcggcgcgtcaggcgcctcacgctggctcccggctggtcaccggggctgaaggtgggggctcacgtcgacgaggtactttacagaggaacctactggtg

SEQ ID NO: 59128 - DNA, 1917 bp, Zea Mays
cttgactgatgggtaccatcccaagtcaactaggaaggcctctttcttctgctttgcaacataggcagcagggtcttcttggggagaggtctaagatttctatgagtacactaaacaagaacattgtatccagtcagccgccccttgtttcatcatctgctgatttgactattccaaagacaactgctacaccgttgttactagcttcacctcatcagtctactagtgtgtcaacgagtttgcatactggatttctgcgttctcgaagtacctcaggattgcctaggcaaccttcatatactactggatttgggattgctttaaatatagagacacttgttgccgtcacggaacaaagagatacaccaattgagacacctccacctgaagttcaggacaagattctttttatgatcaacaatatatccatctccaatatggaagttaaggcaaaggaatttaacgaggtcatacaggaacagtattatccttggtttgcacaatacatggtcatgaaaagggcaagcattgaaccaaatttccatgatctgtatctgaagttctttgataaagtaaactcaaaatccttgaacaaggaaatactgaaagccacatatgagaattgcaaggtcttgttaagatcagaccttatcaaatctagttccgaggagcgctccttgctaaaaaaacctaggcagttggttgggaaagttcaccattggtgtacaattcacttcaatgttaataatcagatgacaaacactgtgacaaacatgaaccggtatattctttcattatcagatgacaaacaattggtccccgggcttatttctctaatagaacagggaactgatgttctgcgtgtgaaggcccttttgtttgttgctctgctttgcaagaatagtcgaaggtggcttcctcatttcttttgcaatgcaaaattaatatcagctgttgatagactgggaaaggagaaggagggttttattcatcattgtacagaagcatttgtgcagttggttgcttccttggtccctggtattcttgacactgtctccagcgatatacagcaggttatggttggcaaacgtcatggacctgttactgctttagctgggcgagctcatccaaagagcacaattcatctgttccctgttattcttcatcttctaggaagtgcatccttcaagcatagagttgtgacaggccatgtattgcttcagttggcaaatcttattaagattttggaggcaccatttcaggtgctatttaagaaccttactgttgacataaaggatgtgaaaccaacttccctgctcaaagatcgtctgcgtgaagtcgagggaaatccagatttttcaaataaagatgttactgcatctcaaacccctgtggttgcagaagtcccttcagggaccatcccttcactaactcatatggaacaacaacctgagatcaatatcacatcccgagctatgagccttccaaatatacttaatcagtatgctgctcctgtccgtctacctacaaacaacacggtagaagatgacaaagttgctctgatgatgcctgagcaagtgccctcgttgacccaggtttcgccagcacaaacacaatcaacatcaccatctccattttcggttaaccagcttatggcggctattccacgtgaagagatacgtttcaaaataaatccaaagctcggctcccttggtccacaactgcaatatagcaaaattatggatttggctttggataaggaaaacatagaatagaattcaaatttggtggtcgcaaaagtgtggagactttaattcataatataaagttaggcttaacattagtgcaaacagttgtattttagtttagatttagagtacacttatgtatgcgttgtttgacaatgcttatgatata

SEQ ID NO: 59129 - DNA, 1695 bp, Zea Mays
gagaggtctaagatttctatgagtacactaaacaagaacattgtatccagtcagccgccccttgtttcatcatctgctgatttgactattccaaagacaactgctacaccgttgttactagcttcacctcatcagtctactagtgtgtcaacgagtttgcatactggatttctgcgttctcgaagtacctcaggattgcctaggcaaccttcatatactactggatttgggattgctttaaatatagagacacttgttgccgtcacggaacaaagagatacaccaattgagacacctccacctgaagttcaggacaagattctttttatgatcaacaatatatccatctccaatatggaagttaaggcaaaggaatttaacgaggtcatacaggaacagtattatccttggtttgcacaatacatggtcatgaaaagggcaagcattgaaccaaatttccatgatctgtatctgaagttctttgataaagtaaactcaaaatccttgaacaaggaaatactgaaagccacatatgagaattgcaaggtcttgttaagatcagaccttatcaaatctagttccgaggagcgctccttgctaaaaaaacctaggcagttggttgggaaagttcaccattggtgtacaattcacttcaatgttaataatcagatgacaaacactgtgacaaacatgaaccggtatattctttcattatcagatgacaaacaattggtccccgggcttatttctctaatagaacagggaactgatgttctgcgtgtgaaggcccttttgtttgttgctctgctttgcaagaatagtcgaaggtggcttcctcatttcttttgcaatgcaaaattaatatcagctgttgatagactgggaaaggagaaggagggttttattcatcattgtacagaagcatttgtgcagttggttgcttccttggtccctggtattcttgacactgtctccagcgatatacagcaggttatggttggcaaacgtcatggacctgttactgctttagctgggcgagctcatccaaagagcacaattcatctgttccctgttattcttcatcttctaggaagtgcatccttcaagcatagagttgtgacaggccatgtattgcttcagttggcaaatcttattaagattttggaggcaccatttcagaagtcccttcagggaccatcccttcactaactcatatggaacaacaacctgagatcaatatcacatcccgagctatgagccttccaaatatacttaatcagtatgctgctcctgtccgtctacctacaaacaacacggtagaagatgacaaagttgctctgatgatgcctgagcaagtgccctcgttgacccaggtttcgccagcacaaacacaatcaacatcaccatctccattttcggttaaccagcttatggcggctattccacgtgaagagatacgtttcaaaataaatccaaagctcggctcccttggtccacaactgcaatatagcaaaattatggatttggctttggataaggaaaacatagaatagaattcaaatttggtggtcgcaaaagtgtggagactttaattcataatataaagttaggcttaacattagtgcaaacagttgtattttagtttagatttagagtacacttatgtatgcgttgtttgacaatgcttatgatata

SEQ ID NO: 59130 - DNA, 939 bp, Zea Mays
aaataacttaacaggatctgtccgagtgccccaaggaccccggataaacgacttaccgccaagatcgcaagattaagtaaacacaaatcacacaccaacatttgcagcggaaattttttattacaaaatggttacaagttacaacatttacaagttataacaagattacaatatatatcatcgaagttgattacaaaagaaattgattcaaaaatattacaatttgaatgtataaagcatttataagttttaaaatatatgctagcttaagtgacaatcctcaataaagaagctaaagacgggatatacttatagaagaaggccgagcccaccggcacttagcaccatccacaatagaacaaaattataacctgaaaaacaacagggaataaaaccctgagtacgcaattactcagcaagacttacccgactaaagaaaagactctcaagggtatgctggtttgttgggaatcaaggtaaagctcatcaaatttcaaagacacattttcgcagaaaagcttactagtagtggatccttatgccaaacttttacttcacaaattaagtatttttccttaatctagatttgcctaatctagagcattcacttgtcctacactagctttattttagcagctttagtttcacttgttatctacgatgagggtcgaagatccagtcttcatatccgagaagttcggcgatccgaatcgattaatacccagctggggatctccaaccacacgacatatgtagcacttaaccattgcatatgtcaactcgccaccgggtttctcaagaccagaacgggttcacgcgacccgagagcacagcactccaccgcccagccgttggcctggttggtacacgttactctcgccatggtgcccgccatgtttccgagagtacagcaccccaccttccagtctcttgccacgg

SEQ ID NO: 59131 - DNA, 1122 bp, Zea Mays
ggctttgcttttcccgtatgtttcaagtctagtttcccattatggcttttgcccccgtaaaccattaagggtggttttggtgattcataatagccattttggtaaattttttaaagcccgaccctaattctacttttatggtgtattatgatcaaatcccatgtatattacgcgctccggtgttttatatcaaaaaaaaggtttttacgctgatttatatgggtgcctatgctgcaacacatacaattctaactaaatatgcataaagcagcgcgccagcacctcatattttattctcatcttttctacttcgttaattcattgacccatgtctctgtcctggtatattctggagacagatccccacgtccagagttacaagatcaagcttggttgtggctgctgctgtgttgcctcctcttgttggaccgaagagagggaggggagaagcagctggcgtgcagacttctactcaggtggccttttattctctatggggcttctaggatacatcttctccagaagcaccataagtcttgtcttgggcattacaccagggctagccactctgctacttggcactctcagtctgaagttctggaggagcgacagatccagcttcctgcttatcttgtctcagaggtgatgctgatgtgcaagcatcttcaccttgagttctgccttgccagaatgaatcaagtttattttctcatcctgctccatttgagggatttgtttggcttccaaatggtttgttggtcctaaaatagtcagaatcacatgacatctgtgctatagatatggacctcggtggttttctccacattaggaaagctggaagagcctttttgaactcagtttttttgctaacagtggtgttatggtgaaacagagttttgtgtgtatgtaccaacagctaaaatgtaaacacgacattatcatagttgagtacaggaataattatctcttatatcttattgcaaaatctgaaacagttctcctgtagatggttagcttgcattttacgctacaattacctcagatcacttgtatcttacaccaatttacgaaatttgttgatgcgttttatgacaacctcatgcgttgagagatacattcgtt

SEQ ID NO: 59132 - DNA, 1051 bp, Zea Mays
ggctttgcttttcccgtatgtttcaagtctagtttcccattatggcttttgcccccgtaaaccattaagggtggttttggtgattcataatagccattttggtaaattttttaaagcccgaccctaattctacttttatggtgtattatgatcaaatcccatgtatattacgcgctccggtgttttatatcaaaaaaaaggtttttacgctgatttatatgggtgcctatgctgcaacacatacaattctaactaaatatgcataaagcagcgcgccagcacctcatattttattctcatcttttctacttcgttaattcattgacccatgtctctgtcctggtatattctggagacagatccccacgtccagagttacaagatcaagcttggttgtggctgctgctgtgttgcctcctcttgttggaccgaagagagggaggggagaagcagctggcgtgcagacttctactcaggtggccttttattctctatggggcttctaggatacatcttctccagaagcaccataagtcttgtcttgggcattacaccagggctagccactctgctacttggcactctcagtctgaagttctggaggagcgacagatccagcttcctgcttatcttgtctcaggcaggcaaattgaacagggatttgtttggcttccaaatggtttgttggtcctaaaatagtcagaatcacatgacatctgtgctatagatatggacctcggtggttttctccacattaggaaagctggaagagcctttttgaactcagtttttttgctaacagtggtgttatggtgaaacagagttttgtgtgtatgtaccaacagctaaaatgtaaacacgacattatcatagttgagtacaggaataattatctcttatatcttattgcaaaatctgaaacagttctcctgtagatggttagcttgcattttacgctacaattacctcagatcacttgtatcttacaccaatttacgaaatttgttgatgcgttttatgacaacctcatgcgttgagagatacattcgtt

SEQ ID NO: 59133 - DNA, 1799 bp, Zea Mays
gttttgaggtggcctcgtggtgaagaaaggcgagagctggagagcaacgagacaagcacggcggtgtgcgtgcgcacaggcactagagtgagacagctctagaagagagcaagccgccgccgccgccgcatcatcgtcagaagcggccactcctacctctgatcctgatacaaaatccaggccagagggcaggagcctccaaaagagatccactcccccggatggcttcttgcctctgcttccgcagacgccgccgcccaatcattgcctcctctgtccccttcttcctcctcctcgtctccttcctcgcctcggcctcggcctcttccacgacgacgacgaagctgctaggcagcggcaataatgccacgcggcgggtgacgttcagctcggaggagctccgcgggttgcggagcatcacggcccggcttgcgcggctcagggacgcgtccgtcaagacgatccagagccccgacggcgacgtcatcgactgcgtgccggcgcacctgcagccggcgttcgagcaccccaagctgaggagccagaagccagaggtaggaggagcccgaagagaggccgaggagcagcgctggccgcttctccgacgctgacctggacgaggacgacgacccgttgccgcaggtgtggcggcgctccggcgagcactgcccggaggggacggtaccggtgcggcgaaccacggaggacgacgtgctcagggccaccgcctcttccgccacccggttcgggatgaaggcccgcggtgcggggctcgggttcgcgcggcgcgactccaccggcggcggccacgagcacgcggtggggtacgtgaccggcgggcagttctacggcgccaaggcgagcctgaacgtgtggccggcgcaggtggcgtcgccggcggagttcagcctctcgcagatctgggtcatctccggcgccttcggcaacgacctcaacaccatcgaggccggctggcaggtcagccctcagctgtacggcgacaacagccccaggacgacgcgtaccaggagacgggctgctacaacctccactgctcgggcttcgtgcagaccagcagccgcgtggccatcggcgccgccatctcgcccgtctcctcctacgccggccgccagttcgacgtcacgcttctcatctggaaggacccgcgccggggccactggtggctgcagctcggctccggcgcgctcgtcggctactggccctccgcgctcttcacgcacctcggctcgcgcgccgacatggtgcagttcgggggcgaggtcgtcaacgcgcgccccgccggcgcgccgcacacgcccacgcagatgggctccggccgcttccccgccgagggatacgcgcgcgccgcatacttccgaaacgtgcagctcgtcgactgggacaacaacctcgtaccggccgccgggctccgcctgctcgccgaccggccggggtgctatgacatcgccggcggcagcggcggcgcgtggggcacctacttctattacggtgggcccggcaggaatgcacggtgcccgtaactttactagtatattagctaggaacggaatcgaatgcatgggatgggtgttgtacttgtacgtgtgtttcgtacgtgcgcactcaagcacacattagcagaggctgattgctatatattactccaaatgagtctgctttcactttttttaatctctccatgtgaatatgatgccgttgtgatcatctaacaatttgctcatttaatttagcattcttttttcctgtttctttactgcaattatattggacggttgggg

SEQ ID NO: 59134 - DNA, 2164 bp, Zea Mays
gttttgaggtggcctcgtggtgaagaaaggcgagagctggagagcaacgagacaagcacggcggtgtgcgtgcgcacaggcactagagtgagacagctctagaagagagcaagccgccgccgccgccgcatcatcgtcagaagcggccactcctacctctgatcctgatacaaaatccaggccagagggcaggagcctccaaaagagatccactcccccggatggcttcttgcctctgcttccgcagacgccgccgcccaatcattgcctcctctgtccccttcttcctcctcctcgtctccttcctcgcctcggcctcggcctcttccacgacgacgacgaagctgctaggcagcggcaataatgccacgcggcgggtgacgttcagctcggaggagctccgcgggttgcggagcatcacggcccggcttgcgcggctcagggacgcgtccgtcaagacgatccagagccccgacggcgacgtcatcgactgcgtgccggcgcacctgcagccggcgttcgagcaccccaagctgaggagccagaagccagaggaggagcccgaagagaggccgaggagcagcgctggccgcttctccgacgctgacctggacgaggacgacgacccgttgccgcaggtgtggcggcgctccggcgagcactgcccggaggggacggtaccggtgcggcgaaccacggaggacgacgtgctcagggccaccgcctcttccgccacccggttcgggatgaaggcccgcggtgcggggctcgggttcgcgcggcgcgactccaccggcggcggccacgaggtcagtgccaatcggcgatcactcagtcaccgccgcggtgacgacggtcgccggtcaacagtcaacactccaataatttacctttggctgtgcaagcgcagtgcaagaaatttgctcatcaatggcacaccgcacacgatgaaaagtggaaatgacaccaataattgcgtgattattgttgtgtgcttgcgacttgcgagtccgatccatccggcacaggtgacagtcacggtacagggggctgcactcgcaatggccagcacatgcacatgttgtcgactcgactgcatcgttaaacaatgggagaacgtcagtacgtcactgagcagctagacggcctctgtttgcagcacgcggtggggtacgtgaccggcgggcagttctacggcgccaaggcgagcctgaacgtgtggccggcgcaggtggcgtcgccggcggagttcagcctctcgcagatctgggtcatctccggcgccttcggcaacgacctcaacaccatcgaggccggctggcaggtcagccctcagctgtacggcgacaacagccccaggttcttcacctactggacagacgacgcgtaccaggagacgggctgctacaacctccactgctcgggcttcgtgcagaccagcagccgcgtggccatcggcgccgccatctcgcccgtctcctcctacgccggccgccagttcgacgtcacgcttctcatctggaaggacccgcgccggggccactggtggctgcagctcggctccggcgcgctcgtcggctactggccctccgcgctcttcacgcacctcggctcgcgcgccgacatggtgcagttcgggggcgaggtcgtcaacgcgcgccccgccggcgcgccgcacacgcccacgcagatgggctccggccgcttccccgccgagggatacgcgcgcgccgcatacttccgaaacgtgcagctcgtcgactgggacaacaacctcgtaccggccgccgggctccgcctgctcgccgaccggccggggtgctatgacatcgccggcggcagcggcggcgcgtggggcacctacttctattacggtgggcccggcaggaatgcacggtgcccgtaactttactagtatattagctaggaacggaatcgaatgcatgggatgggtgttgtacttgtacgtgtgtttcgtacgtgcgcactcaagcacacattagcagaggctgattgctatatattactccaaatgagtctgctttcactttttttaatctctccatgtgaatatgatgccgttgtgatcatctaacaatttgctcatttaatttagcattcttttttcctgtttctttactgcaattatattggacggttgggg

SEQ ID NO: 59135 - DNA, 2132 bp, Zea Mays
ctggagagcaacgagacaagcacggcggtgtgcgtgcgcacaggcactagagtgagacagctctagaagagagcaagccgccgccgccgccgcatcatcgtcagaagcggccactcctacctctgatcctgatacaaaatccaggccagagggcaggagcctccaaaagagatccactcccccggatggcttcttgcctctgcttccgcagacgccgccgcccaatcattgcctcctctgtccccttcttcctcctcctcgtctccttcctcgcctcggcctcggcctcttccacgacgacgacgaagctgctaggcagcggcaataatgccacgcggcgggtgacgttcagctcggaggagctccgcgggttgcggagcatcacggcccggcttgcgcggctcagggacgcgtccgtcaagacgatccagagccccgacggcgacgtcatcgactgcgtgccggcgcacctgcagccggcgttcgagcaccccaagctgaggagccagaagccagaggtaggaggagcccgaagagaggccgaggagcagcgctggccgcttctccgacgctgacctggacgaggacgacgacccgttgccgcaggtgtggcggcgctccggcgagcactgcccggaggggacggtaccggtgcggcgaaccacggaggacgacgtgctcagggccaccgcctcttccgccacccggttcgggatgaaggcccgcggtgcggggctcgggttcgcgcggcgcgactccaccggcggcggccacgaggtcagtgccaatcggcgatcactcagtcaccgccgcggtgacgacggtcgccggtcaacagtcaacactccaataatttacctttggctgtgcaagcgcagtgcaagaaatttgctcatcaatggcacaccgcacacgatgaaaagtggaaatgacaccaataattgcgtgattattgttgtgtgcttgcgacttgcgagtccgatccatccggcacaggtgacagtcacggtacagggggctgcactcgcaatggccagcacatgcacatgttgtcgactcgactgcatcgttaaacaatgggagaacgtcagtacgtcactgagcagctagacggcctctgtttgcagcacgcggtggggtacgtgaccggcgggcagttctacggcgccaaggcgagcctgaacgtgtggccggcgcaggtggcgtcgccggcggagttcagcctctcgcagatctgggtcatctccggcgccttcggcaacgacctcaacaccatcgaggccggctggcaggtcagccctcagctgtacggcgacaacagccccaggttcttcacctactggacagacgacgcgtaccaggagacgggctgctacaacctccactgctcgggcttcgtgcagaccagcagccgcgtggccatcggcgccgccatctcgcccgtctcctcctacgccggccgccagttcgacgtcacgcttctcatctggaaggacccgcgccggggccactggtggctgcagctcggctccggcgcgctcgtcggctactggccctccgcgctcttcacgcacctcggctcgcgcgccgacatggtgcagttcgggggcgaggtcgtcaacgcgcgccccgccggcgcgccgcacacgcccacgcagatgggctccggccgcttccccgccgagggatacgcgcgcgccgcatacttccgaaacgtgcagctcgtcgactgggacaacaacctcgtaccggccgccgggctccgcctgctcgccgaccggccggggtgctatgacatcgccggcggcagcggcggcgcgtggggcacctacttctattacggtgggcccggcaggaatgcacggtgcccgtaactttactagtatattagctaggaacggaatcgaatgcatgggatgggtgttgtacttgtacgtgtgtttcgtacgtgcgcactcaagcacacattagcagaggctgattgctatatattactccaaatgagtctgctttcactttttttaatctctccatgtgaatatgatgccgttgtgatcatctaacaatttgctcatttaatttagcattcttttttcctgtttctttactgcaattatattggacggttgggg

SEQ ID NO: 59136 - DNA, 1245 bp, Zea Mays
ctcgattctagactcggtgccgcgggattcgttaggaggcggtagacattacctatcctcttcggctgcgggctcagttaccagagacttttttctccgatgtgctcggatcgacatgtgtcctatccgccgcagacagacctcctgctgtcggacttctaccgctgggccggcgatgccaacacgttcaccggcgatgaatgcatcgagctggtctgctcgccgaacaaccccgacggcgccatccgcgaggccgtcgtgaggtccgccggcgccaaggcgatccatgacctggtgtactactggccacagtacacgcccatcaccgggcccgccgcccacgacatcatgctcttcagcgtgtccaagctcaccggccacgccggcacgaggctcgggtgggcgctggtgaaggaccgcgaagtggccaggaatatggtctacttcgtcgaccgcagcaccaccggcgtatgcaaggagtcgcagatgcgcgccaccgagatcctcggggtggtctccgacgcctacgaggccgtcccgccggccagggccagcggcgcggtgccccgcctcttcgacttcgcgcagcggcgcctggaggagcgctggcgcatcctgcgcgccaccgtggctgccaccggcgccttcagcctgcccgaggagacctccggctactgcaacttcgccaagcaaaccgtgacagcttgccctgcgttcgcgtggctgcgatgtgagaaggagggcgtcgaggactgcgccgagttgctcgccggccacaagatcgtgggtagcggcggggagcagttcggaggagacgcgcggtgcgtcaggatcaacatgctggacagggacaacgtgttcaacatgctcgtccagcgcctctcctctataaactgaacggagtgaatgcatggagtggcacagcagcctgcattgccacaaataaaatgaacccagaaggatctggtgtctttttcttttgtcagtttggtatcttgggtcctggtagagaaactttgtttcggtttgcttttgatgctttggactgaactgtgtgtcaactcagtagactgttatggattcaggaataaaataagagagagaagggtttctgtgctagaatcaataccatgaactattcagctatagcttcattgatggattgaaagaaatctggattagcaccagtggagcagattccaaaatgggctgtcactggtttagtccaactaaccggcacatcaa

SEQ ID NO: 59137 - DNA, 2238 bp, Zea Mays
atcacaatgacgttgcctgatggccatattcagcaactgttgcatgaaaaaaagatcgtattttccactgaccttacattaattcgaccactgtcagtgggccactgggctaagttgttttgaaattatgggccctaaggccaaaattgggctggtttcttgtacacttccacgttcgaggcgcgcggcgagccgggttctcaccaattcgtcttcttccacaaactccaaaaccctagcgccgccgccgccatgtcctcgtctccgtccccggcgaaccgccgtccccggggcccgcttgcgctggggctggagtcctcggcgaacaagatcggcatcggcgtggtctccctctcgggtgacatcctctccaacccgcgccacacctacgtgacaccgccgggtcatggattccttccccgggagaccgcgcagcaccacctcgcgcacctcctccctctcctccgcgccgcgctcgctgagtccggtgtggcccccgctgacctcgcatgcgtctgctacactaaaggccccggcatgggcggccctctccaggtcgccgccgcagccgcccgcgcgctctccctgttatggaggaagcctctcgtggcggtcaaccactgcgttgcgcacatcgagatgggccgcgcggtcactggggccgtggaccccgttgtactctacgtctccggcggaaacacgcaggttatcgcctacagcgaggggaggtacaggatcttcggggaaacgattgatattgccgtcgggaactgccttgaccgattcgccagggtcctagagctctccaatgaccctagccccgggtataacatcgagcagcttgcaaagaagggagaaaaattcattgatgtcccttatgttgtgaagggtatggatgtgtcattcagtggcatattgagctttattgaagctgcggcgattgaaaagcttaaaaataatgagtgcacacctgcggacctatgctactcattgcaggaaactatctttgccatgcttgtcgaaattactgaacgtgccatggcacactgtgattcaaaggacgttcttattgttggtggcgtcggttgcaacgaacgtttacaggagatgatgaagattatgtgctcagaaagagggggtaggctgtttgcaactgatgaccgctattgtatagacaatggggcaatgattgcatatactggtttactggcgtatgcacatggcatgaccactccccttgaggagtcgacatttacacaaagattccgaactgatgaagttcatgcaatttggagagagaaggagatgccggtgctaaataatacccattcagatgcaattgctgaagtttctaaagatgaagcctccatggcaacaccaatcgttatagattactgagagtacatgagcttcattatcaaacaaagatgaccgagaaggaaagactccacaatgacttcagatgttacaacttccagtattggaagggttcattattttttgtcctcgcttaccaaagaaaatggccaaatacttagacgaaggaaggacatcaaggacaccaaagatacctattgagattccaataagaaaccaaaacagggcaacacagttaaattgatgaagccttctcccatgtcctcctatgaagaggaaaagatataagggaagaaggtttcgtaagacatcaaagatatatgaagcgaagtatatgaagaaacaagttatgaggcacattcattaccccttactacttttctcacagtcacaaactatcatagtgatacattcaagttataagaacaatattcgaagatggatgtacccttgcaactttggatgttgaacgttctggatgtgtgtaaatgcgtgagcaatacaaaggtagtcctctctcccctcaacatgggcactgtttctctatttatagaaataaggtggcatacaacttcatatgaaattatgtttgtgcccttaaactcaatggtgacattgttatattttcctccgcaaaacttgttgtgtaagtctcctcaacccttctttgctcctgtgacaccgaggacgccattcggtccttctagaatgcttcgtccaagctctagtgacaaagatgttattccctccttggtgacgaagttgttacttccttctttaggtcacgaagatcacatagacaaagtttacatagtttaccatgaaacagacttggaaagaaatagatttcatcagtttgag

SEQ ID NO: 59138 - DNA, 1504 bp, Zea Mays
taagttgttttgaaattatgggccctaaggccaaaattgggctggtttcttgtacacttccacgttcgaggcgcgcggcgagccgggttctcaccaattcgtcttcttccacaaactccaaaaccctagcgccgccgccgccatgtcctcgtctccgtccccggcgaaccgccgtccccggggcccgcttgcgctggggctggagtcctcggcgaacaagatcggcatcggcgtggtctccctctcgggtgacatcctctccaacccgcgccacacctacgtgacaccgccgggtcatggattccttccccgggagaccgcgcagcaccacctcgcgcacctcctccctctcctccgcgccgcgctcgctgagtccggtgtggcccccgctgacctcgcatgcgtctgctacactaaaggccccggcatgggcggccctctccaggtcgccgccgcagccgcccgcgcgctctccctgttatggaggaagcctctcgtggcggtcaaccactgcgttgcgcacatcgagatgggccgcgcggtcactggggccgtggaccccgttgtactctacgtctccggcggaaacacgcaggttatcgcctacagcgaggggaggtacaggatcttcggggaaacgattgatattgccgtcgggaactgccttgaccgattcgccagggtcctagagctctccaatgaccctagccccgggtataacatcgagcagcttgcaaagaagggagaaaaattcattgatgtcccttatgttgtgaagggtatggatgtgtcattcagtggcatattgagctttattgaagctgcggcgattgaaaagcttaaaaataatgagtgcacacctgcggacctatgctactcattgcaggaaactatctttgccatgcttgtcgaaattactgaacgtgccatggcacactgtgattcaaaggacgttcttattgttggtggcgtcggttgcaacgaacgtttacaggagatgatgaagattatgtgctcagaaagagggggtaggctgtttgcaactgatgaccgctattgtatagacaatggggcaatgattgcatatactggtttactggcgtatgcacatggcatgaccactccccttgaggagtcgacatttacacaaagattccgaactgatgaagttcatgcaatttggagagagaaggagatgccggtgctaaataatacccattcagatgcaattgctgaagtttctaaagatgaagcctccatggcaacaccaatcgttatagattactgaggtacaattggcctttacaattttgtcttgctgctaatgttttttcatgatagctaatgcaatttggattgttggagacaatcgctaccaattactctccctctattccaaactaagacattttgctttactagatgcatagtgtttgctatggccctgtttggaacctctagagctaatactgctaaaattagttgtataggtcaaacacccaca

SEQ ID NO: 59139 - DNA, 1682 bp, Zea Mays
taagttgttttgaaattatgggccctaaggccaaaattgggctggtttcttgtacacttccacgttcgaggcgcgcggcgagccgggttctcaccaattcgtcttcttccacaaactccaaaaccctagcgccgccgccgccatgtcctcgtctccgtccccggcgaaccgccgtccccggggcccgcttgcgctggggctggagtcctcggcgaacaagatcggcatcggcgtggtctccctctcgggtgacatcctctccaacccgcgccacacctacgtgacaccgccgggtcatggattccttccccgggagaccgcgcagcaccacctcgcgcacctcctccctctcctccgcgccgcgctcgctgagtccggtgtggcccccgctgacctcgcatgcgtctgctacactaaaggccccggcatgggcggccctctccaggtcgccgccgcagccgcccgcgcgctctccctgttatggaggaagcctctcgtggcggtcaaccactgcgttgcgcacatcgagatgggccgcgcggtcactggggccgtggaccccgttgtactctacgtctccggcggaaacacgcaggttatcgcctacagcgaggggaggtacaggatcttcggggaaacgattgatattgccgtcgggaactgccttgaccgattcgccagggtcctagagctctccaatgaccctagccccgggtataacatcgagcagggtatggatgtgtcattcagtggcatattgagctttattgaagctgcggcgattgaaaagcttaaaaataatgagtgcacacctgcggacctatgctactcattgcaggaaactatctttgccatgcttgtcgaaattactgaacgtgccatggcacactgtgattcaaaggacgttcttattgttggtggcgtcggttgcaacgaacgtttacaggagatgatgaagattatgtgctcagaaagagggggtaggctgtttgcaactgatgaccgctattgtatagacaatggggcaatgattgcatatactggtttactggcgtatgcacatggcatgaccactccccttgaggagtcgacatttacacaaagattccgaactgatgaagttcatgcaatttggagagagaaggagatgccggtgctaaataatacccattcagatgcaattgctgaagtttctaaagatgaagcctccatggcaacaccaatcgttatagattactgagcaggtaaaatgaacatgtcgtatgcctgacatacctgaagatagctgacatggatcaaacctcaccaatcgctgacatggatcaaacctcacctatcaccttaacattctagttagttacttcatcgagtgaacttattattgttgtaaactaatagacgcatttctgcaaagctagcttaactcttaagttactcttgtgatggtaatctgttaaggttctaaagcagcctcttttggatcgacattggattcttgggaacgtggggagttatttcgattcgcatccaatgcacatcagctaaggtggtggttttctgtaaaatatatacattggattattatgtgggtgttttgttttgcgagaaaaaactactacgcttgtgttggatgcgaattgaatgtctctaaatgtctgggtgcacaggttgatgcacaagat

SEQ ID NO: 59140 - DNA, 1900 bp, Zea Mays
taagttgttttgaaattatgggccctaaggccaaaattgggctggtttcttgtacacttccacgttcgaggcgcgcggcgagccgggttctcaccaattcgtcttcttccacaaactccaaaaccctagcgccgccgccgccatgtcctcgtctccgtccccggcgaaccgccgtccccggggcccgcttgcgctggggctggagtcctcggcgaacaagatcggcatcggcgtggtctccctctcgggtgacatcctctccaacccgcgccacacctacgtgacaccgccgggtcatggattccttccccgggagaccgcgcagcaccacctcgcgcacctcctccctctcctccgcgccgcgctcgctgagtccggtgtggcccccgctgacctcgcatgcgtctgctacactaaaggccccggcatgggcggccctctccaggtcgccgccgcagccgcccgcgcgctctccctgttatggaggaagcctctcgtggcggtcaaccactgcgttgcgcacatcgagatgggccgcgcggtcactggggccgtggaccccgttgtactctacgtctccggcggaaacacgcaggttatcgcctacagcgaggggaggtacaggatcttcggggaaacgattgatattgccgtcgggaactgccttgaccgattcgccagggtcctagagctctccaatgaccctagccccgggtataacatcgagcagggtatggatgtgtcattcagtggcatattgagctttattgaagctgcggcgattgaaaagcttaaaaataatgagtgcacacctgcggacctatgctactcattgcaggaaactatctttgccatgcttgtcgaaattactgaacgtgccatggcacactgtgattcaaaggacgttcttattgttggtggcgtcggttgcaacgaacgtttacaggagatgatgaagattatgtgctcagaaagagggggtaggctgtttgcaactgatgaccgctattgtatagacaatggggcaatgattgcatatactggtttactggcgtatgcacatggcatgaccactccccttgaggagtcgacatttacacaaagattccgaactgatgaagttcatgcaatttggagagagaaggagatgccggtgctaaataatacccattcagatgcaattgctgaagtttctaaagatgaagcctccatggcaacaccaatcgttatagattactgagacagtaaagagtaaatgcttgtacggtaaagcctagaaccactcctaaggctatctccaactgatctcctatagtcctatctcatctcctatctcaaacttcactctacaaacagatagttccacatctaaatgtgatatctttgctctgtttgggagaagcctcctccaggcacatggcaggggctcagaatagttgtgctgttgtatgaactgcagcaggtaaaatgaacatgtcgtatgcctgacatacctgaagatagctgacatggatcaaacctcaccaatcgctgacatggatcaaacctcacctatcaccttaacattctagttagttacttcatcgagtgaacttattattgttgtaaactaatagacgcatttctgcaaagctagcttaactcttaagttactcttgtgatggtaatctgttaaggttctaaagcagcctcttttggatcgacattggattcttgggaacgtggggagttatttcgattcgcatccaatgcacatcagctaaggtggtggttttctgtaaaatatatacattggattattatgtgggtgttttgttttgcgagaaaaaactactacgcttgtgttggatgcgaattgaatgtctctaaatgtctgggtgcacaggttgatgcacaagat

SEQ ID NO: 59141 - DNA, 1365 bp, Zea Mays
taagttgttttgaaattatgggccctaaggccaaaattgggctggtttcttgtacacttccacgttcgaggcgcgcggcgagccgggttctcaccaattcgtcttcttccacaaactccaaaaccctagcgccgccgccgccatgtcctcgtctccgtccccggcgaaccgccgtccccggggcccgcttgcgctggggctggagtcctcggcgaacaagatcggcatcggcgtggtctccctctcgggtgacatcctctccaacccgcgccacacctacgtgacaccgccgggtcatggattccttccccgggagaccgcgcagcaccacctcgcgcacctcctccctctcctccgcgccgcgctcgctgagtccggtgtggcccccgctgacctcgcatgcgtctgctacactaaaggccccggcatgggcggccctctccaggtcgccgccgcagccgcccgcgcgctctccctgttatggaggaagcctctcgtggcggtcaaccactgcgttgcgcacatcgagatgggccgcgcggtcactggggccgtggaccccgttgtactctacgtctccggcggaaacacgcaggttatcgcctacagcgaggggaggtacaggatcttcggggaaacgattgatattgccgtcgggaactgccttgaccgattcgccagggtcctagagctctccaatgaccctagccccgggtataacatcgagcagggtatggatgtgtcattcagtggcatattgagctttattgaagctgcggcgattgaaaagcttaaaaataatgagtgcacacctgcggacctatgctactcattgcaggaaactatctttgccatgcttgtcgaaattactgaacgtgccatggcacactgtgattcaaaggacgttcttattgttggtggcgtcggttgcaacgaacgtttacaggagatgatgaagattatgtgctcagaaagagggggtaggctgtttgcaactgatgaccgctattgtatagacaatggggcaatgattgcatatactggtttactggcgtatgcacatggcatgaccactccccttgaggagtcgacatttacacaaagattccgaactgatgaagttcatgcaatttggagagagaaggagatgccggtgctaaataatacccattcagatgcaattgctgaagtttctaaagatgaagcctccatggcaacaccaatcgttatagattactgaggttgacgacttgatgttcaacaaagcctgtgctgttgttacttgtcaagctgtccaagagaccaagactccaagtgctgtgtggttgtccaaactccaagaccaagagtccaagaaacgaagac

SEQ ID NO: 59142 - DNA, 782 bp, Zea Mays
ccacaatgtgccgtcggattacatgctcccaaacagggcctaaaatcgtttccgacaaagattttgattataatggcataatggaagtgcaaatagcagtttacgctttctgtgtataaggcaaatgaacactaagctatacaacgcgacgagcttcaacgagtacgtgctggaggggagcgcgccggtgctcccggagacgcagcggctgttcaagaagctcgtctcgctgggcatcaagccggtgttcctgacgggccgcaccgaggaccagagggccatcaccgtcaccaacctccgccgccaggggtactccggctggatgacgctgctgctcaagcccgtcggcctcaaggccaccgccatcgcctacaagtccggcgagcgccagaagctccaggacgccgggtacgtcatcgtcggcaacatcggcgaccagtggagcgacatcctcggcgcgccggagggcgcgcgcaccttcaagctgcctgaccccctctactacattggctaagcagcgatgccaacggcgcggcgcggctctccatcagcccatccatcaacccgtcacccggctccagtgcctgtgctcaactactctttgtttgttacccctcacttcttatcatcattaattcctaaggttaattccctgagctgagtggaaataaggccgactcggtggagagctgtcgacttctcaataaataattgctcatgaaaaccacgatggtttatgttattcaaagtcttatatatatataatggattagtaccgggaa

SEQ ID NO: 59143 - DNA, 1339 bp, Zea Mays
cctccgatcagaaatcaacggtgcgtctctgctcttgtccggaaggttctcgcaggcgcggcgacctcggttttgaacacctgctcttcttcctccttccaatccaagcttcgtacgggacgaggagaaccgaagaaggaattggacgcgaggagactcgagtactcgacagggaaaagtcgaggcctcggatccatcgactcgtgaagatgtcctcgcccgccgagtactacaaatcacttccacctataagcaaggcatatgggacattgtgtttcttcaccactgtgctagttcggctccatatcctgaatccgctgtttctgtacttatattaccctcgggtgttcaagaagtttgaggtatggaggatatttacaagtttcttcttcctgggaccattttccataaactttggtattcgccttctgatgatgtatggtgtcatgttggaaaagggagcatttgataaacggactgcagatttcttgtggatgatgatatttggtgccatctcactattggtgttgtctgttattccccaattgaatacttatgtcttgggattacctatggtcagcatgcttgtttatgtctggagccgagagaatccaaatgcccagataaatatatacggcatcctccaattgaaggcgttttatcttccatgggttatgctcttattagatgtgatatttggatcaccattaatgccaggccttctgggtatcatggttggacatctatactactactttgcagtgttgcaccctctcgccaccggaaagaactacctcaagactccgaaatgggtacataagattgttgctcgattcagaataggtatgcaagccaacgctcctgtccgcgcaccagctaacggcaacgctgggactggtgccttcagaggaagaagctatagactcaatcaatagatcgaccaggagaagtacacaccttgtaacgctaacgcgattcctgttctgagtggcaatgtagagacagagcgcagattcctagggtcaatcaggattaagggttgcggatagggcagaggggtggtaatggatgacgatctaaatgttttttcataaaatggtagagtattaaataaattataaattttagtgtaaaatgaatataaataggatttgtttctaatccgatctttatatcttatagtgtaaaattatatcttatagtgtaaaatttagagtcactgttaccctattgcagtgccgcctttcatttactgatttagttcctaacaatgttcgtcgtccctgtttacgcatgagtatagttgtgtaatggcaatttgcgtgcacttacgtttgaa

SEQ ID NO: 59144 - DNA, 1374 bp, Zea Mays
cctccgatcagaaatcaacggtgcgtctctgctcttgtccggaaggttctcgcaggcgcggcgacctcggttttgaacacctgctcttcttcctccttccaatccaagcttcgtacgggacgaggagaaccgaagaaggaattggacgcgaggagactcgagtactcgacagggaaaagtcgaggcctcggatccatcgactcgtgaagatgtcctcgcccgccgagtactacaaatcacttccacctataagcaaggcatatgggacattgtgtttcttcaccactgtgctagttcggctccatatcctgaatccgctgtttctgtacttatattaccctcgggtgttcaagaagtttgaggtatggaggatatttacaagtttcttcttcctgggaccattttccataaactttggtattcgccttctgatgatgttggggtttttgaaatttctttgcatagagcaaggtatggtgtcatgttggaaaagggagcatttgataaacggactgcagatttcttgtggatgatgatatttggtgccatctcactattggtgttgtctgttattccccaattgaatacttatgtcttgggattacctatggtcagcatgcttgtttatgtctggagccgagagaatccaaatgcccagataaatatatacggcatcctccaattgaaggcgttttatcttccatgggttatgctcttattagatgtgatatttggatcaccattaatgccaggccttctgggtatcatggttggacatctatactactactttgcagtgttgcaccctctcgccaccggaaagaactacctcaagactccgaaatgggtacataagattgttgctcgattcagaataggtatgcaagccaacgctcctgtccgcgcaccagctaacggcaacgctgggactggtgccttcagaggaagaagctatagactcaatcaatagatcgaccaggagaagtacacaccttgtaacgctaacgcgattcctgttctgagtggcaatgtagagacagagcgcagattcctagggtcaatcaggattaagggttgcggatagggcagaggggtggtaatggatgacgatctaaatgttttttcataaaatggtagagtattaaataaattataaattttagtgtaaaatgaatataaataggatttgtttctaatccgatctttatatcttatagtgtaaaattatatcttatagtgtaaaatttagagtcactgttaccctattgcagtgccgcctttcatttactgatttagttcctaacaatgttcgtcgtccctgtttacgcatgagtatagttgtgtaatggcaatttgcgtgcacttacgtttgaa

SEQ ID NO: 59145 - DNA, 1355 bp, Zea Mays
cctccgatcagaaatcaacggtgcgtctctgctcttgtccggaaggttctcgcaggcgcggcgacctcggttttgaacacctgctcttcttcctccttccaatccaagcttcgtacgggacgaggagaaccgaagaaggaattggacgcgaggagactcgagtactcgacagggaaaagtcgaggcctcggatccatcgactcgtgaagatgtcctcgcccgccgagtactacaaatcacttccacctataagcaaggcatatgggacattgtgtttcttcaccactgtgctagttcggctccatatcctgaatccgctgtttctgtacttatattaccctcgggtgttcaagaagtttgaggagcctgcaggtatggaggatatttacaagtttcttcttcctgggaccattttccataaactttggtattcgccttctgatgatagcaaggtatggtgtcatgttggaaaagggagcatttgataaacggactgcagatttcttgtggatgatgatatttggtgccatctcactattggtgttgtctgttattccccaattgaatacttatgtcttgggattacctatggtcagcatgcttgtttatgtctggagccgagagaatccaaatgcccagataaatatatacggcatcctccaattgaaggcgttttatcttccatgggttatgctcttattagatgtgatatttggatcaccattaatgccaggccttctgggtatcatggttggacatctatactactactttgcagtgttgcaccctctcgccaccggaaagaactacctcaagactccgaaatgggtacataagattgttgctcgattcagaataggtatgcaagccaacgctcctgtccgcgcaccagctaacggcaacgctgggactggtgccttcagaggaagaagctatagactcaatcaatagatcgaccaggagaagtacacaccttgtaacgctaacgcgattcctgttctgagtggcaatgtagagacagagcgcagattcctagggtcaatcaggattaagggttgcggatagggcagaggggtggtaatggatgacgatctaaatgttttttcataaaatggtagagtattaaataaattataaattttagtgtaaaatgaatataaataggatttgtttctaatccgatctttatatcttatagtgtaaaattatatcttatagtgtaaaatttagagtcactgttaccctattgcagtgccgcctttcatttactgatttagttcctaacaatgttcgtcgtccctgtttacgcatgagtatagttgtgtaatggcaatttgcgtgcacttacgtttgaa

SEQ ID NO: 59146 - DNA, 1209 bp, Zea Mays
cctccgatcagaaatcaacggtgcgtctctgctcttgtccggaaggttctcgcaggcgcggcgacctcggttttgaacacctgctcttcttcctccttccaatccaagcttcgtacgggacgaggagaaccgaagaaggaattggacgcgaggagactcgagtactcgacagggaaaagtcgaggcctcggatccatcgactcgtgaagatgtcctcgcccgccgagtatggaggatatttacaagtttcttcttcctgggaccattttccataaactttggtattcgccttctgatgatagcaaggtatggtgtcatgttggaaaagggagcatttgataaacggactgcagatttcttgtggatgatgatatttggtgccatctcactattggtgttgtctgttattccccaattgaatacttatgtcttgggattacctatggtcagcatgcttgtttatgtctggagccgagagaatccaaatgcccagataaatatatacggcatcctccaattgaaggcgttttatcttccatgggttatgctcttattagatgtgatatttggatcaccattaatgccaggccttctgggtatcatggttggacatctatactactactttgcagtgttgcaccctctcgccaccggaaagaactacctcaagactccgaaatgggtacataagattgttgctcgattcagaataggtatgcaagccaacgctcctgtccgcgcaccagctaacggcaacgctgggactggtgccttcagaggaagaagctatagactcaatcaatagatcgaccaggagaagtacacaccttgtaacgctaacgcgattcctgttctgagtggcaatgtagagacagagcgcagattcctagggtcaatcaggattaagggttgcggatagggcagaggggtggtaatggatgacgatctaaatgttttttcataaaatggtagagtattaaataaattataaattttagtgtaaaatgaatataaataggatttgtttctaatccgatctttatatcttatagtgtaaaattatatcttatagtgtaaaatttagagtcactgttaccctattgcagtgccgcctttcatttactgatttagttcctaacaatgttcgtcgtccctgtttacgcatgagtatagttgtgtaatggcaatttgcgtgcacttacgtttgaa

SEQ ID NO: 59147 - DNA, 1163 bp, Zea Mays
agtggtccaacaccttggcttgccttaccgctttaaaaaccatggtactacaaatcacttccacctataagcaaggcatatgggacattgtgtttcttcaccactgtgctagttcggctccatatcctgaatccgctgtttctgtacttatattaccctcgggtgttcaagaagtttgaggtatggaggatatttacaagtttcttcttcctgggaccattttccataaactttggtattcgccttctgatgatagcaaggtatggtgtcatgttggaaaagggagcatttgataaacggactgcagatttcttgtggatgatgatatttggtgccatctcactattggtgttgtctgttattccccaattgaatacttatgtcttgggattacctatggtcagcatgcttgtttatgtctggagccgagagaatccaaatgcccagataaatatatacggcatcctccaattgaaggcgttttatcttccatgggttatgctcttattagatgtgatatttggatcaccattaatgccaggccttctgggtatcatggttggacatctatactactactttgcagtgttgcaccctctcgccaccggaaagaactacctcaagactccgaaatgggtacataagattgttgctcgattcagaataggtatgcaagccaacgctcctgtccgcgcaccagctaacggcaacgctgggactggtgccttcagaggaagaagctatagactcaatcaatagatcgaccaggagaagtacacaccttgtaacgctaacgcgattcctgttctgagtggcaatgtagagacagagcgcagattcctagggtcaatcaggattaagggttgcggatagggcagaggggtggtaatggatgacgatctaaatgttttttcataaaatggtagagtattaaataaattataaattttagtgtaaaatgaatataaataggatttgtttctaatccgatctttatatcttatagtgtaaaattatatcttatagtgtaaaatttagagtcactgttaccctattgcagtgccgcctttcatttactgatttagttcctaacaatgttcgtcgtccctgtttacgcatgagtatagttgtgtaatggcaatttgcgtgcacttacgtttgaa

SEQ ID NO: 59148 - DNA, 1273 bp, Zea Mays
tctgaaccaacaaagaaagccatcaaggacacaatccaagaacagcattaataagagcaaggatttacatgccaagtgcagtatgaatcaaatttccgtcatacacttgttggccactgataaaaagaaaagaaacactagtcgcatgattgatcacattgcaaaaacaagaaaaagagaaagaaaaacgacgagaacactcgcaggaacacatgaaaacgttcttattctcaattactccctgaaagagcctctcgtcatcttgttggcatttccaatggagcttgctgatcggacggacctgaccagtcaccacctcctctgcaagaacgccagcctgtcgttctcactgcctgcaacctccaacgagcggtccatgcggccaacgacggccgtcctgaagctgaaggcctcctgcgcccgggggccgcacccgcgctgcatgcccatgacggcgctcaggctggcgcgggacgactccacgacaactacttcgctgagcggcacccgcttccgcggtccgccgccgcagcaggcgagctcggggcgctgcttgggcgcgctctgagaccgcaccttggcctcggacgcctgcgtgctcgacatgtagttcgggcaggcgttgagcgacggcgagtagcccgcgacggacttggtcggggtggccggcgcgtgcgcttgcaggtaccgcggcgtgctctgcgccgtggccggccgtgccttctccagcacgcaccagtcgtagtccgggaactggcgcgaggtcggcacggcgatgcgccgcggcccggagggcaggtagcacggcagcggcgaggacgcggggttgttggcgcaccactcctcgccgccgccgctgccgctgctgcgggcgtccagcagcggggcgctggcgcggcgcgaggacgaccgcgacttggggcggccggggtccacctccacgatcttggggctccggtcgtagccgtacgacggggactcgacgctcgccgacagccggcggctgctgtacgccgccaccccgtgctcgctccgcgtgtcgtccgcgtaccgctcttgctgcacgccggacagatgtacgtcaaaaacaaaaacaaaaatggtgaggatatacacgggcacgaaagtgggcaggaacgtaggaaccagtagcgaaatgcgtgtctgtactgtaccagcgagtagcgcggccggacgggctggtggtggagggcggcgcgcctctcgcgcacggccgcctgcgcgcggacgagagcctgcatgctctgcagcg

SEQ ID NO: 59149 - DNA, 1437 bp, Zea Mays
ctaactattatccactcattattagatatccaataataaaaatcaaatttacccgcatgcacgagtccgagtcagccacaactaggacggactccggaggggaccgaggcttataaatacagctcccagacagacccaccgatcctcccaaggtcgcgttccatcgattctccacgagcggatagcggcgtacagatcttttcgtgctcgtcttcgcgtcggtgtggctggcccgtgactgtgagaagtcaaaatctcacagcatattgattgggctgattccgtgggagggaatcggggatctggcattctcgcgcccaaaaggtcgcagctttctttcgtgtcgccagccggtgcgcggtcgacgcagagcgcgtggagggtgtcccgctagtagctcctcgacgacgacggtgacgggaggccgggggttgaccatggtggcggcggcggacctggaggcggcggagcgggtggtggcggagctccgcgaggcgtgcgcggcgcggctcgacgaggtggcggcggcgatggaggcggagatgcgcgccggactgcgcgaggagggcggcagcaagatcaagatgatcgtctccttcgtcgacaacctccccacggggaacgaagagggcgtcttctacgccttggaccttggcggaacgaacttccgcgtgctgcgcgtgcagctcgccgggaaagacaggcgtgtggccaagcgagactccaaggaggtgtccatccctcctcacctcatgtcaggcaacgcgtcggagctgtttggcttcatcgcctcggcgctagccaagtacgtcgccgcggcgggcgaaggggacggcaggcagagagagctcgggttcaccttctctttccccgtgcgccagacgtcgatcgcgtcaggcacgctcatcaagtggaccaaggcgttttcggtcgacgacgctgttggtgaggatgtcgtcgccgagctgcagacggccatggagaagcaaggcgtcgacatgcgtgtggcggcactgatcaacgatacggtcgggacgctggctgcgggccggtacaacgatgaggacgtcgtcgtcggtgtgatactaggcactggctccaacgccgcgtacgtcgaagaggccagtgccatacccaagctcaagctggagggcggcgaattgcccaagtcagggaacatggtgataaacacagaatggggtaacttctactcgccctgcctccccatcacggagtatgaccaggccttggatgaggagagcttaaacccaggggagcagatcttcgagaagctggtttcgggcatgtatctcggcgagattgtgaggcgggtgctgcttaaaatcgcgtcgcagtcttccatcttgggcgatgtcagccacacgaacctcaaaactcgcttcagtcttagacgttgctgctgcgtttggcattcag

SEQ ID NO: 59150 - DNA, 1925 bp, Zea Mays
cgcccctgcctgctgcgtgcgcaagcaagatggccaatggcagcggcagccactgctacggctacaccctgctgcgcgacccgcggcacaacaagggcctggccttctcggaggcggagcgcgacgcgcactacctccggggcctgctgccgccggcgctggcgtcgcaggagctgcaggagaagaagctcatgcagaacctgcgccggtacgagcagccgctgcaccgctacatcgccatgatggacctgcaggagcgcaacgagaggctcttctacaagctcctcatcgacaacgtcgaggagctgctccccgtcgtctacacgcccaccgtcggcgaggcatgccagaagtacggcagcatctaccgccgcccgcaggggctgtacatcagcctcagggacaagggcaagatcctcgaggtgctcaagaactggcccgagaggagcatccaggtcatcgtcgtcaccgacggcgagcgcatcctcggcctcggtgatctcggttgccaggggatgggaattcccgttggcaagctctccctctacactgccctcggaggtgttcgcccgtcagcttgcctgcccatcacaattgatgtcggcaccaacaacgaggccttgctcaaggacgagttctacatcggcctccgccagaggcgtgccaccggcgaggagtaccatgaacttcttgaagagttcatgaccgccgtcaagcaaaactacggcgagaaggtcctcacccagttcgaagacttcgccaaccacaacgcctttgacctgctcgagaagtacagggagagccatctcgtcttcaacgacgatatccagggaacagcatccgtggtcctcgctggcctcctggcggcgctcaaggtggtcggcgggacactggcggaccacacttacctgttcctcggcgccggcgaggccgggactggcattgccgagctcattgctctcgagatgtccaaacatactgggtctccgatcgaagagtgccgcccgaagatctggctgatggactccaagggcctgatcgtggcgtcacggaaggactcgctgcaggcgttcaagaagccatgggcgcacgagcacgagcccgtggcgaccctgctggaggccgtgcagtccctgaagccgacggtgctgatcggcacctcgggcaagggcggcaccttcaccaaggaggtggtggaggcgatggcgtcccagaacgagaagccggtcatcttcgcgctgtcgaacccgacctcgcactcggagtgcacggcggagcaggcctacacctggaccaagggccgcgcggtgttcgcgagcggcagccccttcgacagcgtggagctggacggcaaggtgctggtgccggggcagtccaacaacgcctacatcttcccggggttcggcctcggcgtcgtcatctccggcgccatccgcgtccgcgacgacatgctgctggccgcctcggaggcgctggcggagcaggtaaccgaggagcacttcgccaaggggctcatcttcccgcccttcaccaacatccgcgccatctccgcgcgcatcgccgccaaggtggctgccaaggcctacgagctcggcctcgccagccgcctgccacgccctgacgatctcgtcaagtacgctgagagctgcatgtacacccccatctaccgcagctaccggtaaggaaaggaccatggccggggcggcggcctgagcaaaaggaaaggaaacgggtaaattatgagtcagtgagtgaataaagggtcgatgcgatatttgttgcagctagaggagtgagtttacacatactttcatttctatacactgtatttctgtgtaccgtatacggcataccatacaacactactacatactcgtcagtcatttcaatacagttaatgtacctggttagaacgctatcactct

SEQ ID NO: 59151 - DNA, 1451 bp, Zea Mays
ctttaaagtagggggagaaaaatattcatgcgtgcagtactataaaattgaaagttaacagggtctagataaggattttaatccctcaagaagacaacatcactattcttaaaacaaaaacaaaaaaaaatagcaccagtcaactcttgtcaaccgccttttggatcttactgttctgaatgaaaagctctctatggtcactctcaccgtcgcccccgacgtcagacactacgcaatctccaaaaaacatgggaatctccgaactggcctcctgtacaagttactaaaaaccaaagcaaggaattttccctcatgtccaccttcatccggaagaacaacgctcccccgagagtccagttttttgcttggctagcgtcataggataggttactaactcgagtgaaccacaaaaagaaaggcatcatggaggatggtatctgcgagatctgccgcactgcgccagaaacaaccacacacatactattcaactgactttggagcgaccttctggacggtgctcggtgttcaaatcctggaggaagctgactgcaaaaggctccatctcctaccccacccctcgagcctgcacggtcaaaattccaccgctctcgtcgttctatgttactagcacctctggaagagaaggaatgacagggtcttcagggagagagccattggcaattttgccactatcatttgtgggcttcgccagtatgccatcggacccacaaatcatagacacagatggtcccaccagtcatagacaccggatggcataataacaggcagccaaatttgagagtggcaaaatagcaaatttctctcagggagaagctgacttcgctccaacgtactctggccgcctgtagaaccgatgcccaagcccgcctttgggcgcaccgcctccacccgagcaaatgccacctagctgatctttggtgtaatattctagccccgtgtagttccctttttctccttgtgttcccctctcttcctatcgctacctatcttccttctctgcgttttgagatgtaacacccctccaatgtaatttgtcgttcacacgacttatgcaatggaaatcaggttagggatcctcccccttgactgtacaaaaaatagcactaaaaatgcagagtttcaatcgtagaccacaaatagtacgcatggacatctactccgtacaaataaaacacgaaattgaattacgtagaaccaaaatccttacattttttaggatcctaagctccttgagccctgttctggccttcatgctgcaagcatcatccgactctacaatcacacacgacaaaccatcataaaatttcatctagcacggcacagagcgaaattgacaatcaatgcgccatgttaacaggaactgcacatctgctcatggctggtacccgagggaggacgcggcggcggcggcaggagctgccggggcggcc

SEQ ID NO: 59152 - DNA, 116 bp, Zea Mays
ttgccctctcccgtcactttctcgctgattccacaaacggctcatctccctccacggcaaagcgaagtggcctgctcatctccctccacggcacggcagcgagacatcgccgttaa

SEQ ID NO: 59153 - DNA, 2241 bp, Zea Mays
cagattccaactagctatggctcttccgtctcccgcccttctgtctcccttcccctcccggcgccaacccctccatcagcctcacgccggcgtccaccccatacccggcagccaacccttcgtcttccatccctctggcatcgggccaccttgctccttcccgccagtttccctggtgggacagtccaaatcctagagatggtctgaatcaagccctgtctcctcgcctagtggtgcccgcccgccccaccgctcctacaaagaggcggtcctctccagttcgaagcaagcctctccgctttctccttcagcacaaaccccatcttcagcctctacaaggattgtgcttgcttctttgcttgaggtgcttaacaggtcggttgtccgtccgagtcaatacgatggcggctggcaggaagtcgtgaggaggaggaagtttcgtcgttctccacttcctcgtcgaggatcccaggtggacctccagggcaagtgctacaattgtttctcctcccatctcgctgttgcctgtcgctgtcccccccccccaggtgcttctcttgcctcgggcttgggcaccgcgcttcccattgcccatcttcccttgtggcttcgcaagtgaatcgggtgccagttaggcaccgtcgagagcggcaggaggctcgcccttccgtgtgggggcgtctgtctaagcagtaggatccggtgccgacgagtgaccaagctcgccaaccggtgctgcagcgtttgtcaaggcagcagtttgttgctcgaggaccagctaccgtgcgcaagaagtcggtttgggtgaggatttctcctcccttaccagactcgaagatggaccccaatggcttggtggattcacagagatttcttcggcttaagaagaagcgaagaagatcaaaaggaggcaagacaggagttggcgcgtctaggattgtttcccccggctcagctgatggtgttgatgctattcttcctatgcctcggctggtcgagcttggggatagtcgtccacccctagttgagtctcgggtattggctttctatgatgagctggcgcgagaagaaatcaagttacgtcgggccttgttcgttaccattgtggagacgaggcctgaggttcatggatcggatgttctggaagaggtggctcgcagttttgaagtcaatgtgagagatatgtcaattcatcaagcgaatcctgaagattttctactatttttgcctggtgaagatacggcaacacgcgtgctcaatggtggaagattttttgttgaccctcgtttcaacttgcttttcaagagctggtcgcgtttctcgcatgcttcctcatcggtcatgtatcaattggtggacgtcgtggtcagaggtcttccggagcatgcatggttccgctctacggcggaggtcattcttgaagactcatgcttcattgaggaggttcatttggatatagttcacaaaagggatttctcttcctttgctgttaggactcgatgttttgatccagagaggttgcagcggaatatgattctacatatctcggagccagggccacaatccaatgaagcaaggtttttgtcatacaatattagtgttcaagctatcccggtaaatgccaatgaagcttcaatgcgccctccggctgatccttcgacgaggacgggtggggatgatcggtctagtgcatcgaatgatgatgtctcagacccttcaccttgacgttcaagctctgaccaatggcgacgttggtcgatccacctctgcctgggcccaccggtgccgcctgggcgcgaaagcgttcgacatgtgcctggggaattgttgatgattgtggctgacgccttgggcaattcaaatccgcatttactagcccgccaggatgttgtgcagaaccccacggagatacgggtcgaagatttggaactttcgctggttcccgagatggatgggtacggctcaaggaagatatacagtttgcctgctgaagctctagatgaaggggaattctggtcatctgggccgctgattcctgctgggtcagcttcgccccagtccccggtgtagagagttggtttaggggaaagcaccgcacacccaatcaggtgggtgacttctcatatatatagccaagtggcctggtgtacaaggatacaatctcctaaactaggaaggctgtcacctatacaaggtaaggctaaactaggaaggctgtcacctatacaaggtaagacagcc

SEQ ID NO: 59154 - DNA, 748 bp, Zea Mays
atgcagacacacacctccataaccaaagtctatacaagaagaaaacagaacccccttcaggatcaagatgtggatgttggcttgacaggaggaagatgcaatgacttgggcaagaatcttagcgtggactttgccctggattctcaaactcataccaatcaggaccaagcttcagactgctgcatcgatagtggcattgatgcttttatctgcaagatcagcaggaagacggcagggcttctcccagctcccaagccttccctgaagactgcatcatctcaggtgattaatgctcccaggcgcagcagaagagttgccggcattagtgtggaatttgaaatgtatgattgcagaagcaggacttccagaaaagctatgagggtcttgcaaatcatcacagaaagtgaagatatgaataaggaagccttgcagaaatatggtgttctttttaaccaccctcttaaccagatctaggtggaggccctcgctgccttgtttggctggtcaataccagtagatctgtaggagcattccccctgtggttgtttgttgtttttgttcttcctacgaatccttcaaagattcttatttggaatgttagagggctcatttcttctgttaggaaggatgttgtcagagaaatggaggacacctttcaggtggatgttgtatgctgtcaggagacaaatatataatatattagtagaggagacattttatctatgttgggagtggagttctctggttt

SEQ ID NO: 59155 - DNA, 207 bp, Zea Mays
caaggagaaggaggaagccagtggcgggcgagggaaatgtggaagaccatggggtgggaagcatcagagctccagcgccgcggttttatgataaggacaaggcagggattagtgcggcggcggctgatcgcctgcggcggcgacggcgaggtgggcggtcggggctcgggtttggtgatggttcgacctccgctccgctggggcttg

SEQ ID NO: 59156 - DNA, 3133 bp, Zea Mays
gcggcgcaggatcgtagcaccgagggtttccagtccacgttctagaagattcccgtctacattggccgaccccgcggcccacaccgtatatcaccgcctcctatccggcctctgcccttctcgccgaacggaaaaccctgcccggaccttcgttgcagcgctacgagcttcgacgggccgctcgatctccacctctgaagctgagtgtgaaactgtgaatcgaagatgagcgtggtgggcttcgacctcggcaatgagagctgcatcgtggcggtcgcgcggcagcgcggcatcgacgtggtcctcaacgaggagtccaagcgcgagacacccgccatcgtctgcttcggggacaagcagcggttcatcggcaccgccggcgccgcgtcctctaccatgaaccccaagaactccatttctcagatcaagcgcttgctaggccgcaagtactccgaccccgaggtacagagagatctcgcctccttcccgttccgtgtcacggagggccccgatggttttcccctggtccatgtacgatacctgggcgaggaacggacgttcacctctacccagctgcttgccatggtgctgtccaatttgaagggcattgctgagggtaacctgaatgctgcagttgttgattgttgcattggtattccagtctactttacggatctgcagcgcagggctgttcttgatgctgctactattgcgggtctccagccattgcgattgttccatgagacaacagccactgcactggcatatggtatttataagactgatctcccggagaatgaccagttgaacgttgcatttgttgatgtcggtcatgcaagcatgcaggtcagtgttgtcggttacaagaagggacagctcaagatgttgtcgcatacgtatgaccagtctcttggcgggagggactttgatgaggccctgtttaagcactttgcagctaaattcaaagaggaatataagattgatgtgtaccagaatgcgcgtgcatgcattaggttgcgtgtggcatgtgagaaacttaagaaggtactgagcgccaacccagaggccccactgaacattgagtgtttgatggatgagaaggatgtgcggggttttattaaaagggaggagttcgaacagatcagtgcctcggtgctggaacgcgtgaaaggaccactggaaaaggccttggctgaagctgggttgactactgaaaatgtgcactttgttgaggttgttggatctggttctcgtgttccggctataatcaagataataactgatttttttgggaaggagccaagacgaaccatgaatgcaagtgagtgtgttgcgcgaggatgtgctcttcagtgtgctattctcagccccactttcaaagtgcgagaattccaggttaatgatgggtttcctttctcaattgcattgtcatggaatggagactcccagaacaccccccaacaaacccttgtattcccaaaggggaatgcaattcctagcactaaagttcttaccttctttaaatccagtacatttgaagttgatgttttgtatgtcgacccaaacggcttacaaattccacaaaaaataagcacatacacaattggccctttccaaacctccaaaggagagaaggccaaactgaaagtgaaagtgcgtctcaacatccatgggaccgttacagttgattcagcaataatgctggaggatgatgtggaagttccagtttcatctgcaaatgaagctccaaatgatactatgaagatggacacagatgatgcaccaagtgatcctgctgttgcatctgatgtgaatatgcaggagcctaaaagcgctgataccgctgaggctgctcatgcagctgaaaatggaccacaagatactgaggaaaaatctgttccgatggaaactgatgcaaaggttgagccgtcaaaaaagaaagttaagaaaattactgttccggtccatgagttggtctatggggccttggctgcggctgacctgcagaaggctgtagagaaagagtatgagatggctcttcaagacagagtaatggaagaaacaaaggagaagaagaatgctgttgaagcttatgtgtatgacatgcgtaacaagctatatgacaagtacagtgattttgtcacgtctgaggacaaggaaggtttgattgctaagcttcaggaggttgaagactggctctatgaagatggcgaggatgaaactaagggggtttatattgctaagctagaagaacttaaaaaagttggtgatcctattgagctgcgcttcaaggaatgggagattagaagttctgctgttagccaactggtatactgcatcaatagcttcagagaagctgcacagtctaccgaccagaagtttgaacacatagacatgtcagaaaagcgaaaggtcattaatgagtgttcggaagcagagacttggctaatagagaaaaagcagcagcaggatgctctgccaaagcatgctaattcggtactccttgctgctgaccttaagaagaaagctgaaacacttgataggttctgcaagccgatcatgacgaaaccgaagccagctcctaagccgcagactccgcctgtggcagaaaaccaagctcctgagcctcagacaccagagcagcagcaatcaggtggcgaaagcacagccagcgagggagccgcagaggagcctcgagccgagcagatggagacagacaaacctgagggagccacagatccctcggcttagctttgccagtgatcaaacatttgtgtgattgaccctgttcacctgctgttatagtcggtaggggggagtgaactaagcgagaggttcgccacatttgatttgaggatgtgtgttgggacattcaaggtattctgtttcttgtccttgacaagggaggtggttgggtgtttgaaggataagagcagtggggtacactttctcacgtttttgtgccccacacgctcgatatctttattgatgatggtccgtaaaaccaaggtaaatggctattccaaaattttcgtgttttttactgtaacggtctacttaaaattttttttctgcaaaaacatcagtgtctgaacatttagttcgttggttagaccatattcaacagtttacc

SEQ ID NO: 59157 - DNA, 3518 bp, Zea Mays
ctagaagattcccgtctacattggccgaccccgcggcccacaccgtatatcaccgcctcctatccggcctctgcccttctcgccgaacggaaaaccctgcccggaccttcgttgcagcgctacgagcttcgacgggccgctcgatctccacctctgaagtggctgcttgtgatctagatctgaaagctgcagtggttgacagctgagtgtgaaactgtgaatcgaagatgagcgtggtgggcttcgacctcggcaatgagagctgcatcgtggcggtcgcgcggcagcgcggcatcgacgtggtcctcaacgaggagtccaagcgcgagacacccgccatcgtctgcttcggggacaagcagcggttcatcggcaccgccggcgccgcgtcctctaccatgaaccccaagaactccatttctcagatcaagcgcttgctaggccgcaagtactccgaccccgaggtacagagagatctcgcctccttcccgttccgtgtcacggagggccccgatggttttcccctggtccatgtacgatacctgggcgaggaacggacgttcacctctacccagctgcttgccatggtgctgtccaatttgaagggcattgctgagggtaacctgaatgctgcagttgttgattgttgcattggtattccagtctactttacggatctgcagcgcagggctgttcttgatgctgctactattgcgggtctccagccattgcgattgttccatgagacaacagccactgcactggcatatggtatttataagactgatctcccggagaatgaccagttgaacgttgcatttgttgatgtcggtcatgcaagcatgcaggtcagtgttgtcggttacaagaagggacagctcaagatgttgtcgcatacgtatgaccagtctcttggcgggagggactttgatgaggccctgtttaagcactttgcagctaaattcaaagaggaatataagattgatgtgtaccagaatgcgcgtgcatgcattaggttgcgtgtggcatgtgagaaacttaagaaggtactgagcgccaacccagaggccccactgaacattgagtgtttgatggatgagaaggatgtgcggggttttattaaaagggaggagttcgaacagatcagtgcctcggtgctggaacgcgtgaaaggaccactggaaaaggccttggctgaagctgggttgactactgaaaatgtgcactttgttgaggttgttggatctggttctcgtgttccggctataatcaagataataactgatttttttgggaaggagccaagacgaaccatgaatgcaagtgagtgtgttgcgcgaggatgtgctcttcagtgtgctattctcagccccactttcaaagtgcgagaattccaggttaatgatgggtttcctttctcaattgcattgtcatggaatggagactcccagaacaccccccaacaaacccttgtattcccaaaggggaatgcaattcctagcactaaagttcttaccttctttaaatccagtacatttgaagttgatgttttgtatgtcgacccaaacggcttacaaattccacaaaaaataagcacatacacaattggccctttccaaacctccaaaggagagaaggccaaactgaaagtgaaagtgcgtctcaacatccatgggaccgttacagttgattcagcaataatgctggaggatgatgtggaagttccagtttcatctgcaaatgaagctccaaatgatactatgaagatggacacagatgatgcaccaagtgatcctgctgttgcatctgatgtgaatatgcaggagcctaaaagcgctgataccgctgaggctgctcatgcagctgaaaatggaccacaagatactgaggaaaaatctgttccgatggaaactgatgcaaaggttgagccgtcaaaaaagaaagttaagaaaattactgttccggtccatgagttggtctatggggccttggctgcggctgacctgcagaaggctgtagagaaagagtatgagatggctcttcaagacagagtaatggaagaaacaaaggagaagaagaatgctgttgaagcttatgtgtatgacatgcgtaacaagctatatgacaagtacagtgattttgtcacgtctgaggacaaggaaggtttgattgctaagcttcaggaggttgaagactggctctatgaagatggcgaggatgaaactaagggggtttatattgctaagctagaagaacttaaaaaagttggtgatcctattgagctgcgcttcaaggaatgggagattagaagttctgctgttagccaactggtatactgcatcaatagcttcagagaagctgcacagtctaccgaccagaagtttgaacacatagacatgtcagaaaagcgaaaggtcattaatgagtgttcggaagcagagacttggctaatagagaaaaagcagcagcaggatgctctgccaaagcatgctaattcggtactccttgctgctgaccttaagaagaaagctgaaacacttgataggttctgcaagccgatcatgacgaaaccgaagccagctcctaagccgcagactccgcctgtggcagaaaaccaagctcctgagcctcagacaccagagcagcagcaatcaggtggcgaaagcacagccagcgagggagccgcagaggagcctcgagccgagcagatggagacagacaaacctgagggagccacagatccctcggcttagctttgccagtgatcaaacatttgtgtgattgaccctgttcacctgctgttatagtcggtaggggggagtgaactaagcgagaggttcgccacatttgatttgaggatgtgtgttgggacattcaaggtattctgtttcttgtccttgacaagggaggtggttgggtgtttgaaggataagagcagtggggtacactttctcacgtttttgtgccccacacgctcgatatctttattgatgatggtccgtaaaaccaaggtggccgggtggagcttaaacactcatacacagagcacgagagaacaacaagacggttggtgggaattgtagctttttgctatgcatgtcctatccctcattacaggactatgtctgtctgagggtcgaccatggcgcttctccgacgtgtgtcgtgtcgtcttctgctacaattagtcgcgttggtggaccgggtcgtgcgaattacgagttgggctggtcgaagacttcatggcggagtgaaggagacgaaatccttggggtactttcttgctggttacggccgagccatgggcgcagagactaccatgtctggatggcgaatccttcgtcttcgaggatttgttcctcgccggtcttcgctttccgtgccacaatttcggggtcgagatccttgataactacaaggtttagatcattagttgaccctgaacacggtggtgactttgagtaagtttgtgtgggccacgactacttttggcagaggcctatatgttgaggtgttcg

SEQ ID NO: 59158 - DNA, 3037 bp, Zea Mays
agaagattcccgtctacattggccgaccccgcggcccacaccgtatatcaccgcctcctatccggcctctgcccttctcgccgaacggaaaaccctgcccggaccttcgttgcagcgctacgagcttcgacgggccgctcgatctccacctctgaagtggctgcttgtgatctagatctgaaagctgcagtggttgacagctgagtgtgaaactgtgaatcgaagatgagcgtggtgggcttcgacctcggcaatgagagctgcatcgtggcggtcgcgcggcagcgcggcatcgacgtggtcctcaacgaggagtccaagcgcgagacacccgccatcgtctgcttcggggacaagcagcggttcatcggcaccgccggcgccgcgtcctctaccatgaaccccaagaactccatttctcagatcaagcgcttgctaggccgcaagtactccgaccccgaggtacagagagatctcgcctccttcccgttccgtgtcacggagggccccgatggttttcccctggtccatgtacgatacctgggcgaggaacggacgttcacctctacccagctgcttgccatggtgctgtccaatttgaagggcattgctgagggtaacctgaatgctgcagttgttgattgttgcattggtattccagtctactttacggatctgcagcgcagggctgttcttgatgctgctactattgcgggtctccagccattgcgattgttccatgagacaacagccactgcactggcatatggtatttataagactgatctcccggagaatgaccagttgaacgttgcatttgttgatgtcggtcatgcaagcatgcaggtcagtgttgtcggttacaagaagggacagctcaagatgttgtcgcatacgtatgaccagtctcttggcgggagggactttgatgaggccctgtttaagcactttgcagctaaattcaaagaggaatataagattgatgtgtaccagaatgcgcgtgcatgcattaggttgcgtgtggcatgtgagaaacttaagaaggtactgagcgccaacccagaggccccactgaacattgagtgtttgatggatgagaaggatgtgcggggttttattaaaagggaggagttcgaacagatcagtgcctcggtgctggaacgcgtgaaaggaccactggaaaaggccttggctgaagctgggttgactactgaaaatgtgcactttgttgaggttgttggatctggttctcgtgttccggctataatcaagataataactgatttttttgggaaggagccaagacgaaccatgaatgcaagtgagtgtgttgcgcgaggatgtgctcttcagtgtgctattctcagccccactttcaaagtgcgagaattccaggttaatgatgggtttcctttctcaattgcattgtcatggaatggagactcccagaacaccccccaacaaacccttgtattcccaaaggggaatgcaattcctagcactaaaattggccctttccaaacctccaaaggagagaaggccaaactgaaagtgaaagtgcgtctcaacatccatgggaccgttacagttgattcagcaataatgctggaggatgatgtggaagttccagtttcatctgcaaatgaagctccaaatgatactatgaagatggacacagatgatgcaccaagtgatcctgctgttgcatctgatgtgaatatgcaggagcctaaaagcgctgataccgctgaggctgctcatgcagctgaaaatggaccacaagatactgaggaaaaatctgttccgatggaaactgatgcaaaggttgagccgtcaaaaaagaaagttaagaaaattactgttccggtccatgagttggtctatggggccttggctgcggctgacctgcagaaggctgtagagaaagagtatgagatggctcttcaagacagagtaatggaagaaacaaaggagaagaagaatgctgttgaagcttatgtgtatgacatgcgtaacaagctatatgacaagtacagtgattttgtcacgtctgaggacaaggaaggtttgattgctaagcttcaggaggttgaagactggctctatgaagatggcgaggatgaaactaagggggtttatattgctaagctagaagaacttaaaaaagttggtgatcctattgagctgcgcttcaaggaatgggagattagaagttctgctgttagccaactggtatactgcatcaatagcttcagagaagctgcacagtctaccgaccagaagtttgaacacatagacatgtcagaaaagcgaaaggtcattaatgagtgttcggaagcagagacttggctaatagagaaaaagcagcagcaggatgctctgccaaagcatgctaattcggtactccttgctgctgaccttaagaagaaagctgaaacacttgataggttctgcaagccgatcatgacgaaaccgaagccagctcctaagccgcagactccgcctgtggcagaaaaccaagctcctgagcctcagacaccagagcagcagcaatcaggtggcgaaagcacagccagcgagggagccgcagaggagcctcgagccgagcagatggagacagacaaacctgagggagccacagatccctcggcttagctttgccagtgatcaaacatttgtgtgattgaccctgttcacctgctgttatagtcggtaggggggagtgaactaagcgagaggttcgccacatttgatttgaggatgtgtgttgggacattcaaggtattctgtttcttgtccttgacaagggaggtggttgggtgtttgaaggataagagcagtggggtacactttctcacgtttttgtgccccacacgctcgatatctttattgatgatggtccgtaaaaccaaggtaaatggctattccaaaattttcgtgttttttactgtaacggtctacttaaaattttttttctgcaaaaacatcagtgtctgaacatttagttcgttggttagaccatattcaacagtttacc

SEQ ID NO: 59159 - DNA, 3088 bp, Zea Mays
agaagattcccgtctacattggccgaccccgcggcccacaccgtatatcaccgcctcctatccggcctctgcccttctcgccgaacggaaaaccctgcccggaccttcgttgcagcgctacgagcttcgacgggccgctcgatctccacctctgaagtggctgcttgtgatctagatctgaaagctgcagtggttgacagctgagtgtgaaactgtgaatcgaagatgagcgtggtgggcttcgacctcggcaatgagagctgcatcgtggcggtcgcgcggcagcgcggcatcgacgtggtcctcaacgaggagtccaagcgcgagacacccgccatcgtctgcttcggggacaagcagcggttcatcggcaccgccggcgccgcgtcctctaccatgaaccccaagaactccatttctcagatcaagcgcttgctaggccgcaagtactccgaccccgaggtacagagagatctcgcctccttcccgttccgtgtcacggagggccccgatggttttcccctggtccatgtacgatacctgggcgaggaacggacgttcacctctacccagctgcttgccatggtgctgtccaatttgaagggcattgctgagggtaacctgaatgctgcagttgttgattgttgcattggtattccagtctactttacggatctgcagcgcagggctgttcttgatgctgctactattgcgggtctccagccattgcgattgttccatgagacaacagccactgcactggcatatggtatttataagactgatctcccggagaatgaccagttgaacgttgcatttgttgatgtcggtcatgcaagcatgcaggtcagtgttgtcggttacaagaagggacagctcaagatgttgtcgcatacgtatgaccagtctcttggcgggagggactttgatgaggccctgtttaagcactttgcagctaaattcaaagaggaatataagattgatgtgtaccagaatgcgcgtgcatgcattaggttgcgtgtggcatgtgagaaacttaagaaggtactgagcgccaacccagaggccccactgaacattgagtgtttgatggatgagaaggatgtgcggggttttattaaaagggaggagttcgaacagatcagtgcctcggtgctggaacgcgtgaaaggaccactggaaaaggccttggctgaagctgggttgactactgaaaatgtgcactttgttgaggttgttggatctggttctcgtgttccggctataatcaagataataactgatttttttgggaaggagccaagacgaaccatgaatgcaagtgagtgtgttgcgcgaggatgtgctcttcagtgtgctattctcagccccactttcaaagtgcgagaattccaggttaatgatgggtttcctttctcaattgcattgtcatggaatggagactcccagaacaccccccaacaaacccttgtattcccaaaggggaatgcaattcctagcactaaagttcttaccttctttaaatccagtacatttgaagttgatgttttgtatgtcgacccaaacggcttacaaattccacaaaaaataagcacatacacaattggccctttccaaacctccaaaggagagaaggccaaactgaaagtgaaaatgctggaggatgatgtggaagttccagtttcatctgcaaatgaagctccaaatgatactatgaagatggacacagatgatgcaccaagtgatcctgctgttgcatctgatgtgaatatgcaggagcctaaaagcgctgataccgctgaggctgctcatgcagctgaaaatggaccacaagatactgaggaaaaatctgttccgatggaaactgatgcaaaggttgagccgtcaaaaaagaaagttaagaaaattactgttccggtccatgagttggtctatggggccttggctgcggctgacctgcagaaggctgtagagaaagagtatgagatggctcttcaagacagagtaatggaagaaacaaaggagaagaagaatgctgttgaagcttatgtgtatgacatgcgtaacaagctatatgacaagtacagtgattttgtcacgtctgaggacaaggaaggtttgattgctaagcttcaggaggttgaagactggctctatgaagatggcgaggatgaaactaagggggtttatattgctaagctagaagaacttaaaaaagttggtgatcctattgagctgcgcttcaaggaatgggagattagaagttctgctgttagccaactggtatactgcatcaatagcttcagagaagctgcacagtctaccgaccagaagtttgaacacatagacatgtcagaaaagcgaaaggtcattaatgagtgttcggaagcagagacttggctaatagagaaaaagcagcagcaggatgctctgccaaagcatgctaattcggtactccttgctgctgaccttaagaagaaagctgaaacacttgataggttctgcaagccgatcatgacgaaaccgaagccagctcctaagccgcagactccgcctgtggcagaaaaccaagctcctgagcctcagacaccagagcagcagcaatcaggtggcgaaagcacagccagcgagggagccgcagaggagcctcgagccgagcagatggagacagacaaacctgagggagccacagatccctcggcttagctttgccagtgatcaaacatttgtgtgattgaccctgttcacctgctgttatagtcggtaggggggagtgaactaagcgagaggttcgccacatttgatttgaggatgtgtgttgggacattcaaggtattctgtttcttgtccttgacaagggaggtggttgggtgtttgaaggataagagcagtggggtacactttctcacgtttttgtgccccacacgctcgatatctttattgatgatggtccgtaaaaccaaggtaaatggctattccaaaattttcgtgttttttactgtaacggtctacttaaaattttttttctgcaaaaacatcagtgtctgaacatttagttcgttggttagaccatattcaacagtttacc

SEQ ID NO: 59160 - DNA, 1895 bp, Zea Mays
agaagattcccgtctacattggccgaccccgcggcccacaccgtatatcaccgcctcctatccggcctctgcccttctcgccgaacggaaaaccctgcccggaccttcgttgcagcgctacgagcttcgacgggccgctcgatctccacctctgaaggttaatgatgggtttcctttctcaattgcattgtcatggaatggagactcccagaacaccccccaacaaacccttgtattcccaaaggggaatgcaattcctagcactaaagttcttaccttctttaaatccagtacatttgaagttgatgttttgtatgtcgacccaaacggcttacaaattccacaaaaaataagcacatacacaattggccctttccaaacctccaaaggagagaaggccaaactgaaagtgaaagtgcgtctcaacatccatgggaccgttacagttgattcagcaataatgctggaggatgatgtggaagttccagtttcatctgcaaatgaagctccaaatgatactatgaagatggacacagatgatgcaccaagtgatcctgctgttgcatctgatgtgaatatgcaggagcctaaaagcgctgataccgctgaggctgctcatgcagctgaaaatggaccacaagatactgaggaaaaatctgttccgatggaaactgatgcaaaggttgagccgtcaaaaaagaaagttaagaaaattactgttccggtccatgagttggtctatggggccttggctgcggctgacctgcagaaggctgtagagaaagagtatgagatggctcttcaagacagagtaatggaagaaacaaaggagaagaagaatgctgttgaagcttatgtgtatgacatgcgtaacaagctatatgacaagtacagtgattttgtcacgtctgaggacaaggaaggtttgattgctaagcttcaggaggttgaagactggctctatgaagatggcgaggatgaaactaagggggtttatattgctaagctagaagaacttaaaaaagttggtgatcctattgagctgcgcttcaaggaatgggagattagaagttctgctgttagccaactggtatactgcatcaatagcttcagagaagctgcacagtctaccgaccagaagtttgaacacatagacatgtcagaaaagcgaaaggtcattaatgagtgttcggaagcagagacttggctaatagagaaaaagcagcagcaggatgctctgccaaagcatgctaattcggtactccttgctgctgaccttaagaagaaagctgaaacacttgataggttctgcaagccgatcatgacgaaaccgaagccagctcctaagccgcagactccgcctgtggcagaaaaccaagctcctgagcctcagacaccagagcagcagcaatcaggtggcgaaagcacagccagcgagggagccgcagaggagcctcgagccgagcagatggagacagacaaacctgagggagccacagatccctcggcttagctttgccagtgatcaaacatttgtgtgattgaccctgttcacctgctgttatagtcggtaggggggagtgaactaagcgagaggttcgccacatttgatttgaggatgtgtgttgggacattcaaggtattctgtttcttgtccttgacaagggaggtggttgggtgtttgaaggataagagcagtggggtacactttctcacgtttttgtgccccacacgctcgatatctttattgatgatggtccgtaaaaccaaggtaaatggctattccaaaattttcgtgttttttactgtaacggtctacttaaaattttttttctgcaaaaacatcagtgtctgaacatttagttcgttggttagaccatattcaacagtttacc

SEQ ID NO: 59161 - DNA, 3008 bp, Zea Mays
gttcagctgggacggcgggtttgtagtcaccgtggctgcttgtgatctagatctgaaagctgcagtggttgacagctgagtgtgaaactgtgaatcgaagatgagcgtggtgggcttcgacctcggcaatgagagctgcatcgtggcggtcgcgcggcagcgcggcatcgacgtggtcctcaacgaggagtccaagcgcgagacacccgccatcgtctgcttcggggacaagcagcggttcatcggcaccgccggcgccgcgtcctctaccatgaaccccaagaactccatttctcagatcaagcgcttgctaggccgcaagtactccgaccccgaggtacagagagatctcgcctccttcccgttccgtgtcacggagggccccgatggttttcccctggtccatgtacgatacctgggcgaggaacggacgttcacctctacccagctgcttgccatggtgctgtccaatttgaagggcattgctgagggtaacctgaatgctgcagttgttgattgttgcattggtattccagtctactttacggatctgcagcgcagggctgttcttgatgctgctactattgcgggtctccagccattgcgattgttccatgagacaacagccactgcactggcatatggtatttataagactgatctcccggagaatgaccagttgaacgttgcatttgttgatgtcggtcatgcaagcatgcaggtcagtgttgtcggttacaagaagggacagctcaagatgttgtcgcatacgtatgaccagtctcttggcgggagggactttgatgaggccctgtttaagcactttgcagctaaattcaaagaggaatataagattgatgtgtaccagaatgcgcgtgcatgcattaggttgcgtgtggcatgtgagaaacttaagaaggtactgagcgccaacccagaggccccactgaacattgagtgtttgatggatgagaaggatgtgcggggttttattaaaagggaggagttcgaacagatcagtgcctcggtgctggaacgcgtgaaaggaccactggaaaaggccttggctgaagctgggttgactactgaaaatgtgcactttgttgaggttgttggatctggttctcgtgttccggctataatcaagataataactgatttttttgggaaggagccaagacgaaccatgaatgcaagtgagtgtgttgcgcgaggatgtgctcttcagtgtgctattctcagccccactttcaaagtgcgagaattccaggttaatgatgggtttcctttctcaattgcattgtcatggaatggagactcccagaacaccccccaacaaacccttgtattcccaaaggggaatgcaattcctagcactaaagttcttaccttctttaaatccagtacatttgaagttgatgttttgtatgtcgacccaaacggcttacaaattccacaaaaaataagcacatacacaattggccctttccaaacctccaaaggagagaaggccaaactgaaagtgaaagtgcgtctcaacatccatgggaccgttacagttgattcagcaataatgctggaggatgatgtggaagttccagtttcatctgcaaatgaagctccaaatgatactatgaagatggacacagatgatgcaccaagtgatcctgctgttgcatctgatgtgaatatgcaggagcctaaaagcgctgataccgctgaggctgctcatgcagctgaaaatggaccacaagatactgaggaaaaatctgttccgatggaaactgatgcaaaggttgagccgtcaaaaaagaaagttaagaaaattactgttccggtccatgagttggtctatggggccttggctgcggctgacctgcagaaggctgtagagaaagagtatgagatggctcttcaagacagagtaatggaagaaacaaaggagaagaagaatgctgttgaagcttatgtgtatgacatgcgtaacaagctatatgacaagtacagtgattttgtcacgtctgaggacaaggaaggtttgattgctaagcttcaggaggttgaagactggctctatgaagatggcgaggatgaaactaagggggtttatattgctaagctagaagaacttaaaaaagttggtgatcctattgagctgcgcttcaaggaatgggagattagaagttctgctgttagccaactggtatactgcatcaatagcttcagagaagctgcacagtctaccgaccagaagtttgaacacatagacatgtcagaaaagcgaaaggtcattaatgagtgttcggaagcagagacttggctaatagagaaaaagcagcagcaggatgctctgccaaagcatgctaattcggtactccttgctgctgaccttaagaagaaagctgaaacacttgataggttctgcaagccgatcatgacgaaaccgaagccagctcctaagccgcagactccgcctgtggcagaaaaccaagctcctgagcctcagacaccagagcagcagcaatcaggtggcgaaagcacagccagcgagggagccgcagaggagcctcgagccgagcagatggagacagacaaacctgagggagccacagatccctcggcttagctttgccagtgatcaaacatttgtgtgattgaccctgttcacctgctgttatagtcggtaggggggagtgaactaagcgagaggttcgccacatttgatttgaggatgtgtgttgggacattcaaggtattctgtttcttgtccttgacaagggaggtggttgggtgtttgaaggataagagcagtggggtacactttctcacgtttttgtgccccacacgctcgatatctttattgatgatggtccgtaaaaccaaggtaaatggctattccaaaattttcgtgttttttactgtaacggtctacttaaaattttttttctgcaaaaacatcagtgtctgaacatttagttcgttggttagaccatattcaacagtttacc

SEQ ID NO: 59162 - DNA, 1163 bp, Zea Mays
aacatgccctaagagggtttgggcctccagtccgtatatatatgctggcggttctgatcgcttccaggtccacacctctcttgcctctcccacgcccacgccaccccaccgcacgaagagagcgagcgcacgaacgggggagacatggcccactcgccgtcaggatcgcacgtagcggcgacgtcggtcgggaacgaggccttcaccgacgcggtggctgaggacggcggagactccaagctctccgcgctcctcttcgcgattgttcggcctagattggtggttgctgatgcagaatttccaagttcgtgcttccttcgaggaatatttgatgctggtgtgcggggattgagtcccccgctggtgtccgttgcctggtttcagtgtgtgctcagaatcgcgaccaatttggtccacatccatccgattcttctcgacgtgtcgcagcaggtgcaggacggtctccagagcatgctcaagacgagcagcgagatcgcgcggtgcgacggcgagatcgacgcggagctggagcgcgcgagggatgccgtggcggagaatgcccgagcgctgcacgacgaacgggagagagtccagaaggccgccctcgccgcgctcgacatcctcagcggcggccgttgcgtcatctgaagggatgcccgccgcatgccggcgccaccgacagtctgcccccgacctcagatcacgctcgattctcgcaagattcctgctccatttgtgaatgtcaccgtcggtgttacccttttgcagtagtagtaatattcgcactgatgctggcattactagtaacttgttgcctgttgaactgcaataatagagtttagaatttgagatgtgcacgatatgatcgatggagattggtctggactagtgcagaaatgacccataaatggtgacgttgagggtgtttaaggaactaaaactgttgattaagggtctgtttgattatagaagctaaagtaaaagtggctaaagcttagttagggtttgtttgacagagctctgacttgcttaaaaacaactctagctctagcttttttatagagctatagttatttcgtaaatcgtttggcagaaacgtcttattctagagctagaacaattttcctgtattaaagtgtcagagccggtgaacctactatttg

SEQ ID NO: 59163 - DNA, 766 bp, Zea Mays
cgaccacaccccccgcggttcgcttctgcagtttgcttgacgtgtcgcagcaggtgcaggacggtctccagagcatgctcaagacgagcagcgagatcgcgcggtgcgacggcgagatcgacgcggagctggagcgcgcgagggatgccgtggcggagaatgcccgagcgctgcacgacgaacgggagagagtccagaaggccgccctcgccgcgctcgacatcctcagcggcggccgttgcgtcatctgaagggatgcccgccgcatgccggcgccaccgacagtctgcccccgacctcagatcacgctcgattctcgcaagattcctgctccatttgtgaatgtcaccgtcggtgttacccttttgcagtagtagtaatattcgcactgatgctggcattactagtaacttgttgcctgttgaactgcaataatagagtttagaatttgagatgtgcacgatatgatcgatggagattggtctggactagtgcagaaatgacccataaatggtgacgttgagggtgtttaaggaactaaaactgttgattaagggtctgtttgattatagaagctaaagtaaaagtggctaaagcttagttagggtttgtttgacagagctctgacttgcttaaaaacaactctagctctagcttttttatagagctatagttatttcgtaaatcgtttggcagaaacgtcttattctagagctagaacaattttcctgtattaaagtgtcagagccggtgaacctactatttg

SEQ ID NO: 59164 - DNA, 768 bp, Zea Mays
tgaaaatggggctctattactctatctgcagtcgaagtcagacgtgtcgcagcaggtgcaggacggtctccagagcatgctcaagacgagcagcgagatcgcgcggtgcgacggcgagatcgacgcggagctggagcgcgcgagggatgccgtggcggagaatgcccgagcgctgcacgacgaacgggagagagtccagaaggccgccctcgccgcgctcgacatcctcagcggcggccgttgcgtcatctgaagggatgcccgccgcatgccggcgccaccgacagtctgcccccgacctcagatcacgctcgattctcgcaagattcctgctccatttgtgaatgtcaccgtcggtgttacccttttgcagtagtagtaatattcgcactgatgctggcattactagtaacttgttgcctgttgaactgcaataatagagtttagaatttgagatgtgcacgatatgatcgatggagattggtctggactagtgcagaaatgacccataaatggtgacgttgagggtgtttaaggaactaaaactgttgattaagggtctgtttgattatagaagctaaagtaaaagtggctaaagcttagttagggtttgtttgacagagctctgacttgcttaaaaacaactctagctctagcttttttatagagctatagttatttcgtaaatcgtttggcagaaacgtcttattctagagctagaacaattttcctgtattaaagtgtcagagccggtgaacctactatttg

SEQ ID NO: 59165 - DNA, 884 bp, Zea Mays
acggaccgggcgggaaggggaggagagtttcccgcgctcagacggcggccaccccatttccatcccccaaatcctaatctaggggtcttcggcccgtgaatcaccgtacctcatggcccccaagcgacgtcgcgcggatcagggctcgtcggtgcctgcgccacctcctcctttgcggaaagcaaaacttcagccggttgtcatcttcgcccacggcgccggtgccccttcctcctccgactggatggtccaatatgtcgggtgggaagcgcagggcgccgccaaaggcagagaagcttgttgatcaccacctgggcatcgtgaaggatgctgctgtcaagtatcaggggcaccctcttattttgatggggaagtccatgggatcgagaaatgatagtttgttggaagaaactcttttggacatcatctataaactaaaagggggtgaagacacaccagtgtatacgaataaaggagtgaatggagcagtgagagatgagacactcttacagctgaaggtaccaacgatgtttgttcagggaagtaaagatgccctgtgccccttagataaacttctgtctactcaaaagaagatgacctgcaagaatgaactgcatatcattgatggcggtgatcactcttttaaggtcggcaaaaagtacctagaatctaaagggttaaatcaatatgatcttgaaatggaagctgtcacaaaaatttcacagtttttccaggattccttcactgagagttgtacctagccgttctgtatattttccttaacaccttcatggtgactaaacctaatctctgtcttcgaacaagattaatatgttagtgtaatattttggtgtaagatgctagttctgattgacagtctgcac

SEQ ID NO: 59166 - DNA, 1529 bp, Zea Mays
acggaccgggcgggaaggggaggagagtttcccgcgctcagacggcggccaccccatttccatcccccaaatcctaatctaggggtcttcggcccgtgaatcaccgtacctcatggcccccaagcgacgtcgcgcggatcagggctcgtcggtgcctgcgccacctcctcctttgcggaaagcaaaacttcagccggttgtcatcttcgcccacggcgccggtgccccttcctcctccgactggatggtccattggaagaagatggtgcaggacgcattagatgctgtagccgtggtgacctttgactacccatatatgtcgggtgggaagcgcagggcgccgccaaaggcagagaagcttgttgatcaccacctgggcatcgtgaaggatgctgctgtcaagtatcaggggcaccctcttattttgatggggaagtccatgggatcgagaaatgatagtttgttggaagaaactcttttggacatcatctataaactaaaagggggtgaagacacaccagtgtatacgaataaagtaaaaaatcctaactcttcaagagattaaaccaaccaaaaagttcatcaatttaaaatcactgtatcaaagttcactgtgaatagataaccccgggttgggagagggattagcattgtataggccagcaactggcatctattcacagtgatcgattatggatggggccaaccaaacacgaaggaacgctgtccggtggcgccgtgaaatgatggagggttaaaaaggtcgaaccaaacagcaccttagtctgatgtccttattagaaatgggtttatatttggtctacttttgttagaacaaaaaaatagtttctctgactttgaagtaatttttttgagttcacttttaatactgatcctttgctccaagcacattctttgagatgagactacaaatatccttgtccctcactgaacaagcacgtttctgctcctacctgtcatggtagtctgaccttgatcatgtggattgctatccacactcctaccagtaggctaccaccaaaaacctgtactgatcacaatcaaattataattggaagaatcatattttccatctcattgtgctttgttctacttagggagtgaatggagcagtgagagatgagacactcttacagctgaaggtaccaacgatgtttgttcagggaagtaaagatgccctgtgccccttagataaacttctgtctactcaaaagaagatgacctgcaagaatgaactgcatatcattgatggcggtgatcactcttttaaggtcggcaaaaagtacctagaatctaaagggttaaatcaatatgatcttgaaatggaagctgtcacaaaaatttcacagtttttccaggattccttcactgagagttgtacctagccgttctgtatattttccttaacaccttcatggtgactaaacctaatctctgtcttcgaacaagattaatatgttagtgtaatattttggtgtaagatgctagttctgattgacagtctgcac

SEQ ID NO: 59167 - DNA, 936 bp, Zea Mays
acggaccgggcgggaaggggaggagagtttcccgcgctcagacggcggccaccccatttccatcccccaaatcctaatctaggggtcttcggcccgtgaatcaccgtacctcatggcccccaagcgacgtcgcgcggatcagggctcgtcggtgcctgcgccacctcctcctttgcggaaagcaaaacttcagccggttgtcatcttcgcccacggcgccggtgccccttcctcctccgactggatggtccattggaagaagatggtgcaggacgcattagatgctgtagccgtggtgacctttgactacccatatatgtcgggtgggaagcgcagggcgccgccaaaggcagagaagcttgttgatcaccacctgggcatcgtgaaggatgctgctgtcaagtatcaggggcaccctcttattttgatggggaagtccatgggatcgagaaatgatagtttgttggaagaaactcttttggacatcatctataaactaaaagggggtgaagacacaccagtgtatacgaataaaggagtgaatggagcagtgagagatgagacactcttacagctgaaggtaccaacgatgtttgttcagatgccctgtgccccttagataaacttctgtctactcaaaagaagatgacctgcaagaatgaactgcatatcattgatggcggtgatcactcttttaaggtcggcaaaaagtacctagaatctaaagggttaaatcaatatgatcttgaaatggaagctgtcacaaaaatttcacagtttttccaggattccttcactgagagttgtacctagccgttctgtatattttccttaacaccttcatggtgactaaacctaatctctgtcttcgaacaagattaatatgttagtgtaatattttggtgtaagatgctagttctgattgacagtctgcac

SEQ ID NO: 59168 - DNA, 591 bp, Zea Mays
cttgaaatgaaaaaccctagagacttcacgcagccattcttcacgcacgcggccgccgcgctgggcagcgactggtccgccacccacgccgaggtcgcccggcgctcgcggagttctgcgacaacgcggcaaggccggcctgcggcaggaggccgtggtcgcggacgccgtcccgcggctggtgtggatgctggaggccaagcccgcgggcgagcgcgacgccacaccaactgcttctgttctctgtcccaaacaagccagggcccaacgtatgcttctgtctggttcagctatttactttaaatctagagctagcagctgccctacttttcaatcttacatgattgtgctctgaaaattgaacccaggggtgagtggtggggtttgatgaatacaactcccaggtggatgtcgccgtgtccggtgaaatagccgcatctgtaaagcatatagacccaggcacagacagtgatgccgggattgggaattgggattaagtagcgccgtggccgctccggcccaaagtgtatcgaagtgtatgcgctgattggttgtctacctctgttgtgagtttgttcctgcaagctggct

SEQ ID NO: 59169 - DNA, 4564 bp, Zea Mays
ctgccgcgggctgcggcgccccacgccacgcggcgttcggcccttgcgcgcgacctgcgccagccaggcgggagatagagagagagagccgctgagctgaggacgtccaaccgccagtggctctgtctgacttgactcaagatgccgtgggcgtcgccgttgaattgcatggccaggaacatagagacgggtttcgctttgcttcggtttggggctcggctcgttcgctggctgctacagttgatttgaggctccaaccctccctttttagctactcactctgtcatgactcatgactcagcactcggcaaatatctcaactttgcattgcatcctactacagcaccggagagcagaatcaggctactccgtcagccgcgtcagggtgtggtaatagtagtacatcatacacacctctccgagactccgaccactcccttcccatgcctatataaacagaggccacctccttcgtccctcccgcccccatcaagattccgacccaaatccctctccgagctcgaccaaaaaccaccctcccagtacgtacattcccaccacctcccagtgcagcgccagtctgtaacccataaccataaccataccatggtggtcctcaccaagggcgagctggagcagatcgcgctgccggccgtgcagcgcgcatcgccgccgccgccggccgccgtgccggaggtcgacctggcagccggggacgccgccgccgccgcgcgcgcggtggccaaggcgtgcgaggaccacggcttcttcaaggtgacgggccacggcgtgccgccgcacctcctggcgcgcctcgaggccgccgcggccgcgttcttcgcgctcccgcagcgggagaaggacagggccgccggctgcccgttcggatacgccagcaagcggattggcgccaacggcgatctcggctgggtcgagtacctcctgcttgccgtcaccgccgccggcgcagcggccgcgccggggtctgcgtgcgagggcgcggagccgtcctgtttccggtgagtccgtcacccggcccgttactttacttggtagtagaatcaaattctgcgctggccactatttcttttactgggtattacttacccaaacccgtacccgcgaagaaaaaatacgcccgctaaaaaacccatacccgtgacgggtataaaattttgcccaaacccatacccatgcgggtttcgggtacccaacgggtttcccatacccactaacatcaacataaaaaataattcatcatgtaaatgacaatcaatacattaataagctagcataaaagaaacaagtgataactaattttagcctaaaattttttacatgaagtttatttcaattagaacatattcaattaataatattatgagacatatttataagtaatgttgattttaaggcgggttttaaaaccccatgggtttgcgggtatgggtagtggaagaacaaacccatgcccacgtacccgttgggtttccatttgaacccattaacaaacccatgggtagagaaattgacccaaacccataccctaatagagcaaaaacccaccgggtttcgggtagcgggtacccattgccatctctacgctggccactatttctttagtgtttcagcggctgttataatcgcatcatttacccatgttttcgtatacatacatacatgggcactgggcactatatatttctttacgtcatgatgacctttatgaatagaaaaaaaaaatgccgcaagggggcaatagaaaaacgagcaatctaaaacttttttttatcacattgtgggatacaacattcggcaaatatgaatgattgtcagaaatttctataagttcagtagttcaaacaagcggattccatacatcagtctcatcttcttcttccgtataaatcccaacatatctgggctcgcccacatagcggttgaggtctcgtgttcaccggaatggcctctctccgtgggctcctttgggaacaaggagagacaaaccccaaacccaagaagacaaacccatagaggaaaaacacatataaataactaaatatcttatttaaatggcatcttaagattaatactatctccaacaaaaactctaaaaccgagtcctaaaacttgaaataagaccgtgtttagaatgttgtttgattccaaacaccattagctaataaatagaaacttgactccatctatgcaatgccctatataaactctaaaatcgtgagaaactctaaaatttatgcaaggccctatttagaaccttcagagctaatatactagctactcaaaattagttgttggattccaaacaccccattagctaattgttagtgtggtcccaacagagcctaagactagctaaccatgtgcatggaaacgagcttgtgaaatgcccggaaacagagtttacttgcataataaacatagagctgacaatgcaacaccgtctcgtcgcgcccgatgcaatgcacctcggcggtcatcacgtggacatggctcctgtcctgcccccggccggcagatcgaccgcaggcgtacgtgtcagctcgtcctgctgcctccatggtcatcccctgcctttgcttagtcactgttcttatccaagttttatgatacggaatacaaatttatggcacggaatagatataatgtgaaaatatatttaatggagaatttaatagtatgtatttgatattgtaaatattattacttcatttcataaatttgatcaaatttaaaaacattttgactaagaatgttggaatgacttgtgttttcggactgaaccttgaaatgacttatattttatattttagtacgtacagagagagtatataactttgagctggccgaccagattttgcattgtagatgagtactaggcaactactactaggagagtagaattagcgtcacgtgcggtttgcgcgtcggagtcatgggcgcacgtgcgcagctgcccctgctcgatgagtctgatgacgagagcctatttcctgcatcctccgccgtgcgtagcacctgctaaacgtggcaaggaaacgtcgagctcatggtgcccgctgaatttgtgctgtactagtgctgtgctggacgagtacgtggcggcggtgaggcgcatgacctgcacggtgctgcagctgatggcgcaggggctgggcctcgacgacagggacgtgttcagccggctggtgctggaccgggacagcgactccatgctgagggtgaaccactacccgccagcggcggagacgaggcggctgacggggttcggcgagcacaccgacccgcagatcatctccgtcctccgctccaacgacgcgtccggcctcgagatcacgctgcgggacggcacctgggtgtccgtgccctccgacacggaatccttcttcgtcaatgtcggcgacgcgttgcaggtgctgaccaacgggcggttccggagcgtgcggcaccgggtgatggtgagcagcgcgcggccgcgggtgtcggtgatcttcttcggcggcccgccgccgcgggagcgcctggcgccgctgccgggtctggtggaccgggagggcggccgacgccgctacagggagttcacgtggagggagtacaagaactcggcgtaccggaccaagctggcagacaacaggctctgctccttcgagaccatggcgacgagctagctaagccgccgcgctgacgccggacacggctcatcgccctcccttctcgatgtgtagtgtagcaagagacgtttttttgtgccatatagttttctgtttatacacgataaggctggtctcaacttcgtttcatggatttgtatctatcgtcgcaccacatcagttattcatccttctcgctagctacatcagtttttttctataaacttttagacttttagttaatatatgaaacatgccgttctatggaaaaaaatacatatgactacataattaaacaaataaaattacataatttataataataattacataacttaaacataaaataaaaagtatattatttataaaaataatcgaattactacgatgtagattttaaatatattctattagattattttggagtcgactgtggactgaaatagaaggatggctgtaaaaatgcttatgggtgttttagaattagtgttaggtgttgcaacaaaaaaacctaactactatcaaatagccgtacaataaaataaataatcaaaagtaacaatataaaatgcggaagtttaattgagataaataaattcccattggcgcttagatccatggggttaagaaagatttttaggattccatcaagaaaaaacaagggatcttattctcaaactttgatgatctcacaatccaacatgtactggataactatgtgcccaattcacagttcagatccatgatacatgattacgaattaggaaaacatgaatcaagccatgttatagtttctgatgattccgactttaagatatattagtgtctgattttaagatatattgatagcgtgaattttacataaacctaacacgagtattacataacaagtcatt

SEQ ID NO: 59170 - DNA, 2632 bp, Zea Mays
cgggttttaaaaccccatgggtttgcgggtatgggtagtggaagaacaaacccatgcccacgtacccgttgggtttccatttgaacccattaacaaacccatgggtagagaaattgacccaaacccataccctaatagagcaaaaacccaccgggtttcgggtagcgggtacccattgccatctctacgctggccactatttctttagtgtttcagcggctgttataatcgcatcatttacccatgttttcgtatacatacatacatgggcactgggcactatatatttctttacgtcatgatgacctttatgaatagaaaaaaaaaatgccgcaagggggcaatagaaaaacgagcaatctaaaacttttttttatcacattgtgggatacaacattcggcaaatatgaatgattgtcagaaatttctataagttcagtagttcaaacaagcggattccatacatcagtctcatcttcttcttccgtataaatcccaacatatctgggctcgcccacatagcggttgaggtctcgtgttcaccggaatggcctctctccgtgggctcctttgggaacaaggagagacaaaccccaaacccaagaagacaaacccatagaggaaaaacacatataaataactaaatatcttatttaaatggcatcttaagattaatactatctccaacaaaaactctaaaaccgagtcctaaaacttgaaataagaccgtgtttagaatgttgtttgattccaaacaccattagctaataaatagaaacttgactccatctatgcaatgccctatataaactctaaaatcgtgagaaactctaaaatttatgcaaggccctatttagaaccttcagagctaatatactagctactcaaaattagttgttggattccaaacaccccattagctaattgttagtgtggtcccaacagagcctaagactagctaaccatgtgcatggaaacgagcttgtgaaatgcccggaaacagagtttacttgcataataaacatagagctgacaatgcaacaccgtctcgtcgcgcccgatgcaatgcacctcggcggtcatcacgtggacatggctcctgtcctgcccccggccggcagatcgaccgcaggcgtacgtgtcagctcgtcctgctgcctccatgtgctgtgctggacgagtacgtggcggcggtgaggcgcatgacctgcacggtgctgcagctgatggcgcaggggctgggcctcgacgacagggacgtgttcagccggctggtgctggaccgggacagcgactccatgctgagggtgaaccactacccgccagcggcggagacgaggcggctgacggggttcggcgagcacaccgacccgcagatcatctccgtcctccgctccaacgacgcgtccggcctcgagatcacgctgcgggacggcacctgggtgtccgtgccctccgacacggaatccttcttcgtcaatgtcggcgacgcgttgcaggtgctgaccaacgggcggttccggagcgtgcggcaccgggtgatggtgagcagcgcgcggccgcgggtgtcggtgatcttcttcggcggcccgccgccgcgggagcgcctggcgccgctgccgggtctggtggaccgggagggcggccgacgccgctacagggagttcacgtggagggagtacaagaactcggcgtaccggaccaagctggcagacaacaggctctgctccttcgagaccatggcgacgagctagctaagccgccgcgctgacgccggacacggctcatcgccctcccttctcgatgtgtagtgtagcaagagacgtttttttgtgccatatagttttctgtttatacacgataaggctggtctcaacttcgtttcatggatttgtatctatcgtcgcaccacatcagttattcatccttctcgctagctacatcagtttttttctataaacttttagacttttagttaatatatgaaacatgccgttctatggaaaaaaatacatatgactacataattaaacaaataaaattacataatttataataataattacataacttaaacataaaataaaaagtatattatttataaaaataatcgaattactacgatgtagattttaaatatattctattagattattttggagtcgactgtggactgaaatagaaggatggctgtaaaaatgcttatgggtgttttagaattagtgttaggtgttgcaacaaaaaaacctaactactatcaaatagccgtacaataaaataaataatcaaaagtaacaatataaaatgcggaagtttaattgagataaataaattcccattggcgcttagatccatggggttaagaaagatttttaggattccatcaagaaaaaacaagggatcttattctcaaactttgatgatctcacaatccaacatgtactggataactatgtgcccaattcacagttcagatccatgatacatgattacgaattaggaaaacatgaatcaagccatgttatagtttctgatgattccgactttaagatatattagtgtctgattttaagatatattgatagcgtgaattttacataaacctaacacgagtattacataacaagtcatt

SEQ ID NO: 59171 - DNA, 673 bp, Zea Mays
gcaatctgctatgcagagggcatgccaactaatgaggctttcttgaaaaggtcacaagctcacacttgtttggctctatagcacttcttgcgaaaagtgggaatctttctctaactgaattaatgttagaatggagccgaacaagtttatgtttttatgcgacttcaagagttgacaaaggtttaagttctgagctccagaatcagaattggagagttctttctgtagctaatgaatgtagcatagaggttcctgtgttttaaatgttcaaaggcttcagcagttgcttctcaccttggctactctaataaaaaagggaactatgtgactcatctgttctggtgattggatatataatgaaaaatattctgtgaggaagacttcgcaaggagatgtggttctgtcacttatgtgactgttgccgtgtatggagacgaggacaagccagcgcttataatgtttacagagatgtggttctgtgactgttgtcgtgtactcaggctttatttcaacaggatttaaatatgagatgtagagtgattgatgtacatcacttcactaatcatgaaatctgtagaaggcgaaactactagccatatatgatatgcataatctgtgtggtaaacattatcaatatcacacaaattatttttaatgggttttgcattatcat

SEQ ID NO: 59172 - DNA, 726 bp, Zea Mays
caatctgctatgcagagggcatgccaactaatgagaatggcatcatgttaacaaaaatgaatgagaaatcagtcatttctaatggaaaggctttcttgaaaaggtcacaagctcacacttgtttggctctatagcacttcttgcgaaaagtgggaatctttctctaactgaattaatgttagaatggagccgaacaagtttatgtttttatgcgacttcaagagttgacaaaggtttaagttctgagctccagaatcagaattggagagttctttctgtagctaatgaatgtagcatagaggttcctgtgttttaaatgttcaaaggcttcagcagttgcttctcaccttggctactctaataaaaaagggaactatgtgactcatctgttctggtgattggatatataatgaaaaatattctgtgaggaagacttcgcaaggagatgtggttctgtcacttatgtgactgttgccgtgtatggagacgaggacaagccagcgcttataatgtttacagagatgtggttctgtgactgttgtcgtgtactcaggctttatttcaacaggatttaaatatgagatgtagagtgattgatgtacatcacttcactaatcatgaaatctgtagaaggcgaaactactagccatatatgatatgcataatctgtgtggtaaacattatcaatatcacacaaattatttttaatgggttttgcattatcat

SEQ ID NO: 59173 - DNA, 708 bp, Zea Mays
gccaactaatgagaatggcatcatgttaacaaaaatgaatgagaaatcagtcatttctaatggaaagtcaggctttcttgaaaaggtcacaagctcacacttgtttggctctatagcacttcttgcgaaaagtgggaatctttctctaactgaattaatgttagaatggagccgaacaagtttatgtttttatgcgacttcaagagttgacaaaggtttaagttctgagctccagaatcagaattggagagttctttctgtagctaatgaatgtagcatagaggttcctgtgttttaaatgttcaaaggcttcagcagttgcttctcaccttggctactctaataaaaaagggaactatgtgactcatctgttctggtgattggatatataatgaaaaatattctgtgaggaagacttcgcaaggagatgtggttctgtcacttatgtgactgttgccgtgtatggagacgaggacaagccagcgcttataatgtttacagagatgtggttctgtgactgttgtcgtgtactcaggctttatttcaacaggatttaaatatgagatgtagagtgattgatgtacatcacttcactaatcatgaaatctgtagaaggcgaaactactagccatatatgatatgcataatctgtgtggtaaacattatcaatatcacacaaattatttttaatgggttttgcattatcat

SEQ ID NO: 59174 - DNA, 619 bp, Zea Mays
cttatcatgccatcttcaaagaatggcatcatgttaacaaaaatgaatgagaaatcagtcatttctaatggaaagaatggagccgaacaagtttatgtttttatgcgacttcaagagttgacaaaggtttaagttctgagctccagaatcagaattggagagttctttctgtagctaatgaatgtagcatagaggttcctgtgttttaaatgttcaaaggcttcagcagttgcttctcaccttggctactctaataaaaaagggaactatgtgactcatctgttctggtgattggatatataatgaaaaatattctgtgaggaagacttcgcaaggagatgtggttctgtcacttatgtgactgttgccgtgtatggagacgaggacaagccagcgcttataatgtttacagagatgtggttctgtgactgttgtcgtgtactcaggctttatttcaacaggatttaaatatgagatgtagagtgattgatgtacatcacttcactaatcatgaaatctgtagaaggcgaaactactagccatatatgatatgcataatctgtgtggtaaacattatcaatatcacacaaattatttttaatgggttttgcattatcat

SEQ ID NO: 59175 - DNA, 1395 bp, Zea Mays
ctgctttgttaactcaaatatcatgaatctgtagggaccatagcagtggtgaataaaactttggatctatagaacgataaaggaactaaggtgctgtttggtttatatgtttgtaatgtaataggtaacaaataacgttaaatcatgtttgtttaagtccaactgtaattggataccacactacaaattgataccagcctattcaaacttgttacccctggtaatcgaatgcaaatcattaccgttaccatttacgttacattttaggaaccaaacggcacctaatttaagtcgtgagttcgaagctcatccctttcctagaccccactcgtgtgagagcctccagcactggatcagcccttttttagtttttttgtctatctcaaaccagggatcccaagttcccaaccttatctcttcactcaacaaaagagttgactcaaaatcaaaaactgcaacaaccaatccccatacactggctggtccaaacaggtacagacttaaaactggcgcagcattatacccccaggttttttttttctggtcatcatgtaattagatctatatacctctcatgctttgtcacgacactataatttttttttatggagagcagcattttagcaatctgtgtaaagattgggcaataaccaatgggcataaagacattaatgctgagtagtagtatatctcaaaatggaaaggtaaaaacaacagccagcaaatcgcaatgatttagttcatgttcttgcaaatatcaacacgcaaggttaatgctgtcactcatagaaacacagcaacgacaagttctttgttttctattgaaggaaaaatgctacaattttcatatgagaagggcgatgctactagtttaattcagtaactccatagtccatacctactgggcaccctcctccgggtgttgccctccagcgccggcatttggggtagcggcaccgccactgccgccggtcccttgagcagaggcgccgtgctggagctcgatgacgagccatcggacggccttgctcatctgctcgaggcggacggcgctgatgggcttgatgccgggggcggcaacggatccggcggaggcggaccccgtggcctcgtcgacgaggcactcggagccgatgcgctggcggatggactcgacgagctcttcggcgtggtcgcaggcgacgcggaagatctcccagcgctgcttgaaggcctcgagcgcggcgtccgtggccgccgtcttcttctcgccgcccgactgtacgcgggcctccaccacagccgccgccgccgccatgaagtcgtcgtacgccgcgctcaggttaaaagaggaacagaagaagctttggcttaagcgtgcagataaagcatgtcgccaaactcgaagcgaatgac

SEQ ID NO: 59176 - DNA, 2127 bp, Zea Mays
tgaacttctgaagggcagttcctaggacaaaatacgaagccgtaatagtacgtctctccgcaacagaagcggaactatttcgtacgcgggcgacgagtttgacgaaggaatcgtctgcggcaggaaccgaagaaggagatctccgtccagaatcttccagccgctctcgtttcctctgcttttgctttccattttgttctctctcatctcctccccgtcgccgaccagaacacagcctcctcctcctctccgtctcagactcgtcttcgagctctaggccttgccgcctcgagtccggctcctgcagggagcacccgccaccaccgccgcagaagcgaaagcggcgttcgcctcaaggaggagacttccgccgctggattagagaccgggaaagggaggggttccctccgcgccgggatggacgacggcgatagtgtggtccggagcgtcgagaaggctggcgccggcccgggcgacgacggcagcacgacaccgctcccggagacggttcaaattggcaattcacccagttacagaattgacagaaagcttggaaagggagggtttgggcaagtatatgttggtcgtcgcatttcctctcctagtgttagtgacaggacgcccggtgcgaatgctttagaggttgcaatcaaatttgaacatcgaaccagcaaaggttgcaactatggtgctccttatgagtggcaagtttacaacactcttagcggaattcatggcgtaccaagagtacactacaaagggaagctgggagagtattatatcatgattatggacatgttggggccaagcctatgggatgtttggaataataactctcactctatgcctgttgaaatggtggcttgcattgctatagaagcaatttccatactggagaagatgcactcaaaagggtacgtccatggagatgtgaagcctgaaaattttttgcttggacctccaggcaccctacaagagaagaaactttttctcgttgaccttggtttagctaccagatggaaagacactggtacaggagagcatgttgaatatgatcagaggcctgatgtcttcagaggaactgttcggtatgctagcgtgcatgctcatttggggagaactggaagcaggagggatgaccttgaatctcttgcctacacacttgtatttcttctgcgtggtcgccttccttggcaaggataccagggggagaataaaggtttccttgtctgcaagaaaaagatggcaacttctccagaatctttgtgttgcttttgcccacaacctttccgacaatttattgagtatgttgtgaacttaaagtttgatgaagaaccaaactatgcaaagtacatttctctttttgatggcattgttggtccaaacccagacataaggccaatcaatacagatggtgctcaaaagcttgtatttcaggtaggccagaagagaggtcgccttacgatggaggaagatgatgatgagcagcccaaaaagaagattcggatgggaatgcctgcgacccaatggattagtgtttacaatgcaaggcggcctatgaaacagaggtatcactacaatgttgcagactgtaggttagctcagcacatttcaaagggaaatgaagatggtttgtttataagctccgttgcctcttgttcaaatctgtgggctttgataatggatgctggcaccggatttacttctcaagtgtatgaactgtctccatattttcttcacaaggaatggataatggaacaatgggagaagaacttctatatcactgcgctagcaggggcaaacaatggtagttcactggtggtcatgtcgagaggaacacaatatgcccagcaatcttacaaacaggcagtcgttgggcagtggtcatgtcccggaattctggcttttcggcgcaggttgtggagcttgacttcttgtatccaagtgagggtatccatcgacgatgggataatggatttcgcatcacggctactgcagctacatgggatcaggcagcgtttatcttgagcatccccaaaaggaaacctgctgatgaaacacaggagactctaagaacgtctgctttccccagccagcatgtgaagatataaaaacaagagctagaac

SEQ ID NO: 59177 - DNA, 3342 bp, Zea Mays
tgaacttctgaagggcagttcctaggacaaaatacgaagccgtaatagtacgtctctccgcaacagaagcggaactatttcgtacgcgggcgacgagtttgacgaaggaatcgtctgcggcaggaaccgaagaaggagatctccgtccagaatcttccagccgctctcgtttcctctgcttttgctttccattttgttctctctcatctcctccccgtcgccgaccagaacacagcctcctcctcctctccgtctcagactcgtcttcgagctctaggccttgccgcctcgagtccggctcctgcagggagcacccgccaccaccgccgcagaagcgaaagcggcgttcgcctcaaggaggagacttccgccgctggattagagaccgggaaagggaggggttccctccgcgccgggatggacgacggcgatagtgtggtccggagcgtcgagaaggctggcgccggcccgggcgacgacggcagcacgacaccgctcccggagacggttcaaattggcaattcacccagttacagaattgacagaaagcttggaaagggagggtttgggcaagtatatgttggtcgtcgcatttcctctcctagtgttagtgacaggacgcccggtgcgaatgctttagaggttgcaatcaaatttgaacatcgaaccagcaaaggttgcaactatggtgctccttatgagtggcaagtttacaacactcttagcggaattcatggcgtaccaagagtacactacaaagggaagctgggagagtattatatcatgattatggacatgttggggccaagcctatgggatgtttggaataataactctcactctatgcctgttgaaatggtggcttgcattgctatagaagcaatttccatactggagaagatgcactcaaaagggtacgtccatggagatgtgaagcctgaaaattttttgcttggacctccaggcaccctacaagagaagaaactttttctcgttgaccttggtttagctaccagatggaaagacactggtacaggagagcatgttgaatatgatcagaggcctgatgtcttcaggtttgcaatagaaatacttcactaggttttatcttccaaggctttattctcccctacttctatgcttacattttttgtcatacatcactgtttaatggaacagaggaactgttcggtatgctagcgtgcatgctcatttggggagaactggaagcaggagggatgaccttgaatctcttgcctacacacttgtatttcttctgcgtggtcgccttccttggcaaggataccagggggagaataaaggtttccttgtctgcaagaaaaagatggcaacttctccagaatctttgtgttgcttttgcccacaacctttccgacaatttattgagtaggccagaagagaggtcgccttacgatggaggaagatgatgatgagcagcccaaaaagaagattcggatgggaatgcctgcgacccaatggattagtgtttacaatgcaaggcggcctatgaaacagaggtatcactacaatgttgcagactgtaggttagctcagcacatttcaaagggaaatgaagatggtttgtttataagctccgttgcctcttgttcaaatctgtgggctttgataatggatgctggcaccggatttacttctcaagtgtatgaactgtctccatattttcttcacaaggaatggataatggaacaatgggagaagaacttctatatcactgcgctagcaggggcaaacaatggtagttcactggtggtcatgtcgagaggaacacaatatgcccagcaatcttacaaagtaagcgactcattccctttcaagtggataaacaaaaaatggaaggagggtttttatgttactgctatggccacagcaggcagtcgttgggcagtggtcatgtcccggaattctggcttttcggcgcaggttgtggagcttgacttcttgtatccaagtgagggtatccatcgacgatgggataatggatttcgcatcacggctactgcagctacatgggatcaggcagcgtttatcttgagcatccccaaaaggaaacctgctgatgaaacacaggagactctaagaacgtctgctttccccagccagcatgtgaaggacaaatgggggaaaaatctctacttagcttccatttgctatggaagaacggtgtcatgaggtctgcccagtttggctggggcacactgtagagtttatttatatggactactgaattattagatttggaattttgaacgactataataatagttctaattttccctataattaaccaatctgatagatgcagaagcctgtctctgttcagttgatagttgcgctagctgcttagcatggctgtaaaaagaatcttgtggtgtttgggtgtagtacttgtttgttcatagattgttaaagttgttgtgttgtaatttgtaaacttgattatgtatcatgcatatagttttatactgatatttaaccctggaggcaggcatctaagttgtatctgcatcttgttctgttgctatttaggctttacaatggggatcttgtgccacatgtctcgggctctgtttgtttgttagacccatccttgcattggataatttggttatctgtgttaaataaatctatcatgtgattgttttcatttcacatgtggataactctagtgtgatttagttattgcttttcagcagttaagaattgtatattgtcagtattagcgttgctctttactcgttttcactgtgtatttgggcttctattccatttcaaattctgtctgaaggtcccgagtgaggattctattttatgttagatcacctgatctctacccacattgccagtaaattttttttgggtctattgcttcaagaggaaagagtggtgatgtcctaaagaattcatggttcggttggtttgatgtccatacttgttaatctgaacaagaatgatgccgtagcttcaattgctactatgctgtgcaagtttatttctgttggcgtgaattgctatgtgagtttcaaagggaggatgcactaactactattgctactctgctctaactcaagacttttgagctagtgtggaggataattctgttcccaaactgaatactctattgtaataccgtgtgagttgatgcagttgcatccatgatcaatattggttttctagatactccctctatcccaaaaactatagagtgatcatggaagacaagaagactatgtcagacgatgaacttttctcttgcacgtttgtttttcattgcaacctgatattataatacatcacgaccat

SEQ ID NO: 59178 - DNA, 2161 bp, Zea Mays
attttggatatctttccctgtccagctactccacgccacgtcaacctcaccccaccacccacctcgtcacatcgcgtagcatccggaattccggaccacttcgacgacttcgccggcgccgagcacaatccacgaccgccccccagccagccatgtccaagtacggtaccatcccgacaacctcgtctactccggcgcccgagggctcctcccagctcgacttcatctcccgcgccaaggcccgcggcgcgtccgcgctcgccacgcgccgtccctggcgcgagctcgcggacccgcgcgcgctctccgtcccgcgcggcttctcagacgcctaccgccgggcgcgcgccaacctcgcgcacttcgccgccaactacgcgctcgtcgtcctgctcgttgtctttgtctccctgctctggcggccggtctccatgctcgtcttcctcgcctgcttcgccgcctggctcgtgctctacttcctccgcgaccgcgacgtggacgggacgctcgtgatttgcgggcggggcgtcggggacggcgtggtcgtcgcggtcacgctcgtcctgctgctgctcaccggcgccacgggcttcatcctcacctcgctgctcgtcgggcttctgcttgtcctgctccacgcactgctgcaccgccccgccgacagcatcgacgacgaggccgggagatggtacacgccagtgccgccgtccaactactagctagtctgagcctctgaggtgctgctcctcctcctattgcttcttggttactggattgcagatcgatgttcttcagttcttgatccgttcgtgctcttgtccatagaaaatgtgcttaaatttgtgttcttcgttatctcggaagatttattactgaaattatgcttttgaagtgatcaatcatttattattgaaattatgcttttcaagtgatcaataaaatttgttctcacaccaaatggaaatctgaaatcagttggtgctcggggcttgtacagaatgcttcctgaagaagggaacgcatggtcaaaccggaagtgatttgccttgtgacccacgggcctaaaagaaaacgggtgttctcatgggagacgtacggagagaaacaacatcgtgtgagcgtatgagccacaaccaaaaccggccactttgttaattgttactgaccagtaacaaaaagacacttaagcttggcctggtttgagcttgatgacaggaatccatgaactcgaacagtccagacacattgtcaaatcttatctcatttttattcattttcaaacatggaagcaagatctatatgctatcgtctttgccgtactgatttgtttttacctatggattcacatcttcatctccagtagggtagtacaacagtagtttatttagctttcacatcgattcttgctaaacatgatttgcagtagtttctgcgttctaaaacagttaatgttttaatgttcaaattttgttttaaattaggtatcattcctacttaatttttctttcttttcctttaatatacttgatatgattgtggatcctaccgatgtcgtcgcgtagagagtagggatgtggcgcaggtggtcggccaagatcaaggtggtcggccaagatcacggtgttggtgcgtcgtggctgttcacaagtgagagagggagacagagtaggggtggctatagtacccgcattactgttcacggagtgggccgcaagccgagagtaggaaaaggggtggcagctagggttcgccttgcttcctccggaagcgagcaatagtaattgcttctgcttgattccaaatagaggcgtacatagttgttttatagtccctccactcatcttatcttactaactcttatctaatagcttctaatagctatctccttatctaatgataacttggctctttaagcctcctaatcctgatcccggtgtctcttatagctgatgccggtcataatatctctcactgcctacgaaaacagctcgtcctcgagttgaaagttagggtagagacgttgaaaattcatccacctggagcagtccctgccacaacgtcatggtcatgaagacctgttgcagtagagatgtcggccgggatatcgtcatcaatgaagtcgatcgactccaagtagaagaggtgttaacagatgtggccc

SEQ ID NO: 59179 - DNA, 5035 bp, Zea Mays
tttgatagagctgaactcgacacttgcttagttgctaagactaacttgggttggctctggcaccgccaactagcccatgttggaatgaagaatcttcataagcttctaaaggggggacacattttaggactaacaaatgttcattttgagaaagacaggatttgtagcgcatgccaagccgggaagcaagttggcacccaacatccacacaagaacatcatgacgaccgacaggccgcttgagctacttcacatggatctattcggcccgattgcttacataagcatcggcgggagtaagtattgtcttgtgatagtggatgattattctcgcttcacttgggtgttctttttacaggacaaatctcatacccaagagatcttaaagagattcttgagacgggctcaaaatgagttcggcttaaggatcaagaaaattagaagcgacaacgggacggagttcaagaactctcaaatcgaaggcttccttgaggaagagggcatcaagcatgagttctcttctccctacactccacaacaaaatggtgtagtggagaggaagaatcgaactctattggacatggcaagaaccatgcttgatgagtacaagacaccggatcggttttgggccgaggcggtcaacaccgcctgctacgccatcaaccggttatatcttcaccgaatcctcaagaagacatcctatgaactcctaaccggtaaaaagcccaatgtttcatattttagagtttttggtagcaaatgctttattcttgttaagagaagtagaaaatctaaatttgcacctaaaactgtagaaggttttttactaggttatgactcaaacacaagggcatatagagtctttaacaagtcctcaggacttgttgaagtttcttgtgacgttgtgtttgatgagactaacggctctcaagtagagcaagttgatcttgatgagataggtgaagaacaggctccatgcataacgctaaggaacatgtccattggggatgtgtgtcctaaggaatccgaagagcctccacatgcacaagatcaaccatcctcctccatgcaagcatctccaccaactcaaattgaggatgaggctcaagatgttgaacaagaagatcaagaagatgagccacctcgaaatgactgcaacgatcaagggggagatgcaaatgatgaagacaaggaggatgaacaaccaaggccgccacacccaagagttcaccaagcaatacaacgagatcaccccgtcgacaccatcctcggcgacattcataagggggtaaccactcgatctcgtattgcacatttttgtgaacattactcttttgtttcctctattgagccacacagggtagaggaagcacttcaagatgcggattgggtgatggcgatgcaagaggagctcaacaacttcacgaggaacgaggtatggcatttagttccacgtcctaaccaaaatgttgtaggaaccaagtgggtcttccgcaacaaacaagacgagcatggtgtggtgacaaggaacaaagctcgactcgtggccaaggggtattcacaagtcgaaggtttggattttggtgaaacctatgcacccgtagctaggcttgagtcaattcgcatattattagcctatgctacttaccatggcttcaagctttatcaaatgaacgtgaagagtgccttcctcaatggaccaatcaaggaggaggtctatgttgagcaacctcccggctttgaagacagtgagtatcctaaccatgtttataggctctctaaggcgctttatgggctcaagcaagccccaagagcatggtatgaatgccttagagatttccttattgcaaatggcttcaaagtcggcaaagccgatcctacactctttactaaaactcttgaaaatgacttgtttgtatgccaaatttatgttgatgatattatatttgggtctactaacgagtctacatgtgaagagtttagtaggatcatgacacagaaattcgagatgtctatgatgggggagttgaagtatttcttaggattccaagtaaagcaactctaagagggcaccttcattagccaaacaaagtacactcaagacattctaaacaagtttgggatgaaggatgccaagcccatcaagacacccatgggaaccaatgggcatctcgacctcgacacgggaggtaagtccgtggatcaaaaggtatatcggtcgataattggttcattgctttatttatgcgcacctcgaccggacattatgctttcagtttgcatgtgtgcaagattccaatccgaccctaaggaatcccaccttacggccgtaaaacgaatcttgagatatttagcttatactcctaagtttgggctttggtaccctcggggatccacatttgatttgattggttattcggatgccgattggacggggtgcaagattaataggaagagcacatcggggacttgccagttcttgggaagatccttggtgtcttgggcttcaaagaagcaaaattcggtcgctctttctaccgccgaagccgagtacattgccgcaggccactgttgcgctcaattgctttggatgaggcaaaccctgcgggactacggttacaaactaaccaaagttcctcttctatgtgataatgagagtgcaatcaaaatggccgacaatcccgtcgagcatagccggactaaacacatagccattcggtatcattttcttcgggatcaccaacaaaagggggatatcgggatttcgtacattaacactaaagatcaattagccgatatctttaccaagccacttgatgaacaatcttttaccagacttaggcatgagcttaatattcttgattctaggaatttcttttgctaatctgcacacatagctcataagtgtacctttgatcatgtctcttttatatatgctatgactaatgtgttttcgagtgtatttcaaaccaagtcataggtatattgaaagggaattggagtcttcggcgaagacaaggcttccactccactctactactcatccttcgccgtcactccgctccactctccgtctttggtataattctcactcctatgttttatttgccaaaggggagaaaatagtcatcaaaagggctctaatgactccgttttttggcgattcatgccaaagggggagaaaatatgagcccaaagcaaaaggaccgcaccatcaccatcaccctaattttaacatatgattttcaattggttgaaaatttcaaaattggtatctctttgtgttctaaagggggagcaagtagtattttcaaaacttgatatcttaaaaccctcttgaacactaagaggagaatttatttgagggggagttttgtatagtcaaaggaaaggcatttgaaacagggggagaaaacttcaaaacttgaaaatgccttgcaaactcttattcatttaccttcgactatttgcaaaagaactttgaaaagatttacaaaatatttttgcaaaaacaaaacatatggtgcaaatgtggtccaatatgtcaaaaacaaagaaacaatccttgcgcatcatgtaaatatttatattggctcaattccaagcaacctttgcacttacattatgcaaactagttcaattatgcacttttgaatttgctttggtttgtgttggcatcaatcaccaaaaagggggagattgaaagggaattaggcttatacctagttcctaaataattttggtggttgaattgcccaacacaaatctttggactaactagtttgctctagtgtataagttatacaggtgcaaaaggttcacacttagccaataaaaagaccaaaggttgggttcaacaaaagggcaaaggagcaaccaaggctcctctggtctggcgcaccggactgtccggtgcaccagaggacttcagctcaaactcgtcgccctcgggaatttccagaggctactccgctaaaattcaccggactgtccggtgtacaccggacagtgtccggtgctccaagggaggtcgtcctcaggaactcgccagcctcgggttttcactccagccgctccgctataattcaccggactgtccggtgtgcaccggactgtccggtgcatctgcggagcaacggctacttcaggcgccaacggctacctgctgcgcatttattgcgcgccagcgcgcgcagaggtcaggcacgcccatgctggcgcaccggacagtgaacagtgcatgtccggtgcgccaccggacatcaaggcgggcctagaagtcagaactccaacggtcaatttccaacggcactggtgacgtggctggggcaccggactgtccggtgtgccatcgaacagacggcctccaccaacggtcaagtttggtggttggggctataaataccccaaccaccccaccattcattgtatccaagttttccacttctcaaccacttacaagagctaggcattcaattctagacacacccaaagagatcaaatcctctccaattccatacaaagcctaagtgactagtgagagtgatttgtcgtgttcatttgagctcttgcgcttggattgctttctctctttaattctttcttgagatcaatactcgcttgtaaccaaggcaagagacaccaattgtgtggtggtccttgcggggaggtttttgctcccggttgatttgagaagagaaagctcactcggtctgagggaccgtttgagagagggaagggttgaaagggacccggcctttgtggcctcctcaacggggagtaggtttgagagaaccgaacctcggtaaaacaaatccacgtgtctcacttcatcattcgcttgcgatttgttttgcgctctctctcgcggacttgattatatctctaacgctaacccggcttgtagttgtgattattttttgagaatttcagtttcgtcctattcaccccccctctaggcgactttcaggctccggtgaggtagtaggaggccagccattgcaatatgagccaggatgcgctgatcgtggaagaac

SEQ ID NO: 59180 - DNA, 1880 bp, Zea Mays
atccaatccactggcccattcaccagtgacagtcttcaggactttctcgtgtagcatcatttccgctacccaaatctctccatccacggcgacgcccgacgccatccgtcagccagccccatctccaccacccctccccgtccccgacgtagcagcagagcggagaggcggccaagccaattcctcaccggtagcttctccgcgctcccgggctccgcctcgccgcactcggatgccccctgcgctggcgcctagagcggcggcggtctagcgggcgccgggagcggtgaaatccacccatggccgacgctctcctccttccgtgccgcttcctcgcgccgttgtcagtcacatccggcgcctcttcatcagcctcttcgtccccgccgtgtcgttgggtgctctcgtcgcccggctcgccgtggcggccgcgcttggctgccgggcaacggcaaccccgacctcgccggttcactcggcacaagatttgtgcagcagagcgtggtgagcaaccgaaatggtgggagaaaaatgctgggccaaacatgattgacatccactccacagtggagttcttggatgcactaagagatgctggagacaggcttgttattgttgagttctacggaacctggtgtggttcatgcagggctctctttccaaggctctgccggacagctttggagacccctgatgtattgtttctaaaagtgaattttgatgaaaacaaacccatgtgcaaacgactgaatgtcaaagtccttcctttcttccatttttaccgtggagctgatgggctactggaggctttctcctgttccttagctaaggtatgagtgtgagtgcctcacgtgtttctgtattatactgaatgagataagtgacccctttatacatttgatcccttttgtgaatcctacttttgtcatgaattatcgtgagctgtagtttttttttctttgcttgcttgggacaaaaaggctttgttgttgttgttgttgttagtttgagttttcttttatggcatccttccccaaattcttcttcaatttctgagattatgctagaatatgaactgcacttgtccatttcaaatgtctgaggtggaaataattctgattgtattacttctgcacatttttgtatccaaacaatcccattttgcatttgcatttgcatttgcatttgcagtttcagaagctgaaggatgccgttgcaatgcacaacacggctcgttgcagcattggtccacctgttggagttggcgatgttgacttgctggatagcacgagccctcaagagaaacctgcagaagctagcccacattagattaatgagaaggagctcctccccatccacgtctacatcctgctcattgttttcttcactatagaccttaatgtaatcagttcaggagaactaaagtaccctcaattcatgaatcagatgtatggattatcgtacgcattcttgaaagggaaaaaagtgtataatagtgataactatacgttttttggacagaagaaccatgtacttgtacatcattttaggtgaagacgtcatgagcatttaagcgcccttgtgggccgttttatcagtcagtccgttttttttcgcacgttcactgtcattctgacagactgtactttgttgtatttgttcaattgcgaagtttaagtgaaaaaatagaaatgaagaactagtacgtaagttttttaattgatctgatcatttaaatatatacatagcgaagtagatctgatcatctaaatatataaatttatatcactatataatacactgatttaactttacaaaacctacctaaccaaatcatccataatacataatcctcactaaattcaccaaataaattgcat

SEQ ID NO: 59181 - DNA, 883 bp, Zea Mays
acacatagcagctagacatccactatttgctctgccggacagctttggagacccctgatgtattgtttctaaaagtgaattttgatgaaaacaaacccatgtgcaaacgactgaatgtcaaagtccttcctttcttccatttttaccgtggagctgatgggctactggaggctttctcctgttccttagctaagtttcagaagctgaaggatgccgttgcaatgcacaacacggctcgttgcagcattggtccacctgttggagttggcgatgttgacttgctggatagcacgagccctcaagagaaacctgcagaagctagcccacattagattaatgagaaggagctcctccccatccacgtctacatcctgctcattgttttcttcactatagaccttaatgtaatcagttcaggagaactaaagtaccctcaattcatgaatcagatgtatggattatcgtacgcattcttgaaagggaaaaaagtgtataatagtgataactatacgttttttggacagaagaaccatgtacttgtacatcattttaggtgaagacgtcatgagcatttaagcgcccttgtgggccgttttatcagtcagtccgttttttttcgcacgttcactgtcattctgacagactgtactttgttgtatttgttcaattgcgaagtttaagtgaaaaaatagaaatgaagaactagtacgtaagttttttaattgatctgatcatttaaatatatacatagcgaagtagatctgatcatctaaatatataaatttatatcactatataatacactgatttaactttacaaaacctacctaaccaaatcatccataatacataatcctcactaaattcaccaaataaattgcat

SEQ ID NO: 59182 - DNA, 1521 bp, Zea Mays
gtcattaattaattatttaattgaaggaatggggacaacgccaatgggccaattagcaaagcgtagcaaatcatttggtgaggtcgagctatcgatccatcgcgcgcgtaaaggtgggtgacgcgtcgctctccttctcctcccctgcttggctgcttgccctattagatctctccatgtccatttaagagagagagccagacaggtccatccacaggaccaccagagagccacagcaccagcggcagccacccaaagcccaggaggccaggaccgcctcaccgccaatggccgaccgcgtgtaccccgccgccaagccgaacccgcctccaggcgcggcgggcaacagcaacggcgcgcaggcgtcgtcgttccctgcgcccaagtcgcagatgtaccagcggcccatctaccgtcctcaggcccccgcgaagcggcagcgcgggcggtcgtgccggtgcagcttgtgctgctgcttctgctgggcgctggtggtggtgatcctgctggcgttcgtggccgcggtgtgcggcggcgtcttctacctgctgtaccggccgcagcggccgtcgttcagcgtgtcgtcggtgcggctggcgtcgctgaacctgacgtcgtcggcgacggcgcccgtgctgagcgacgccatcacgctgaccgtgacggcccggaacccgaacaagaagatggtgtacctgtacgacgacctgaccctgctggtggccacggccgccaacgccgtgccgctggggagcgccacggtgcccgggttcgcgcacgcggccggcaacaccaccgtgctgaccgccaccgtctccgccagcgcggtgggcgtggaccccagcggcgccagctccgacatcaagcggtccggcggcgggtcgttctccgtggtggtggacgcggacaccagcgccggcgtccgggtgggcgggctcaagacgaagaagatcggcatccaggtgcactgcgagggcatcaagctgacggcaccgcctccgcctccgccggcgcccaagagggccaaggggaagaacagcaccgccgcgctcgcgcctgctctggcgccgtccgccgccgacgcgacgccggcgaagacggccacggtgagcacggcggcgcactcgtgcaaggttagggtccgcgtcaagatctggaagtggactttctaggtacgggcagcgggaggagaggagacacctttaggggctgcagcgcgcaaaaaaaaaagattttcgctttcattgctatttatttatctatatatataaatatatatacggcgataagtttgttatcaccatgattactatatatcggagcgggcaggagtatatgtattgtaggaccaagacatgcgtgcgtcggtgtaaattcattcgcccaggcattttcttttcctttttgcttcaaccatttttcacccctgtgattgatcaaaaaagaagaaaagaaatagtgtcggtaggggtgtaatcggatcgaatacggacggatatcaatgaaatcatatttgttttc

SEQ ID NO: 59183 - DNA, 1899 bp, Zea Mays
ctagccgggtgttccttcccttcccccaggacgagtcttcaatttatgggattgtaccgcaacgaatgggctgaagctctgggcatagagatctccagcccgagggccaaggacggcaccatggtagtgaacaggaggaccggcttttccaacggcaagctgatgccgtcgctgagcttcaagctgtgggaggcagaggcggtagtcgcttccatggaccacgacggcagggccagcgagtgcctgcgggattccgttccggagttggtgttcatggcgtctccgactacgaccaccccgagcccgcgggtgtcgtccagccccaaatgcgagctggacgccgcggcggtgaagctccagaaggtgtacaagagctaccgcacgcggcggaacctcgccgactgcgccgtggtcatcgaggagctgtggtggaaggcgctggacttcgcgtccctcaagcacagctccgtctccttcttcaacggcggcaagcccgagacggcggcgtcgcgctgggcccgcgccaggactagggtggccaagcttggcaaggggctgtccaagaacggcaaggcgcagaagctggcgcggcagcactggctcgaagctattgacccgaggcatcggtatggccacaatctgcacatctattacgatgtctggtccaagagcgagagcacggagcccttcttttattggttggacattggggaaggcaaggaagtgaaccttgagaaatgccctaggagtaagcttcagagccagtgcatcaagtaccttggaccaaaagagagacaagagtatgaggttgttgtggagaggggaaagctcgtgtataagaaaaatggagctcttgtgcaaactctggacgattccaagtggattttcgtcctcagtaccaccaaggcactctatgtcgggcagaagaagaaaggctcgtttcagcactcgagtttcttagctggtggagccataacatctgccggaagattggtcgtcaaagaaggaatcctcaaggctatatggccgtacagcggccactaccttccaactgaagagaacttcaaagagttcatccgctacctcgaggagaacggtgtcgacctcactcatgtcaagaaatgcccagtcgacaaagacgacgagtaccccttggtgagcaagcctgaagctcaggccaacgccgccgtctcgaacggcactggcggagcagaacacagcacggcgtctgaagccatggttgaccatacgagtgactccgacgcggccgacggcgacggtcacggggcaaccggcggtcgagtgccggtggtcacgggaccaccgtcgagtgctgctgctgctgctgctcaggttggcaagaaccactcgacgtgccggtggtctacgggcacgggcccccgcatccggtgcgtccgcgactacccgcaggacctccagtccagggcgctcgagcacgtcaacctctcgccgaggctcaccggctcgccgtcgaggaagagggacccggtcccttcccctcgccccagcccggcgatgatcctgtctccgaggctcgcttccgtcggattccaccctcagacgacggtgtccctcacgctgcccgacttcaagaggagcagactgcactgaacaactctgttcttgtttcattgtttcgcttggcgatcagaagaataactcaactggtcagcctgtttactgacaggccagtgacctttttccctgctaggttgatcagtagattacttcgtttttttcttctgttcattgctttattgatggcaacaattttcggttgtagatactatttgtgattcttttgttagatgtatgtatgcaaggagtacatgtacattgcttaagattgaattgaaaaaatggcgattttgtttaggg

SEQ ID NO: 59184 - DNA, 2332 bp, Zea Mays
atgacaggcgtcgtcaccggcccctgctcgcgccgttcgacctctcccgtctccgcacccgctcaccccgcgccgcctggccgcctcctcgtgctcccgctcgcgccggccacctccgtgctcctcctcgactggtacgcatcgtcccacccggcgctctcactctcgtccctcccgctccgccccatcctcgcggcagccgaccccgaccgcgcgctcgcgctcctcgactccctgcaggcctcccgcctgcccccgctccgcgagtccctcctgctcccgctgctccgctccctgccccccggccacacgctccacctgctcgaccagatgccccgccgcttcgccgtcgccccctcatacgccggttgtagtggccgcggcgctgctggtggcgtcgctggcggcattctgcggcacggacccgctccggacgggcagcatggtggacttcccggggagctctgcggcgggcccatggcctcgccgctggagtatctccccagcgagcacatctgcagccgcccgctcgggctctgtttcaataagattggggacctgtacatcgtcgatgcctacttcggtttgctcaaagtcggccccgagggcgggctggccacaccgctcgcaacggaggccgaggtcgtgcgcgtcaacttcaccaacgaccccgacctcgacgacgagggaaacatctacttcactgactccagaatccactaccagagacggatatggggtgatcaaggccaggctgcactggagaaggctagcatatgcttgcttaactgtggtcctaccggaaccgaagcattgaagaatctcgtgcttggaggcataggaatggatgaaggatgtttggggcaaccaagagctaaatctatatgctctttcctacaagagcttaatgacgctgttaaggccaagtttgttgatgagtctccagcgcatttgatagatactaatccttcatttttttcccagtttactgttgttattgctacccagaacaaaaaatgtttaagatatggaaaaactcgactggggggtaagacagttcctggccattatattaagaagaagatcttctcacgcaaatcgagaaaacccttcaacccctgcctcaccatatatagcggcactgtaacccatatgagaatgaccgcgaccggggaccgaaccttagacccgtggtttggtgtgagatagacgatgcgatttttttaccccaacctaaaattcgctcctacggggagtcaaacttagtacctgaggggtgctactcaggtcacctaactaactcagctagaggcccttctgcatgtttaagatatgaaaccagtaagacaaatattagaagatttcatagctctcaataaccataaatatcatagttcaatttatgttctaataaagcttatactttgtgaaagaagtttatatgaaaaaaatgattattagttattaatacactttggatgttatgtctctcttatgtaccagacagcttttaaattattgttatgccagaggccagagcagtgcattgattcggtgcattaggcaaacattataccttgtgcatcagttattataacccagtttctgtagacatatggttctttgatcggaacatggctttggaccaggccactcactgttctgtcaaatgcatacaatacacaatagctaatgcgtagctgccgtcttggcattggtgatggcaaaactttgtactaagggtctgttggatgagaccctggagtatttttgcctggataggtctttgcctgtgctccgtatggatgaccctgatatgcttcctgaaccacgcgagtcatcctcggctaggcaaccaaaattttaagcgcctaggctaatgacaacaattagttgcttaaatgtcagaaaagtaacagataatgatggaacacaactcaatcagcacaattaatttgataaaactaattaaatatgttggcattactataaatatgcacatgcaaaattgagtatagttatttttttcatgtgccaaggcggcgacttcacccggggcaacgacactggcggcgagtccatctacggcgccaggttcgccgacgagaacttgaagctgcgctacacagggctcgacgtgctctccatggccaacgcggggccgacaccaacgactcccagtttttcatctgcaccgcgcagacgccctagcttgacggcaagcacgtcgtcttcggcaaggtcgtcgatggctacgccatcgtggacaagatggtggttgtcggttctcagtcaggtgccacggtcgagatcgtacgcatcgaggactgcg

SEQ ID NO: 59185 - DNA, 2481 bp, Zea Mays
ccacaagttaggttttgtctctgcttactgctgcgccgccattgtggtcttcttcatcccgagagcatggcttcggaatctgttgccttcgagatcctgcactggagagggcaagtaaggtttttgggaagcattctcacacgaccgctcgcgatcttctcgtcgaccttgctggcatcaacatcaatcatttaattatggctggttttaccgatgcgctgaagctagaaaaattctctgttatgcacttcaaaaggtggcaagccaaggacatgctctggcttagctgttatgaatgtgttccatgttagtaaaggcaaatcagagggcgcactgactcctaaagaggaaaaaagtacgacaacgccaatactatctttatgagagcagttcttagcgtccttgttgatcgtcttgtttatgcgaatatgtaatacacagacgggaaggaattgtgggatgcacttactaccaagtatggtgcattagatgctagcagtgacttgtatgtcatagagagttttcatgattataatatggctgataatcgctctattgtagagcaagctcatgaaatatagtgtattgccaaggagctcgaccatcttaagattgtcctctctgaccgatttgtggctgagtccattattgcaaagttgtcttctacacggaggaactttgccacatctctaaaacataaaagacacgaaatatcagttgaaaatttgatagcgtctctagatgttgaggagaaagctcgagctaaggacatgagttctaaaggaggcgagggccactccagcgccaacatgatttagaagaaccacaacaagggcaaaggaaatacaaaatctaacaagcccaacaaaattaccaacttcaacaagaagaagaacaaggttgaagtgacatgttttgtgtgtggtgagacaggtcattttgccaaggattgtcctgatcgagcggatcgttgtggcaaaaagggcaatgtcaacacagtggtcgctagcaatgagggagacaaagggtatggtaatctacctttcatcttctcaatatttcaatcacctagttggtggcttcatattggtgctaatgttcatgtgtgttctaaaattaatttgctctattcttatctgggtgctcaggattcctccatcctaatgggcaatgagtcacatgcttctggtcattgcattggcacgatggatctaaagtttacttcgggaaagatcgtacaactgaagaatgtgtagcatgtcccttctatgcataagaatctcgttagcggaacccttctatgtagagatgggttcaaggtagttttagagtccaataaaatagttgtgtctaagtctggacaataaaatagttgagcattgacgctgagagccgttcagctagagaaggaggcggattcgtggagaggcgtgacggagacgacgatggtcgggatcggagtgaggcgcggcgccgtagcggaggcgccgagagctagattagggattagggttaccgagagtccgagacaatgcgccgttggccgctgcggtgtgcggagccgtgtgtgtgtgtgcgtgtgtgctttaggtttagggtaaggtgtgggcgaggaacgagtccgcgagttccgaatgagatgtggagaggctgcgaggctttgtgccgaggatgcttttacaggccagatggaaaaccgggcttgctctaaaatccggaccgtgtcgtgttgtcccaacgggctgagtactgtgcacaggcccaacacgcctatccgggctggcacggatccgttgaaagtgggtcgggatgggcctagcgccgggccgacgaagcgggctttcgttcgtgcttccgggccgcgggcctacatctatgctcatgcgtgctttatatatatatagtatatgtatttagagccctaggctctatttaactataggaagccccgaccacgtaccgaccaggtgcgcaaccgcaccggaccctttttggcttattgtacctaactgcttacgccaaattataatacgagttatgctgatgtgtgtctcaatttatgcaaatatagtctgcgcatattacgtgcatcgggcccacgatccggcccacgcgctcacaattatccagtaccacgccgccactataaaaacacccccacgccgccagggattaggttttagcggcggcggcggttctctctggtgtgcgagcggcggtgatcctgggggccagcagcggtgtcacctcgaggtaggcgaccgacggcggcgctccaccaggaacgatcgacaacgacgctccgaggcaggcgggcaagcggtgacggcgctctcgaagcggacggacaacggcagcgcaccctaggcccgatgacaacggcggttgtcccgtccgtctctgcgatggccaccgccgccgtcgctccagcatctgtggcgcgacggcggatctggggacacgctcgcgacggtggatccc

SEQ ID NO: 59186 - DNA, 1079 bp, Zea Mays
ggtattcatgatacaatcggcattgacctggttattgtggcaggtggcaatgagcgtcaatgacattgtaactctaggtgcaaaaccattgttcttcctagattactatgcaacgagcaagcttgatgttgatcttgcagagaaggttatcaaggggattagggatgggtgcgaacaatcagattgtgctctcctaggaggggagacagcagaaatgcctggtttctatgcagagggtgaatatgatctaagtggttttgctgtgggtgttgtgaagaaggataaagtcattgatggaaaaaacattgttaagggagatgtgcttataggtcttccttccagtggtgttcattctaacgggttctctcttgttagaagagtactggagaaaagtggactttctttggatgatcagctcccaagaaatgatggcataacaactacggttggtgaagctctaatggcaccaaccttcatctatgttaagcaggtgcttgagattattagcaaaggtggtgtgaaaggactagcccacatcactggtggtggctttactgacaatatcccaagagtattcccctccggatgcggggcaaaaatttttactgggtcatgggaaatacctccaatcttcagttgccttcaacaggctggaaacattgatgacgcagagatgcggcgaacattcaatatgggcattggaatggttcttgtggtaagtcgagagtcagcagacagaattattgaagacacccatggatccaatcctgcttatcgcattggagaggtgattgagggtgatggggttcagtatgtctgacctcgtatgccttttatagtggcttgagacttgttggtctgctctgcaaagcagcagagtttatgtaacaacataatcttgtggtgttaagttctgcaccactactcccgctagaaagtgaagggtaaccaaataattatttgattggatccacgggaacttctctaaaggcttaccagaggaggccattaggaggaaatacagttgatgagaatttttcatggagagcggtattgttttcgttgagtaaatttaaata

SEQ ID NO: 59187 - DNA, 1376 bp, Zea Mays
caggtcgagatctcctctctacaggcagccagagttctagctgagcagcaaaagattgcagcgatttgacgagcaaacaaagatatatataagattcgccacaccgacacctagatgtcacacgccagcccgcaggtggtatataataatagtgaaaaaaaagagaagctgcttctgggatggctgcatttatgcaggcacactgctgccggcagccacgactggttggaaggagggaggggtagtagtaaaaccaggtaggtgtggctggctcgtgcagcggcggcaggcggcagtgagagcgatgagcgcggcggcggcgagctcggtcaccaagttcatcaagtgcgtcacggtcggcgatggggccgtcgggaagacctgcatgctcatctgctacacctgcaacaagttccccacggattatatccccaccgtatttgacaacttcagcgccaatgtctccgtgggtgggagcatcgttaacttgggcctctgggacacggcaggccaggaggattacagcaggttgaggcctctcagctacaggggtgccgatgtgttcatcctctccttctccctggtcagcagggcgagctatgagaacgtcctcaagaagtttggatttcacacagcaataactgagtactgatcatcagcgtccgtctgtacagtggatgccagagcttcgccgattttcacctactgttcctgtagttcttgttggaaccaaactagatctccgtgaagacagatcttaccttgctgaccattctgctgcttccatcatctctactgaacagggagaagagctcaggaagcagataggcgctgtggcgtacatagaatgcagctcaaagacacagaggaacgtaaaggctgtgttcgacactgcaattaaagtagtgctgcaaccaccgaggagaagagaagttaccaggaagaaaatgaaggcaaggtcgaatcagtctctgagatacctctgtggaagcggatgtttcacatcgtaaagcacaggctcttctgcgactgttgtactggactggctagatggttgcagctctatgaatgagtagtcccttccgcagccactgggaacttctggttctctgctaccttccgatagagtgctcttctgcgttcaccagctgtgcaaaatgaagtgaggtcctagtttctaaattccctacgaggtgtaccttctttagtatgaatggtaggctatttagcagttcagcaaagtgtgaagtgacccttctatgcatgttttgtttccaaaaactgatgtagctaaatctctaatgaatggttatggtcgcaccggaagaaaagaagttattgtagactattaattccagtttttactgttcctcgtc

SEQ ID NO: 59188 - DNA, 422 bp, Zea Mays
aaaaaaggggaaactatagaagatacctctgtggaagcggatgtttcacatcgtaaagcacaggctcttctgcgactgttgtactggactggctagatggttgcagctctatgaatgagtagtcccttccgcagccactgggaacttctggttctctgctaccttccgatagagtgctcttctgcgttcaccagctgtgcaaaatgaagtgaggtcctagtttctaaattccctacgaggtgtaccttctttagtatgaatggtaggctatttagcagttcagcaaagtgtgaagtgacccttctatgcatgttttgtttccaaaaactgatgtagctaaatctctaatgaatggttatggtcgcaccggaagaaaagaagttattgtagactattaattccagtttttactgttcctcgtc

SEQ ID NO: 59189 - DNA, 3859 bp, Zea Mays
ccaaacacgcccttcgtgtcaagacagctgacacacgattggtgcgtatcgaaagtactcgttaatatctccggcatcgtcacggcggcagccgggatcccccccggtacgagttggtcgagccgtcacgtggggccgctctggcactgccccatggcccccatcaaacactcgccccaacctcaaacagtgaacggcgccacctctccgccgccgtcagatcggagctcgactccgaaccccgcttttcagccgccatggcggcgccaccgcgccgctcgctccttgtcctcctcgcggggatcctagttttcggctccctcaccaccctcgccacagccatctacgaggaccaagtcggtctcgcggactggcaccagaagtacattggcaaagtaaagcaagcagtttaccacagccaaaagagtggaaggaggcgtgttgtagtcttgacagaggaaaatgtgatctcatctcttgatctacgttctggagatatattctggcgacatgtcattgacaagaacgaccccttggatcagcttagtctttcacttggaaaatatgttctaaccctttctttgggaggaactatattaagggcatggaatcttccagatggacatatgatctgggaaactaaccttcggatctctacagcatcaaatccacagttgcatgttatgtcaaacaataaagtggccaatgacaacttggttttagtttcagctgggcgatggatttatgctgtatcaagcactgatggggcaattttatgggaaaaggagttttctcttgatgggacttgctggttcctcaaagctagctttgtatcacttgagtgctaaaactggagagatactaaaagatatccaagagtcactccctggtggattattgggtgaaacagtacttgtttctgataatgtgttggtagcattagataaggccagatcaagtctgttagttattgaattcaagggtgagagaattagctacaacaaggtgcatgtttcagatcttgttcaagacttatcaggatcacttgagcttcaatctttgtccaatggtgtcatatctttgcaaacatcatcttctatttccctcctaaagctcaaaggtactgatggattggaagtacttcagagatttgaccagccagctgctgtcagtgattccctgacaatcacagaaaaagaagcagcttttgctgtcgtgcaacatttgggttctgaaattgagtttatcgtaaaatctacaagtgatctaagcagtgaaattattaaagaaaagcttgttatagaccaaaataggggcaatgttgagaaggtcttcttgaatagttatattcgaaccgacagatctcatggttttcgagctttggttgtaatggaggatcattcactcttgttaattcaacaaggtgaggttgtttggagcagagaggatgggctggcttcaattgttgatgtaacaacatcagaattgcctgttgagaaggatggtgtatcagttgccgatgtggaacacaatctctttgagtggcttaagggacacatgctgaaactcaaaggaagtctaatgcttgctaatgctgatgaagttgctgcaatccaagcaatgagactaaaaagctctgagaaaaataagatgacaagagaccataatggatttcgcaaactccttgttgtattgacaaaagcgggcaaagtgatggctctgcacactggagatggacgtgttatctggtcgaaattggtgccatctcttcgtgcctccagatgtggtggagtcccttctgcattaaggatataccaatggcaggtcccgcatcacagtgtcatgcgtgaaaatccatctgtacttgttgttggcaaatttggagcagaaccttcaattcctggtgtattctctattcttgattcatattctggagaagaactgaactctatgaaacttgaccattctgttgtccaaattattcccttgacactgaaggattcatcagagcaacaacttcatctgtttgttgattccgattccaatgcacatttatatccgaaatctccagatgctctcaatgtatttcttcatgaaatgtcaaacctgtatttctactctgtagatattcaggcaaatgttattaaagggtattcattacagaagtcatgtaatctcaatgtgggtgatgagtactgctttagtacgaaggagttatggttcatcatctttccttctgattctgaaaggattactatctctgaaacacgaaagatgaatgaggttgttcatacccaagctaagataagcggtgaccatgatgtgatgtacaagtacttgtcaaagaatttagtttttgttgctactttgtctcctaaagctgctgttgatattggatctgcactacctgaagaagcttcacttgttgcatatcttattgatgcagtcactggacgcatactccatcgtgtgactcatcatggtgcacaaggccctgtacatgcagttttgagcgagaactgggttgtctatcattattttaatcttcgagctcacagatttgaaatggcggtgatcgagatatatgatcaatctagggcgggcaataaagatgtcacgaagctcatactagggaagcataatcttttggcaccaattacatcttatgcccgccctgaggtggcagtaaaatcccagtcatactttttcacccattcagtaaaagcaatggcagttacacaaacggctaaggggatcacttccaagcagcttctgttgggtactattggtgaccaggttttggcacttgataagcgctatcttgatccacgccgttcagtgaacccgacacagcaagaaaaagaagagggcattataccattaacagattctttgcctataataccccagtcctttgtgacgcactctcatcaagtggaggccctgcgagccattgtttctattcctgcaaagttggagtccactattgttttcacatatggtgtcgatctattctacacccagcttgccccgtcaagaacctatgattccctaaccgacgaattcagctatgcgctgcttctaatcacgatcgcagtcctggttgccgccattattggtacatggatttggtctgagaaaaaggagttgagagacaagtggaggtgagcaaggtctcagtgttctgacgctgaggaaattttgggccctagtcagctaccttctcctcctctccccttttcattgtagtgctagagttcgtttcactttttgactaggactttatttatgtaaccgtttgacaacaaagcctatctgccgtgaattgtcacactgcggaggccttatagaaagccacttacgcaattaaagattcaggaaatgacatcgaagggttagcagagcgcagatggcgtgaatctgtaccactgcagccaaacacttcacagcagattttgtagctattgttgttggtagagggtttccgcttctcttgtgtaactgaaagctcgtctttatttcaatcactatacctttcttgacagaaactgtatatctcttccaatgcactgtcattacttctgctgttagcctgtgatagggtgggctacaagatgctctacgttggtgcggtttgcgcaacctcagtcctccagggcatatctttattctgaaggtgatgtaacaactacatcattgaaccaatgatggttattgctacttcctgatcggatcgttcatgtgttaatgatggcagtgatcaagtcaggtaccatttaaagatttgtagcatcttttgtcaaggttatctttcttttggaatcttgatgctcgtttttttgtgtgtgtgcatattatt

SEQ ID NO: 59190 - DNA, 3995 bp, Zea Mays
caaacacgcccttcgtgtcaagacagctgacacacgattggtgcgtatcgaaagtactcgttaatatctccggcatcgtcacggcggcagccgggatcccccccggtacgagttggtcgagccgtcacgtggggccgctctggcactgccccatggcccccatcaaacactcgccccaacctcaaacagtgaacggcgccacctctccgccgccgtcagatcggagctcgactccgaaccccgcttttcagccgccatggcggcgccaccgcgccgctcgctccttgtcctcctcgcggggatcctagttttcggctccctcaccaccctcgccacagccatctacgaggaccaagtcggtctcgcggactggcaccagaagtacattggcaaagtaaagcaagcagtttaccacagccaaaagagtggaaggaggcgtgttgtagtcttgacagaggaaaatgtgatctcatctcttgatctacgttctggagatatattctggcgacatgtcattgacaagaacgaccccttggatcagcttagtctttcacttggaaaatatgttctaaccctttctttgggaggaactatattaagggcatggaatcttccagatggacatatgatctgggaaactaaccttcggatctctacagcatcaaatccacagttgcatgttatgtcaaacaataaagtggccaatgacaacttggttttagtttcagctgggcgatggatttatgctgtatcaagcactgatggggcaattttatgggaaaaggagttttctcttgatggcttagaaattaagcggattctccaatcacctgaaaatggtattgtatatgctttaggacttgctggttcctcaaagctagctttgtatcacttgagtgctaaaactggagagatactaaaagatatccaagagtcactccctggtggattattgggtgaaacagtacttgtttctgataatgtgttggtagcattagataaggccagatcaagtctgttagttattgaattcaagggtgagagaattagctacaacaaggtgcatgtttcagatcttgttcaagacttatcaggatcacttgagcttcaatctttgtccaatggtgtcatatctttgcaaacatcatcttctatttccctcctaaagctcaaaggtactgatggattggaagtacttcagagatttgaccagccagctgctgtcagtgattccctgacaatcacagaaaaagaagcagcttttgctgtcgtgcaacatttgggttctgaaattgagtttatcgtaaaatctacaagtgatctaagcagtgaaattattaaagaaaagcttgttatagaccaaaataggggcaatgttgagaaggtcttcttgaatagttatattcgaaccgacagatctcatggttttcgagctttggttgtaatggaggatcattcactcttgttaattcaacaaggtgaggttgtttggagcagagaggatgggctggcttcaattgttgatgtaacaacatcagaattgcctgttgagaaggatggtgtatcagttgccgatgtggaacacaatctctttgagtggcttaaggtgatacaaagttattcattcataaaaccggtgacaacattagcatatgatccccacttgtggagtttggttcttacatagggacacatgctgaaactcaaaggaagtctaatgcttgctaatgctgatgaagttgctgcaatccaagcaatgagactaaaaagctctgagaaaaataagatgacaagagaccataatggatttcgcaaactccttgttgtattgacaaaagcgggcaaagtgatggctctgcacactggagatggacgtgttatctggtcgaaattggtgccatctcttcgtgcctccagatgtggtggagtcccttctgcattaaggatataccaatggcaggtcccgcatcacagtgtcatgcgtgaaaatccatctgtacttgttgttggcaaatttggagcagaaccttcaattcctggtgtattctctattcttgattcatattctggagaagaactgaactctatgaaacttgaccattctgttgtccaaattattcccttgacactgaaggattcatcagagcaacaacttcatctgtttgttgattccgattccaatgcacatttatatccgaaatctccagatgctctcaatgtatttcttcatgaaatgtcaaacctgtatttctactctgtagatattcaggcaaatgttattaaagggtattcattacagaagtcatgtaatctcaatgtgggtgatgagtactgctttagtacgaaggagttatggttcatcatctttccttctgattctgaaaggattactatctctgaaacacgaaagatgaatgaggttgttcatacccaagctaagataagcggtgaccatgatgtgatgtacaagtacttgtcaaagaatttagtttttgttgctactttgtctcctaaagctgctgttgatattggatctgcactacctgaagaagcttcacttgttgcatatcttattgatgcagtcactggacgcatactccatcgtgtgactcatcatggtgcacaaggccctgtacatgcagttttgagcgagaactgggttgtctatcattattttaatcttcgagctcacagatttgaaatggcggtgatcgagatatatgatcaatctagggcgggcaataaagatgtcacgaagctcatactagggaagcataatcttttggcaccaattacatcttatgcccgccctgaggtggcagtaaaatcccagtcatactttttcacccattcagtaaaagcaatggcagttacacaaacggctaaggggatcacttccaagcagcttctgttgggtactattggtgaccaggttttggcacttgataagcgctatcttgatccacgccgttcagtgaacccgacacagcaagaaaaagaagagggcattataccattaacagattctttgcctataataccccagtcctttgtgacgcactctcatcaagtggaggccctgcgagccattgtttctattcctgcaaagttggagtccactattgttttcacatatggtgtcgatctattctacacccagcttgccccgtcaagaacctatgattccctaaccgacgaattcagctatgcgctgcttctaatcacgatcgcagtcctggttgccgccattattggtacatggatttggtctgagaaaaaggagttgagagacaagtggaggtgagcaaggtctcagtgttctgacgctgaggaaattttgggccctagtcagctaccttctcctcctctccccttttcattgtagtgctagagttcgtttcactttttgactaggactttatttatgtaaccgtttgacaacaaagcctatctgccgtgaattgtcacactgcggaggccttatagaaagccacttacgcaattaaagattcaggaaatgacatcgaagggttagcagagcgcagatggcgtgaatctgtaccactgcagccaaacacttcacagcagattttgtagctattgttgttggtagagggtttccgcttctcttgtgtaactgaaagctcgtctttatttcaatcactatacctttcttgacagaaactgtatatctcttccaatgcactgtcattacttctgctgttagcctgtgatagggtgggctacaagatgctctacgttggtgcggtttgcgcaacctcagtcctccagggcatatctttattctgaaggtgatgtaacaactacatcattgaaccaatgatggttattgctacttcctgatcggatcgttcatgtgttaatgatggcagtgatcaagtcaggtaccatttaaagatttgtagcatcttttgtcaaggttatctttcttttggaatcttgatgctcgtttttttgtgtgtgtgcatattatt

SEQ ID NO: 59191 - DNA, 3586 bp, Zea Mays
gtcaagacagctgacacacgattggtgcgtatcgaaagtactcgttaatatctccggcatcgtcacggcggcagccgggatcccccccggtacgagttggtcgagccgtcacgtggggccgctctggcactgccccatggcccccatcaaacactcgccccaacctcaaacagtgaacggcgccacctctccgccgccgtcagatcggagctcgactccgaaccccgcttttcagccgccatggcggcgccaccgcgccgctcgctccttgtcctcctcgcggggatcctagttttcggctccctcaccaccctcgccacagccatctacgaggaccaagtcggtctcgcggactggcaccagaagtacattggcaaagtaaagcaagcagtttaccacagccaaaagagtggaaggaggcgtgttgtagtcttgacagaggaaaatgtgatctcatctcttgatctacgttctggagatatattctggcgacatgtcattgacaagaacgaccccttggatcagcttagtctttcacttggaaaatatgttctaaccctttctttgggaggaactatattaagggcatggaatcttccagatggacatatgatctgggaaactaaccttcggatctctacagcatcaaatccacagttgcatgttatgtcaaacaataaagtggccaatgacaacttggttttagtttcagctgggcgatggatttatgctgtatcaagcactgatggggcaattttatgggaaaaggagttttctcttgatggcttagaaattaagcggattctccaatcacctgaaaatggtattgtatatgctttaggacttgctggttcctcaaagctagctttgtatcacttgagtgctaaaactggagagatactaaaagatatccaagagtcactccctggtggattattgggtgaaacagtacttgtttctgataatgtgttggtagcattagataaggccagatcaagtctgttagttattgaattcaagggtgagagaattagctacaacaagcttttgctgtcgtgcaacatttgggttctgaaattgagtttatcgtaaaatctacaagtgatctaagcagtgaaattattaaagaaaagcttgttatagaccaaaataggggcaatgttgagaaggtcttcttgaatagttatattcgaaccgacagatctcatggttttcgagctttggttgtaatggaggatcattcactcttgttaattcaacaaggtgaggttgtttggagcagagaggatgggctggcttcaattgttgatgtaacaacatcagaattgcctgttgagaaggatggtgtatcagttgccgatgtggaacacaatctctttgagtggcttaagggacacatgctgaaactcaaaggaagtctaatgcttgctaatgctgatgaagttgctgcaatccaagcaatgagactaaaaagctctgagaaaaataagatgacaagagaccataatggatttcgcaaactccttgttgtattgacaaaagcgggcaaagtgatggctctgcacactggagatggacgtgttatctggtcgaaattggtgccatctcttcgtgcctccagatgtggtggagtcccttctgcattaaggatataccaatggcaggtcccgcatcacagtgtcatgcgtgaaaatccatctgtacttgttgttggcaaatttggagcagaaccttcaattcctggtgtattctctattcttgattcatattctggagaagaactgaactctatgaaacttgaccattctgttgtccaaattattcccttgacactgaaggattcatcagagcaacaacttcatctgtttgttgattccgattccaatgcacatttatatccgaaatctccagatgctctcaatgtatttcttcatgaaatgtcaaacctgtatttctactctgtagatattcaggcaaatgttattaaagggtattcattacagaagtcatgtaatctcaatgtgggtgatgagtactgctttagtacgaaggagttatggttcatcatctttccttctgattctgaaaggattactatctctgaaacacgaaagatgaatgaggttgttcatacccaagctaagataagcggtgaccatgatgtgatgtacaatcactggacgcatactccatcgtgtgactcatcatggtgcacaaggccctgtacatgcagttttgagcgagaactgggttgtctatcattattttaatcttcgagctcacagatttgaaatggcggtgatcgagatatatgatcaatctagggcgggcaataaagatgtcacgaagctcatactagggaagcataatcttttggcaccaattacatcttatgcccgccctgaggtggcagtaaaatcccagtcatactttttcacccattcagtaaaagcaatggcagttacacaaacggctaaggggatcacttccaagcagcttctgttgggtactattggtgaccaggttttggcacttgataagcgctatcttgatccacgccgttcagtgaacccgacacagcaagaaaaagaagagggcattataccattaacagattctttgcctataataccccagtcctttgtgacgcactctcatcaagtggaggccctgcgagccattgtttctattcctgcaaagttggagtccactattgttttcacatatggtgtcgatctattctacacccagcttgccccgtcaagaacctatgattccctaaccgacgaattcagctatgcgctgcttctaatcacgatcgcagtcctggttgccgccattattggtacatggatttggtctgagaaaaaggagttgagagacaagtggaggtgagcaaggtctcagtgttctgacgctgaggaaattttgggccctagtcagctaccttctcctcctctccccttttcattgtagtgctagagttcgtttcactttttgactaggactttatttatgtaaccgtttgacaacaaagcctatctgccgtgaattgtcacactgcggaggccttatagaaagccacttacgcaattaaagattcaggaaatgacatcgaagggttagcagagcgcagatggcgtgaatctgtaccactgcagccaaacacttcacagcagattttgtagctattgttgttggtagagggtttccgcttctcttgtgtaactgaaagctcgtctttatttcaatcactatacctttcttgacagaaactgtatatctcttccaatgcactgtcattacttctgctgttagcctgtgatagggtgggctacaagatgctctacgttggtgcggtttgcgcaacctcagtcctccagggcatatctttattctgaaggtgatgtaacaactacatcattgaaccaatgatggttattgctacttcctgatcggatcgttcatgtgttaatgatggcagtgatcaagtcaggtaccatttaaagatttgtagcatcttttgtcaaggttatctttcttttggaatcttgatgctcgtttttttgtgtgtgtgcatattatt

SEQ ID NO: 59192 - DNA, 3836 bp, Zea Mays
ctgacacacgattggtgcgtatcgaaagtactcgttaatatctccggcatcgtcacggcggcagccgggatcccccccggtacgagttggtcgagccgtcacgtggggccgctctggcactgccccatggcccccatcaaacactcgccccaacctcaaacagtgaacggcgccacctctccgccgccgtcagatcggagctcgactccgaaccccgcttttcagccgccatggcggcgccaccgcgccgctcgctccttgtcctcctcgcggggatcctagttttcggctccctcaccaccctcgccacagccatctacgaggaccaagtcggtctcgcggactggcaccagaagtacattggcaaagtaaagcaagcagtttaccacagccaaaagagtggaaggaggcgtgttgtagtcttgacagaggaaaatgtgatctcatctcttgatctacgttctggagatatattctggcgacatgtcattgacaagaacgaccccttggatcagcttagtctttcacttggaaaatatgttctaaccctttctttgggaggaactatattaagggcatggaatcttccagatggacatatgatctgggaaactaaccttcggatctctacagcatcaaatccacagttgcatgttatgtcaaacaataaagtggccaatgacaacttggttttagtttcagctgggcgatggatttatgctgtatcaagcactgatggggcaattttatgggaaaaggagttttctcttgatggcttagaaattaagcggattctccaatcacctgaaaatggtattgtatatgctttaggacttgctggttcctcaaagctagctttgtatcacttgagtgctaaaactggagagatactaaaagatatccaagagtcactccctggtggattattgggtgaaacagtacttgtttctgataatgtgttggtagcattagataaggccagatcaagtctgttagttattgaattcaagggtgagagaattagctacaacaaggtgcatgtttcagatcttgttcaagacttatcaggatcacttgagcttcaatctttgtccaatggtgtcatatctttgcaaacatcatcttctatttccctcctaaagctcaaaggtactgatggattggaagtacttcagagatttgaccagccagctgctgtcagtgattccctgacaatcacagaaaaagaagcagcttttgctgtcgtgcaacatttgggttctgaaattgagtttatcgtaaaatctacaagtgatctaagcagtgaaattattaaagaaaagcttgttatagaccaaaataggggcaatgttgagaaggtcttcttgaatagttatattcgaaccgacagatctcatggttttcgagctttggttgtaatggaggatcattcactcttgttaattcaacaaggtgaggttgtttggagcagagaggatgggctggcttcaattgttgatgtaacaacatcagaattgcctgttgagaaggatggtgtatcagttgccgatgtggaacacaatctctttgagtggcttaagttgctgcaatccaagcaatgagactaaaaagctctgagaaaaataagatgacaagagaccataatggatttcgcaaactccttgttgtattgacaaaagcgggcaaagtgatggctctgcacactggagatggacgtgttatctggtcgaaattggtgccatctcttcgtgcctccagatgtggtggagtcccttctgcattaaggatataccaatggcaggtcccgcatcacagtgtcatgcgtgaaaatccatctgtacttgttgttggcaaatttggagcagaaccttcaattcctggtgtattctctattcttgattcatattctggagaagaactgaactctatgaaacttgaccattctgttgtccaaattattcccttgacactgaaggattcatcagagcaacaacttcatctgtttgttgattccgattccaatgcacatttatatccgaaatctccagatgctctcaatgtatttcttcatgaaatgtcaaacctgtatttctactctgtagatattcaggcaaatgttattaaagggtattcattacagaagtcatgtaatctcaatgtgggtgatgagtactgctttagtacgaaggagttatggttcatcatctttccttctgattctgaaaggattactatctctgaaacacgaaagatgaatgaggttgttcatacccaagctaagataagcggtgaccatgatgtgatgtacaagtacttgtcaaagaatttagtttttgttgctactttgtctcctaaagctgctgttgatattggatctgcactacctgaagaagcttcacttgttgcatatcttattgatgcagtcactggacgcatactccatcgtgtgactcatcatggtgcacaaggccctgtacatgcagttttgagcgagaactgggttgtctatcattattttaatcttcgagctcacagatttgaaatggcggtgatcgagatatatgatcaatctagggcgggcaataaagatgtcacgaagctcatactagggaagcataatcttttggcaccaattacatcttatgcccgccctgaggtggcagtaaaatcccagtcatactttttcacccattcagtaaaagcaatggcagttacacaaacggctaaggggatcacttccaagcagcttctgttgggtactattggtgaccaggttttggcacttgataagcgctatcttgatccacgccgttcagtgaacccgacacagcaagaaaaagaagagggcattataccattaacagattctttgcctataataccccagtcctttgtgacgcactctcatcaagtggaggccctgcgagccattgtttctattcctgcaaagttggagtccactattgttttcacatatggtgtcgatctattctacacccagcttgccccgtcaagaacctatgattccctaaccgacgaattcagctatgcgctgcttctaatcacgatcgcagtcctggttgccgccattattggtacatggatttggtctgagaaaaaggagttgagagacaagtggaggtgagcaaggtctcagtgttctgacgctgaggaaattttgggccctagtcagctaccttctcctcctctccccttttcattgtagtgctagagttcgtttcactttttgactaggactttatttatgtaaccgtttgacaacaaagcctatctgccgtgaattgtcacactgcggaggccttatagaaagccacttacgcaattaaagattcaggaaatgacatcgaagggttagcagagcgcagatggcgtgaatctgtaccactgcagccaaacacttcacagcagattttgtagctattgttgttggtagagggtttccgcttctcttgtgtaactgaaagctcgtctttatttcaatcactatacctttcttgacagaaactgtatatctcttccaatgcactgtcattacttctgctgttagcctgtgatagggtgggctacaagatgctctacgttggtgcggtttgcgcaacctcagtcctccagggcatatctttattctgaaggtgatgtaacaactacatcattgaaccaatgatggttattgctacttcctgatcggatcgttcatgtgttaatgatggcagtgatcaagtcaggtaccatttaaagatttgtagcatcttttgtcaaggttatctttcttttggaatcttgatgctcgtttttttgtgtgtgtgcatattatt

SEQ ID NO: 59193 - DNA, 3818 bp, Zea Mays
gttaatatctccggcatcgtcacggcggcagccgggatcccccccggtacgagttggtcgagccgtcacgtggggccgctctggcactgccccatggcccccatcaaacactcgccccaacctcaaacagtgaacggcgccacctctccgccgccgtcagatcggagctcgactccgaaccccgcttttcagccgccatggcggcgccaccgcgccgctcgctccttgtcctcctcgcggggatcctagttttcggctccctcaccaccctcgccacagccatctacgaggaccaagtcggtctcgcggactggcaccagaagtacattggcaaagtaaagcaagcagtttaccacagccaaaagagtggaaggaggcgtgttgtagtcttgacagaggaaaatgtgatctcatctcttgatctacgttctggagatatattctggcgacatgtcattgacaagaacgaccccttggatcagcttagtctttcacttggaaaatatgttctaaccctttctttgggaggaactatattaagggcatggaatcttccagatggacatatgatctgggaaactaaccttcggatctctacagcatcaaatccacagttgcatgttatgtttcagctgggcgatggatttatgctgtatcaagcactgatggggcaattttatgggaaaaggagttttctcttgatggcttagaaattaagcggattctccaatcacctgaaaatggtattgtatatgctttaggacttgctggttcctcaaagctagctttgtatcacttgagtgctaaaactggagagatactaaaagatatccaagagtcactccctggtggattattgggtgaaacagtacttgtttctgataatgtgttggtagcattagataaggccagatcaagtctgttagttattgaattcaagggtgagagaattagctacaacaaggtgcatgtttcagatcttgttcaagacttatcaggatcacttgagcttcaatctttgtccaatggtgtcatatctttgcaaacatcatcttctatttccctcctaaagctcaaaggtactgatggattggaagtacttcagagatttgaccagccagctgctgtcagtgattccctgacaatcacagaaaaagaagcagcttttgctgtcgtgcaacatttgggttctgaaattgagtttatcgtaaaatctacaagtgatctaagcagtgaaattattaaagaaaagcttgttatagaccaaaataggggcaatgttgagaaggtcttcttgaatagttatattcgaaccgacagatctcatggttttcgagctttggttgtaatggaggatcattcactcttgttaattcaacaaggtgaggttgtttggagcagagaggatgggctggcttcaattgttgatgtaacaacatcagaattgcctgttgagaaggatggtgtatcagttgccgatgtggaacacaatctctttgagtggcttaagggacacatgctgaaactcaaaggaagtctaatgcttgctaatgctgatgaagttgctgcaatccaagcaatgagactaaaaagctctgagaaaaataagatgacaagagaccataatggatttcgcaaactccttgttgtattgacaaaagcgggcaaagtgatggctctgcacactggagatggacgtgttatctggtcgaaattggtgccatctcttcgtgcctccagatgtggtggagtcccttctgcattaaggatataccaatggcaggtcccgcatcacagtgtcatgcgtgaaaatccatctgtacttgttgttggcaaatttggagcagaaccttcaattcctggtgtattctctattcttgattcatattctggagaagaactgaactctatgaaacttgaccattctgttgtccaaattattcccttgacactgaaggattcatcagagcaacaacttcatctgtttgttgattccgattccaatgcacatttatatccgaaatctccagatgctctcaatgtatttcttcatgaaatgtcaaacctgtatttctactctgtagatattcaggcaaatgttattaaagggtattcattacagaagtcatgtaatctcaatgtgggtgatgagtactgctttagtacgaaggagttatggttcatcatctttccttctgattctgaaaggattactatctctgaaacacgaaagatgaatgaggttgttcatacccaagctaagataagcggtgaccatgatgtgatgtacaagtacttgtcaaagaatttagtttttgttgctactttgtctcctaaagctgctgttgatattggatctgcactacctgaagaagcttcacttgttgcatatcttattgatgcagtcactggacgcatactccatcgtgtgactcatcatggtgcacaaggccctgtacatgcagttttgagcgagaactgggttgtctatcattattttaatcttcgagctcacagatttgaaatggcggtgatcgagatatatgatcaatctagggcgggcaataaagatgtcacgaagctcatactagggaagcataatcttttggcaccaattacatcttatgcccgccctgaggtggcagtaaaatcccagtcatactttttcacccattcagtaaaagcaatggcagttacacaaacggctaaggggatcacttccaagcagcttctgttgggtactattggtgaccaggttttggcacttgataagcgctatcttgatccacgccgttcagtgaacccgacacagcaagaaaaagaagagggcattataccattaacagattctttgcctataataccccagtcctttgtgacgcactctcatcaagtggaggccctgcgagccattgtttctattcctgcaaagttggagtccactattgttttcacatatggtgtcgatctattctacacccagcttgccccgtcaagaacctatgattccctaaccgacgaattcagctatgcgctgcttctaatcacgatcgcagtcctggttgccgccattattggtacatggatttggtctgagaaaaaggagttgagagacaagtggaggtgagcaaggtctcagtgttctgacgctgaggaaattttgggccctagtcagctaccttctcctcctctccccttttcattgtagtgctagagttcgtttcactttttgactaggactttatttatgtaaccgtttgacaacaaagcctatctgccgtgaattgtcacactgcggaggccttatagaaagccacttacgcaattaaagattcaggaaatgacatcgaagggttagcagagcgcagatggcgtgaatctgtaccactgcagccaaacacttcacagcagattttgtagctattgttgttggtagagggtttccgcttctcttgtgtaactgaaagctcgtctttatttcaatcactatacctttcttgacagaaactgtatatctcttccaatgcactgtcattacttctgctgttagcctgtgatagggtgggctacaagatgctctacgttggtgcggtttgcgcaacctcagtcctccagggcatatctttattctgaaggtgatgtaacaactacatcattgaaccaatgatggttattgctacttcctgatcggatcgttcatgtgttaatgatggcagtgatcaagtcaggtaccatttaaagatttgtagcatcttttgtcaaggttatctttcttttggaatcttgatgctcgtttttttgtgtgtgtgcatattatt

SEQ ID NO: 59194 - DNA, 3827 bp, Zea Mays
gtcacggcggcagccgggatcccccccggtacgagttggtcgagccgtcacgtggggccgctctggcactgccccatggcccccatcaaacactcgccccaacctcaaacagtgaacggcgccacctctccgccgccgtcagatcggagctcgactccgaaccccgcttttcagccgccatggcggcgccaccgcgccgctcgctccttgtcctcctcgcggggatcctagttttcggctccctcaccaccctcgccacagccatctacgaggaccaagtcggtctcgcggactggcaccagaagtacattggcaaagtaaagcaagcagtttaccacagccaaaagagtggaaggaggcgtgttgtagtcttgacagaggaaaatgtgatctcatctcttgatctacgttctggagatatattctggcgacatgtcattgacaagaacgaccccttggatcagcttagtctttcacttggaaaatatgttctaaccctttctttgggaggaactatattaagggcatggaatcttccagatggacatatgatctgggaaactaaccttcggatctctacagcatcaaatccacagttgcatgttatgtcaaacaataaagtggccaatgacaacttggttttagtttcagctgggcgatggatttatgctgtatcaagcactgatggggcaattttatgggaaaaggagttttctcttgatggcttagaaattaagcggattctccaatcacctgaaaatggtattgtatatgctttaggacttgctggttcctcaaagctagctttgtatcacttgagtgctaaaactggagagatactaaaagatatccaagagtcactccctggtggattattgggtgaaacagtacttgtttctgataatgtgttggtagcattagataaggccagatcaagtctgttagttattgaattcaagggtgagagaattagctacaacaaggtgcatgtttcagatcttgttcaagacttatcaggatcacttgagcttcaatctttgtccaatggtgtcatatctttgcaaacatcatcttctatttccctcctaaagctcaaaggtactgatggattggaagtacttcagagatttgaccagccagctgctgtcagtgattccctgacaatcacagaaaaagaagcagcttttgctgtcgtgcaacatttgggttctgaaattgagtttatcgtaaaatctacaagtgatctaagcagtgaaattattaaagaaaagcttgttatagaccaaaataggggcaatgttgagaaggtcttcttgaatagttatattcgaaccgacagatctcatggttttcgagctttggttgtaatggaggatcattcactcttgttaattcaacaaggtgaggttgtttggagcagagaggatgggctggcttcaattgttgatgtaacaacatcagaattgcctgttgagaaggatggtgtatcagttgccgatgtggaacacaatctctttgagtggcttaagggacacatgctgaaactcaaaggaagtctaatgcttgctaatgctgatgaagttgctgcaatccaagcaatgagactaaaaagctctgagaaaaataagatgacaagagaccataatggatttcgcaaactccttgttgtattgacaaaagcgggcaaagtgatggctctgcacactggagatggacgtgttatctggtcgaaattggtgccatctcttcgtgcctccagatgtggtggagtcccttctgcattaaggatataccaatggcaggtcccgcatcacagtgtcatgcgtgaaaatccatctgtacttgttgttggcaaatttggagcagaaccttcaattcctggtgtattctctattcttgattcatattctggagaagaactgaactctatgaaacttgaccattctgttgtccaaattattcccttgacactgaaggattcatcagagcaacaacttcatctgtttgttgattccgattccaatgcacatttatatccgaaatctccagatgctctcaatgtatttcttcatgaaatgtcaaacctgtatttctactctgtagatattcaggcaaatgttattaaagggtattcattacagaagtcatgtaatctcaatgtgggtgatgagtactgctttagtacgaaggagttatggttcatcatctttccttctgattctgaaaggattactatctctgaaacacgaaagatgaatgaggttgttcatacccaagctaagataagcggtgaccatgatgtgatgtacaagtacttgtcaaagaatttagtttttgttgctactttgtctcctaaagctgctgttgatattggatctgcactacctgaagaagcttcacttgttgcatatcttattgatgcagtcactggacgcatactccatcgtgtgactcatcatggtgcacaaggccctgtacatgcagttttgagcgagaactgggttgtctatcattattttaatcttcgagctcacagatttgaaatggcggtgatcgagatatatgatcaatctagggcgatgtcacgaagctcatactagggaagcataatcttttggcaccaattacatcttatgcccgccctgaggtggcagtaaaatcccagtcatactttttcacccattcagtaaaagcaatggcagttacacaaacggctaaggggatcacttccaagcagcttctgttgggtactattggtgaccaggttttggcacttgataagcgctatcttgatccacgccgttcagtgaacccgacacagcaagaaaaagaagagggcattataccattaacagattctttgcctataataccccagtcctttgtgacgcactctcatcaagtggaggccctgcgagccattgtttctattcctgcaaagttggagtccactattgttttcacatatggtgtcgatctattctacacccagcttgccccgtcaagaacctatgattccctaaccgacgaattcagctatgcgctgcttctaatcacgatcgcagtcctggttgccgccattattggtacatggatttggtctgagaaaaaggagttgagagacaagtggaggtgagcaaggtctcagtgttctgacgctgaggaaattttgggccctagtcagctaccttctcctcctctccccttttcattgtagtgctagagttcgtttcactttttgactaggactttatttatgtaaccgtttgacaacaaagcctatctgccgtgaattgtcacactgcggaggccttatagaaagccacttacgcaattaaagattcaggaaatgacatcgaagggttagcagagcgcagatggcgtgaatctgtaccactgcagccaaacacttcacagcagattttgtagctattgttgttggtagagggtttccgcttctcttgtgtaactgaaagctcgtctttatttcaatcactatacctttcttgacagaaactgtatatctcttccaatgcactgtcattacttctgctgttagcctgtgatagggtgggctacaagatgctctacgttggtgcggtttgcgcaacctcagtcctccagggcatatctttattctgaaggtgatgtaacaactacatcattgaaccaatgatggttattgctacttcctgatcggatcgttcatgtgttaatgatggcagtgatcaagtcaggtaccatttaaagatttgtagcatcttttgtcaaggttatctttcttttggaatcttgatgctcgtttttttgtgtgtgtgcatattatt

SEQ ID NO: 59195 - DNA, 3551 bp, Zea Mays
cgggatcccccccggtacgagttggtcgagccgtcacgtggggccgctctggcactgccccatggcccccatcaaacactcgccccaacctcaaacagtgaacggcgccacctctccgccgccgtcagatcggagctcgactccgaaccccgcttttcagccgccatggcggcgccaccgcgccgctcgctccttgtcctcctcgcggggatcctagttttcggctccctcaccaccctcgccacagccatctacgaggaccaagtcggtctcgcggactggcaccagaagtacattggcaaagtaaagcaagcagtttaccacagccaaaagagtggaaggaggcgtgttgtagtcttgacagaggaaaatgtgatctcatctcttgatctacgttctggagatatattctggcgacatgtcattgacaagaacgaccccttggatcagcttagtctttcacttggaaaatatgttctaaccctttctttgggaggaactatattaagggcatggaatcttccagatggacatatgatctgggaaactaaccttcggatctctacagcatcaaatccacagttgcatgttatgtcaaacaataaagtggccaatgacaacttggttttagtttcagctgggcgatggatttatgctgtatcaagcactgatggggcaattttatgggaaaaggagttttctcttgatggatcttgttcaagacttatcaggatcacttgagcttcaatctttgtccaatggtgtcatatctttgcaaacatcatcttctatttccctcctaaagctcaaaggtactgatggattggaagtacttcagagatttgaccagccagctgctgtcagtgattccctgacaatcacagaaaaagaagcagcttttgctgtcgtgcaacatttgggttctgaaattgagtttatcgtaaaatctacaagtgatctaagcagtgaaattattaaagaaaagcttgttatagaccaaaataggggcaatgttgagaaggtcttcttgaatagttatattcgaaccgacagatctcatggttttcgagctttggttgtaatggaggatcattcactcttgttaattcaacaaggtgaggttgtttggagcagagaggatgggctggcttcaattgttgatgtaacaacatcagaattgcctgttgagaaggatggtgtatcagttgccgatgtggaacacaatctctttgagtggcttaagggacacatgctgaaactcaaaggaagtctaatgcttgctaatgctgatgaagttgctgcaatccaagcaatgagactaaaaagctctgagaaaaataagatgacaagagaccataatggatttcgcaaactccttgttgtattgacaaaagcgggcaaagtgatggctctgcacactggagatggacgtgttatctggtcgaaattggtgccatctcttcgtgcctccagatgtggtggagtcccttctgcattaaggatataccaatggcaggtcccgcatcacagtgtcatgcgtgaaaatccatctgtacttgttgttggcaaatttggagcagaaccttcaattcctggtgtattctctattcttgattcatattctggagaagaactgaactctatgaaacttgaccattctgttgtccaaattattcccttgacactgaaggattcatcagagcaacaacttcatctgtttgttgattccgattccaatgcacatttatatccgaaatctccagatgctctcaatgtatttcttcatgaaatgtcaaacctgtatttctactctgtagatattcaggcaaatgttattaaagggtattcattacagaagtcatgtaatctcaatgtgggtgatgagtactgctttagtacgaaggagttatggttcatcatctttccttctgattctgaaaggattactatctctgaaacacgaaagatgaatgaggttgttcatacccaagctaagataagcggtgaccatgatgtgatgtacaagtacttgtcaaagaatttagtttttgttgctactttgtctcctaaagctgctgttgatattggatctgcactacctgaagaagcttcacttgttgcatatcttattgatgcagtcactggacgcatactccatcgtgtgactcatcatggtgcacaaggccctgtacatgcagttttgagcgagaactgggttgtctatcattattttaatcttcgagctcacagatttgaaatggcggtgatcgagatatatgatcaatctagggcgggcaataaagatgtcacgaagctcatactagggaagcataatcttttggcaccaattacatcttatgcccgccctgaggtggcagtaaaatcccagtcatactttttcacccattcagtaaaagcaatggcagttacacaaacggctaaggggatcacttccaagcagcttctgttgggtactattggtgaccaggttttggcacttgataagcgctatcttgatccacgccgttcagtgaacccgacacagcaagaaaaagaagagggcattataccattaacagattctttgcctataataccccagtcctttgtgacgcactctcatcaagtggaggccctgcgagccattgtttctattcctgcaaagttggagtccactattgttttcacatatggtgtcgatctattctacacccagcttgccccgtcaagaacctatgattccctaaccgacgaattcagctatgcgctgcttctaatcacgatcgcagtcctggttgccgccattattggtacatggatttggtctgagaaaaaggagttgagagacaagtggaggtgagcaaggtctcagtgttctgacgctgaggaaattttgggccctagtcagctaccttctcctcctctccccttttcattgtagtgctagagttcgtttcactttttgactaggactttatttatgtaaccgtttgacaacaaagcctatctgccgtgaattgtcacactgcggaggccttatagaaagccacttacgcaattaaagattcaggaaatgacatcgaagggttagcagagcgcagatggcgtgaatctgtaccactgcagccaaacacttcacagcagattttgtagctattgttgttggtagagggtttccgcttctcttgtgtaactgaaagctcgtctttatttcaatcactatacctttcttgacagaaactgtatatctcttccaatgcactgtcattacttctgctgttagcctgtgatagggtgggctacaagatgctctacgttggtgcggtttgcgcaacctcagtcctccagggcatatctttattctgaaggtgatgtaacaactacatcattgaaccaatgatggttattgctacttcctgatcggatcgttcatgtgttaatgatggcagtgatcaagtcaggtaccatttaaagatttgtagcatcttttgtcaaggttatctttcttttggaatcttgatgctcgtttttttgtgtgtgtgcatattatt

SEQ ID NO: 59196 - DNA, 1528 bp, Zea Mays
cgagccgtcacgtggggccgctctggcactgccccatggcccccatcaaacactcgccccaacctcaaacagtgaacggcgccacctctccgccgccgtcagatcggagctcgactccgaaccccgcttttcagccgccatggcggcgccaccgcgccgctcgctccttgtcctcctcgcggggatcctagttttcggctccctcaccaccctcgccacagccatctacgaggaccaagtcggtctcgcggactggcaccagaagtacattggcaaagtaaagcaagcagtttaccacagccaaaagagtggaaggaggcgtgttgtagtcttgacagaggaaaatgtgatctcatctcttgatctacgttctggagatatattctggcgacatgtcattgacaagaacgaccccttggatcagcttagtctttcacttggaaaatatgttctaaccctttctttgggaggaactatattaagggcatggaatcttccagatggacatatgatctgggaaactaaccttcggatctctacagcatcaaatccacagttgcatgttatgtttcagctgggcgatggatttatgctgtatcaagcactgatggggcaattttatgggaaaaggagttttctcttgatggcttagaaattaagcggattctccaatcacctgaaaatggtattgtatatgctttaggacttgctggttcctcaaagctagctttgtatcacttgagtgctaaaactggagagatactaaaagatatccaagagtcactccctggtggattattgggtgaaacagtacttgtttctgataatgtgttggtagcattagataaggccagatcaagtctgttagttattgaattcaagggtgagagaattagctacaacaaggtgcatgtttcagatcttgttcaagacttatcaggatcacttgagcttcaatctttgtccaatggtgtcatatctttgcaaacatcatcttctatttccctcctaaagctcaaaggtactgatggattggaagtacttcagagatttgaccagccagctgctgtcagtgattccctgacaatcacagaaaaagaagcagcttttgctgtcgtgcaacatttgggttctgaaattgagtttatcgtaaaatctacaagtgatctaagcagtgaaattattaaagaaaagcttgttatagaccaaaataggggcaatgttgagaaggtcttcttgaatagttatattcgaaccgacagatctcatggttttcgagctttggttgtaatggaggatcattcactcttgttaattcaacaaggtgaggttgtttggagcagagaggatgggctggcttcaattgttgatgtaacaacatcagaattgcctgttgagaaggatggtgtatcagttgccgatgtggaacacaatctctttgagtggcttaaggtgatacaaagttattcattcataaaaccggtgacaacattagcatatgatccccacttgtggagtttggttctta

SEQ ID NO: 59197 - DNA, 3749 bp, Zea Mays
atcaaacactcgccccaacctcaaacagtgaacggcgccacctctccgccgccgtcagatcggagctcgactccgaaccccgcttttcagccgccatggcggcgccaccgcgccgctcgctccttgtcctcctcgcggggatcctagttttcggctccctcaccaccctcgccacagccatctacgaggaccaagtcggtctcgcggactggcaccagaagtacattggcaaagtaaagcaagcagtttaccacagccaaaagagtggaaggaggcgtgttgtagtcttgacagaggaaaatgtgatctcatctcttgatctacgttctggagatatattctggcgacatgtcattgacaagaacgaccccttggatcagcttagtctttcacttggaaaatatgttctaaccctttctttgggaggaactatattaagggcatggaatcttccagatggacatatgatctgggaaactaaccttcggatctctacagcatcaaatccacagttgcatgttatgtcaaacaataaagtggccaatgacaacttggttttagtttcagctgggcgatggatttatgctgtatcaagcactgatggggcaattttatgggaaaaggagttttctcttgatgggaaattaagcggattctccaatcacctgaaaatggtattgtatatgctttaggacttgctggttcctcaaagctagctttgtatcacttgagtgctaaaactggagagatactaaaagatatccaagagtcactccctggtggattattgggtgaaacagtacttgtttctgataatgtgttggtagcattagataaggccagatcaagtctgttagttattgaattcaagggtgagagaattagctacaacaaggtgcatgtttcagatcttgttcaagacttatcaggatcacttgagcttcaatctttgtccaatggtgtcatatctttgcaaacatcatcttctatttccctcctaaagctcaaaggtactgatggattggaagtacttcagagatttgaccagccagctgctgtcagtgattccctgacaatcacagaaaaagaagcagcttttgctgtcgtgcaacatttgggttctgaaattgagtttatcgtaaaatctacaagtgatctaagcagtgaaattattaaagaaaagcttgttatagaccaaaataggggcaatgttgagaaggtcttcttgaatagttatattcgaaccgacagatctcatggttttcgagctttggttgtaatggaggatcattcactcttgttaattcaacaaggtgaggttgtttggagcagagaggatgggctggcttcaattgttgatgtaacaacatcagaattgcctgttgagaaggatggtgtatcagttgccgatgtggaacacaatctctttgagtggcttaagggacacatgctgaaactcaaaggaagtctaatgcttgctaatgctgatgaagttgctgcaatccaagcaatgagactaaaaagctctgagaaaaataagatgacaagagaccataatggatttcgcaaactccttgttgtattgacaaaagcgggcaaagtgatggctctgcacactggagatggacgtgttatctggtcgaaattggtgccatctcttcgtgcctccagatgtggtggagtcccttctgcattaaggatataccaatggcaggtcccgcatcacagtgtcatgcgtgaaaatccatctgtacttgttgttggcaaatttggagcagaaccttcaattcctggtgtattctctattcttgattcatattctggagaagaactgaactctatgaaacttgaccattctgttgtccaaattattcccttgacactgaaggattcatcagagcaacaacttcatctgtttgttgattccgattccaatgcacatttatatccgaaatctccagatgctctcaatgtatttcttcatgaaatgtcaaacctgtatttctactctgtagatattcaggcaaatgttattaaagggtattcattacagaagtcatgtaatctcaatgtgggtgatgagtactgctttagtacgaaggagttatggttcatcatctttccttctgattctgaaaggattactatctctgaaacacgaaagatgaatgaggttgttcatacccaagctaagataagcggtgaccatgatgtgatgtacaagtacttgtcaaagaatttagtttttgttgctactttgtctcctaaagctgctgttgatattggatctgcactacctgaagaagcttcacttgttgcatatcttattgatgcagtcactggacgcatactccatcgtgtgactcatcatggtgcacaaggccctgtacatgcagttttgagcgagaactgggttgtctatcattattttaatcttcgagctcacagatttgaaatggcggtgatcgagatatatgatcaatctagggcgggcaataaagatgtcacgaagctcatactagggaagcataatcttttggcaccaattacatcttatgcccgccctgaggtggcagtaaaatcccagtcatactttttcacccattcagtaaaagcaatggcagttacacaaacggctaaggggatcacttccaagcagcttctgttgggtactattggtgaccaggttttggcacttgataagcgctatcttgatccacgccgttcagtgaacccgacacagcaagaaaaagaagagggcattataccattaacagattctttgcctataataccccagtcctttgtgacgcactctcatcaagtggaggccctgcgagccattgtttctattcctgcaaagttggagtccactattgttttcacatatggtgtcgatctattctacacccagcttgccccgtcaagaacctatgattccctaaccgacgaattcagctatgcgctgcttctaatcacgatcgcagtcctggttgccgccattattggtacatggatttggtctgagaaaaaggagttgagagacaagtggaggtgagcaaggtctcagtgttctgacgctgaggaaattttgggccctagtcagctaccttctcctcctctccccttttcattgtagtgctagagttcgtttcactttttgactaggactttatttatgtaaccgtttgacaacaaagcctatctgccgtgaattgtcacactgcggaggccttatagaaagccacttacgcaattaaagattcaggaaatgacatcgaagggttagcagagcgcagatggcgtgaatctgtaccactgcagccaaacacttcacagcagattttgtagctattgttgttggtagagggtttccgcttctcttgtgtaactgaaagctcgtctttatttcaatcactatacctttcttgacagaaactgtatatctcttccaatgcactgtcattacttctgctgttagcctgtgatagggtgggctacaagatgctctacgttggtgcggtttgcgcaacctcagtcctccagggcatatctttattctgaaggtgatgtaacaactacatcattgaaccaatgatggttattgctacttcctgatcggatcgttcatgtgttaatgatggcagtgatcaagtcaggtaccatttaaagatttgtagcatcttttgtcaaggttatctttcttttggaatcttgatgctcgtttttttgtgtgtgtgcatattatt

SEQ ID NO: 59198 - DNA, 3615 bp, Zea Mays
cttcgtccaagggcagtgacgcagatttgctgaattgcttcagtatccatgatttctcctctctcttaatcaggcaccagaagtacattggcaaagtaaagcaagcagtttaccacagccaaaagagtggaaggaggcgtgttgtagtcttgacagaggaaaatgtgatctcatctcttgatctacgttctggagatatattctggcgacatgtcattgacaagaacgaccccttggatcagcttagtctttcacttggaaaatatgttctaaccctttctttgggaggaactatattaagggcatggaatcttccagatggacatatgatctgggaaactaaccttcggatctctacagcatcaaatccacagttgcatgttatgtcaaacaataaagtggccaatgacaacttggttttagtttcagctgggcgatggatttatgctgtatcaagcactgatggggcaattttatgggaaaaggagttttctcttgatggcttagaaattaagcggattctccaatcacctgaaaatggtattgtatatgctttaggacttgctggttcctcaaagctagctttgtatcacttgagtgctaaaactggagagatactaaaagatatccaagagtcactccctggtggattattgggtgaaacagtacttgtttctgataatgtgttggtagcattagataaggccagatcaagtctgttagttattgaattcaagggtgagagaattagctacaacaaggtgcatgtttcagatcttgttcaagacttatcaggatcacttgagcttcaatctttgtccaatggtgtcatatctttgcaaacatcatcttctatttccctcctaaagctcaaaggtactgatggattggaagtacttcagagatttgaccagccagctgctgtcagtgattccctgacaatcacagaaaaagaagcagcttttgctgtcgtgcaacatttgggttctgaaattgagtttatcgtaaaatctacaagtgatctaagcagtgaaattattaaagaaaagcttgttatagaccaaaataggggcaatgttgagaaggtcttcttgaatagttatattcgaaccgacagatctcatggttttcgagctttggttgtaatggaggatcattcactcttgttaattcaacaaggtgaggttgtttggagcagagaggatgggctggcttcaattgttgatgtaacaacatcagaattgcctgttgagaaggatggtgtatcagttgccgatgtggaacacaatctctttgagtggcttaagggacacatgctgaaactcaaaggaagtctaatgcttgctaatgctgatgaagttgctgcaatccaagcaatgagactaaaaagctctgagaaaaataagatgacaagagaccataatggatttcgcaaactccttgttgtattgacaaaagcgggcaaagtgatggctctgcacactggagatggacgtgttatctggtcgaaattggtgccatctcttcgtgcctccagatgtggtggagtcccttctgcattaaggatataccaatggcaggtcccgcatcacagtgtcatgcgtgaaaatccatctgtacttgttgttggcaaatttggagcagaaccttcaattcctggtgtattctctattcttgattcatattctggagaagaactgaactctatgaaacttgaccattctgttgtccaaattattcccttgacactgaaggattcatcagagcaacaacttcatctgtttgttgattccgattccaatgcacatttatatccgaaatctccagatgctctcaatgtatttcttcatgaaatgtcaaacctgtatttctactctgtagatattcaggcaaatgttattaaagggtattcattacagaagtcatgtaatctcaatgtgggtgatgagtactgctttagtacgaaggagttatggttcatcatctttccttctgattctgaaaggattactatctctgaaacacgaaagatgaatgaggttgttcatacccaagctaagataagcggtgaccatgatgtgatgtacaagtacttgtcaaagaatttagtttttgttgctactttgtctcctaaagctgctgttgatattggatctgcactacctgaagaagcttcacttgttgcatatcttattgatgcagtcactggacgcatactccatcgtgtgactcatcatggtgcacaaggccctgtacatgcagttttgagcgagaactgggttgtctatcattattttaatcttcgagctcacagatttgaaatggcggtgatcgagatatatgatcaatctagggcgggcaataaagatgtcacgaagctcatactagggaagcataatcttttggcaccaattacatcttatgcccgccctgaggtggcagtaaaatcccagtcatactttttcacccattcagtaaaagcaatggcagttacacaaacggctaaggggatcacttccaagcagcttctgttgggtactattggtgaccaggttttggcacttgataagcgctatcttgatccacgccgttcagtgaacccgacacagcaagaaaaagaagagggcattataccattaacagattctttgcctataataccccagtcctttgtgacgcactctcatcaagtggaggccctgcgagccattgtttctattcctgcaaagttggagtccactattgttttcacatatggtgtcgatctattctacacccagcttgccccgtcaagaacctatgattccctaaccgacgaattcagctatgcgctgcttctaatcacgatcgcagtcctggttgccgccattattggtacatggatttggtctgagaaaaaggagttgagagacaagtggaggtgagcaaggtctcagtgttctgacgctgaggaaattttgggccctagtcagctaccttctcctcctctccccttttcattgtagtgctagagttcgtttcactttttgactaggactttatttatgtaaccgtttgacaacaaagcctatctgccgtgaattgtcacactgcggaggccttatagaaagccacttacgcaattaaagattcaggaaatgacatcgaagggttagcagagcgcagatggcgtgaatctgtaccactgcagccaaacacttcacagcagattttgtagctattgttgttggtagagggtttccgcttctcttgtgtaactgaaagctcgtctttatttcaatcactatacctttcttgacagaaactgtatatctcttccaatgcactgtcattacttctgctgttagcctgtgatagggtgggctacaagatgctctacgttggtgcggtttgcgcaacctcagtcctccagggcatatctttattctgaaggtgatgtaacaactacatcattgaaccaatgatggttattgctacttcctgatcggatcgttcatgtgttaatgatggcagtgatcaagtcaggtaccatttaaagatttgtagcatcttttgtcaaggttatctttcttttggaatcttgatgctcgtttttttgtgtgtgtgcatattatt

SEQ ID NO: 59199 - DNA, 2313 bp, Zea Mays
gtggactcacatgtaagtgagatagtaatggtatgaatccaaagtggtgatcttttaatggtatgaatccaaatttccccttttaaaaatagtatagattgaattctccccctcaaacaaaccactcttcgcttcgactcccactcccactctccctttccactctcaggctcccactccccccctaccggctaccctacccatcacacacaaacagccactcctcacctcccccgtcctccggttcatgtcctgctgctccccatgtcgcccccactcgacctcgactacataggcctctcgccggcggcggctgccgccgctgcccacgacgacctgaagggtaccgagctccgccttggtctgccggggtccggttcgccggaccgccgtgttgtggctgccaccgcaaccaccctggacctgctcccggctaagggcgccaagcgcgggttttctgacgaggcgccgacgccatcgcccggtgcagcttccgggaagggaaagaaggtagcggaagaggaggacgacaagaaggttgcagcgacgccgcagccggtcgcaaagtggtgggatggccaccaatccgaagctaccgcaagaacacgatgtctaccacccagctgaagggcagcaaggaggatgctgaggccaagcaggaccaggggttcctgtacgtcaaggtcagcatggatggcgcgccgtacctcaggaagattgacctcaagacttacaagaactacaaggacctgtcgactgcgcttgagaagatgttcagtggcttcagtactggtgagatgtctcgggttactctcctctcccggatggcacgtcagtatgtaattgtgtttcattttgatgtggatggtgtaagaagtacatcaagaagcctttaaaaagcatcataattgattccttggataagcaatagctttgacttaccgttagttttgagtaattgtgagattacaaacaattgaatccttggataagcaatagcttcgacttaccgttagttttgagtaattgtgagattacaaacaatctggcacatcttctttttttatctttagtgaactttttattccttgctaaacaaataccctgctgcttgttctgttattgcatttgcatcaagtctttcttagaaagattttatttcctgtaaggcaaaataatttttgtctccatgttatgattattcgaggatatcttcgggtcctgagtattattccagaaagctactatcactatgagagcaacatccactatatatttctgaaatttggagatctatggtctgtcctgtatttgtatatctaatatctcattagttgtcaccactttcttagaatcatggacatgaaaatgcggtccgagtcttttcagtagaaattttagtacaagaagaggttctcttctgctttccttttattggtcttacaggttagtatgggtgtaatgccatatcaggcaaggatggcttatctgagtaccgcaaggatggtgaatatgttctgacttacgaggacaaggatggagattggatgcttgttggcgatgtaccatgggagatgttcgctgactcttgccgcaggctcaggatcatgaaaggatcagatgcaattggacttgctccaagggcagctgataagtccaagaatcgcaactagaatggttgcttcttacagtccagagcaagagggagatatccagtgactgtagggatctttgtggaagccggaaaacgtctaacagtttcaagaagaattctgccttatggtctgtaccacatgtttttgctgctacgcaagtaaagaactccacgtctgtcaatgttagttttacaacatcgtctacggacaaaaaaaaaaccccccgctatttgattgttgctaagccttcgtacgacgtgtaaatggtttggtacaatgagtgctgcgactacgattgagcacccctctacctagtttgcaaaaaaacagtgtcccatggactgtctgttgtccctctatataaatgtccaatgaagcttgctaatgtgtggtcatcgtgttcatgttctggtccattcatctcgacagtgttgaaaccctgacgaagcaacttgtttcgaaagtgggcctcctctgtggagcagtttctttgtggaaactttgattcctctttttttttcttttttttgttaccagctttgatgcctaattgctggtggggcatgcagcgtatgcgattatttgtctgctgctgaaggtcatgatggttaccatctatgatcccacaccaaagtgtcattttttttaaaaaaaaaga

SEQ ID NO: 59200 - DNA, 1132 bp, Zea Mays
aacaaaaaaaagggaaagcttgggctttgccaagctcaggtggtgggatggccaccaatccgaagctaccgcaagaacacgatgtctaccacccagctgaagggcagcaaggaggatgctgaggccaagcaggaccaggggttcctgtacgtcaaggtcagcatggatggcgcgccgtacctcaggaagattgacctcaagacttacaagaactacaaggacctgtcgactgcgcttgagaagatgttcagtggcttcagtactggttagtatgggtgtaatgccatatcaggcaaggatggcttatctgagtaccgcaaggatggtgaatatgttctgacttacgaggacaaggatggagattggatgcttgttggcgatgtaccatgggagatgttcgctgactcttgccgcaggctcaggatcatgaaaggatcagatgcaattggacttgctccaagggcagctgataagtccaagaatcgcaactagaatggttgcttcttacagtccagagcaagagggagatatccagtgactgtagggatctttgtggaagccggaaaacgtctaacagtttcaagaagaattctgccttatggtctgtaccacatgtttttgctgctacgcaagtaaagaactccacgtctgtcaatgttagttttacaacatcgtctacggacaaaaaaaaaaccccccgctatttgattgttgctaagccttcgtacgacgtgtaaatggtttggtacaatgagtgctgcgactacgattgagcacccctctacctagtttgcaaaaaaacagtgtcccatggactgtctgttgtccctctatataaatgtccaatgaagcttgctaatgtgtggtcatcgtgttcatgttctggtccattcatctcgacagtgttgaaaccctgacgaagcaacttgtttcgaaagtgggcctcctctgtggagcagtttctttgtggaaactttgattcctctttttttttcttttttttgttaccagctttgatgcctaattgctggtggggcatgcagcgtatgcgattatttgtctgctgctgaaggtcatgatggttaccatctatgatcccacaccaaagtgtcattttttttaaaaaaaaaga

SEQ ID NO: 59201 - DNA, 1141 bp, Zea Mays
tgacatttgcaggttctgtgacagaaaatcatctttggaaattctgtgcttttgagggaaacaaaaggagctcaggtggtgggatggccaccaatccgaagctaccgcaagaacacgatgtctaccacccagctgaagggcagcaaggaggatgctgaggccaagcaggaccaggggttcctgtacgtcaaggtcagcatggatggcgcgccgtacctcaggaagattgacctcaagacttacaagaactacaaggacctgtcgactgcgcttgagaagatgttcagtggcttcagtactggcaaggatggcttatctgagtaccgcaaggatggtgaatatgttctgacttacgaggacaaggatggagattggatgcttgttggcgatgtaccatgggagatgttcgctgactcttgccgcaggctcaggatcatgaaaggatcagatgcaattggacttgctccaagggcagctgataagtccaagaatcgcaactagaatggttgcttcttacagtccagagcaagagggagatatccagtgactgtagggatctttgtggaagccggaaaacgtctaacagtttcaagaagaattctgccttatggtctgtaccacatgtttttgctgctacgcaagtaaagaactccacgtctgtcaatgttagttttacaacatcgtctacggacaaaaaaaaaaccccccgctatttgattgttgctaagccttcgtacgacgtgtaaatggtttggtacaatgagtgctgcgactacgattgagcacccctctacctagtttgcaaaaaaacagtgtcccatggactgtctgttgtccctctatataaatgtccaatgaagcttgctaatgtgtggtcatcgtgttcatgttctggtccattcatctcgacagtgttgaaaccctgacgaagcaacttgtttcgaaagtgggcctcctctgtggagcagtttctttgtggaaactttgattcctctttttttttcttttttttgttaccagctttgatgcctaattgctggtggggcatgcagcgtatgcgattatttgtctgctgctgaaggtcatgatggttaccatctatgatcccacaccaaagtgtcattttttttaaaaaaaaaga

SEQ ID NO: 59202 - DNA, 1126 bp, Zea Mays
tctgtgcttttgagggaaacaaaaggagctcaggtggtgggatggccaccaatccgaagctaccgcaagaacacgatgtctaccacccagctgaagggcagcaaggaggatgctgaggccaagcaggaccaggggttcctgtacgtcaaggtcagcatggatggcgcgccgtacctcaggaagattgacctcaagacttacaagaactacaaggacctgtcgactgcgcttgagaagatgttcagtggcttcagtactggttagtatgggtgtaatgccatatcaggcaaggatggcttatctgagtaccgcaaggatggtgaatatgttctgacttacgaggacaaggatggagattggatgcttgttggcgatgtaccatgggagatgttcgctgactcttgccgcaggctcaggatcatgaaaggatcagatgcaattggacttgctccaagggcagctgataagtccaagaatcgcaactagaatggttgcttcttacagtccagagcaagagggagatatccagtgactgtagggatctttgtggaagccggaaaacgtctaacagtttcaagaagaattctgccttatggtctgtaccacatgtttttgctgctacgcaagtaaagaactccacgtctgtcaatgttagttttacaacatcgtctacggacaaaaaaaaaaccccccgctatttgattgttgctaagccttcgtacgacgtgtaaatggtttggtacaatgagtgctgcgactacgattgagcacccctctacctagtttgcaaaaaaacagtgtcccatggactgtctgttgtccctctatataaatgtccaatgaagcttgctaatgtgtggtcatcgtgttcatgttctggtccattcatctcgacagtgttgaaaccctgacgaagcaacttgtttcgaaagtgggcctcctctgtggagcagtttctttgtggaaactttgattcctctttttttttcttttttttgttaccagctttgatgcctaattgctggtggggcatgcagcgtatgcgattatttgtctgctgctgaaggtcatgatggttaccatctatgatcccacaccaaagtgtcattttttttaaaaaaaaaga

SEQ ID NO: 59203 - DNA, 1140 bp, Zea Mays
ctcttctttaggtgggaatttcggtttgtcttgcggcctagaggagggaaactgaagttgcagctttagctcaggtggtgggatggccaccaatccgaagctaccgcaagaacacgatgtctaccacccagctgaagggcagcaaggaggatgctgaggccaagcaggaccaggggttcctgtacgtcaaggtcagcatggatggcgcgccgtacctcaggaagattgacctcaagacttacaagaactacaaggacctgtcgactgcgcttgagaagatgttcagtggcttcagtactggcaaggatggcttatctgagtaccgcaaggatggtgaatatgttctgacttacgaggacaaggatggagattggatgcttgttggcgatgtaccatgggagatgttcgctgactcttgccgcaggctcaggatcatgaaaggatcagatgcaattggacttgctccaagggcagctgataagtccaagaatcgcaactagaatggttgcttcttacagtccagagcaagagggagatatccagtgactgtagggatctttgtggaagccggaaaacgtctaacagtttcaagaagaattctgccttatggtctgtaccacatgtttttgctgctacgcaagtaaagaactccacgtctgtcaatgttagttttacaacatcgtctacggacaaaaaaaaaaccccccgctatttgattgttgctaagccttcgtacgacgtgtaaatggtttggtacaatgagtgctgcgactacgattgagcacccctctacctagtttgcaaaaaaacagtgtcccatggactgtctgttgtccctctatataaatgtccaatgaagcttgctaatgtgtggtcatcgtgttcatgttctggtccattcatctcgacagtgttgaaaccctgacgaagcaacttgtttcgaaagtgggcctcctctgtggagcagtttctttgtggaaactttgattcctctttttttttcttttttttgttaccagctttgatgcctaattgctggtggggcatgcagcgtatgcgattatttgtctgctgctgaaggtcatgatggttaccatctatgatcccacaccaaagtgtcattttttttaaaaaaaaaga

SEQ ID NO: 59204 - DNA, 706 bp, Zea Mays
cctgcatctgtggtggtagctctcttggctccaagggcagctgataagtccaagaatcgcaactagaatggttgcttcttacagtccagagcaagagggagatatccagtgactgtagggatctttgtggaagccggaaaacgtctaacagtttcaagaagaattctgccttatggtctgtaccacatgtttttgctgctacgcaagtaaagaactccacgtctgtcaatgttagttttacaacatcgtctacggacaaaaaaaaaaccccccgctatttgattgttgctaagccttcgtacgacgtgtaaatggtttggtacaatgagtgctgcgactacgattgagcacccctctacctagtttgcaaaaaaacagtgtcccatggactgtctgttgtccctctatataaatgtccaatgaagcttgctaatgtgtggtcatcgtgttcatgttctggtccattcatctcgacagtgttgaaaccctgacgaagcaacttgtttcgaaagtgggcctcctctgtggagcagtttctttgtggaaactttgattcctctttttttttcttttttttgttaccagctttgatgcctaattgctggtggggcatgcagcgtatgcgattatttgtctgctgctgaaggtcatgatggttaccatctatgatcccacaccaaagtgtcattttttttaaaaaaaaaga

SEQ ID NO: 59205 - DNA, 802 bp, Zea Mays
gtcagtttggagtgcacataataatagggaaaagtcatgtatcaattatatcctggagatgccaagttaatagttaaatattgaaattggaagatttgaatcgtagttgtcacttgctaacaagctccaagggcagctgataagtccaagaatcgcaactagaatggttgcttcttacagtccagagcaagagggagatatccagtgactgtagggatctttgtggaagccggaaaacgtctaacagtttcaagaagaattctgccttatggtctgtaccacatgtttttgctgctacgcaagtaaagaactccacgtctgtcaatgttagttttacaacatcgtctacggacaaaaaaaaaaccccccgctatttgattgttgctaagccttcgtacgacgtgtaaatggtttggtacaatgagtgctgcgactacgattgagcacccctctacctagtttgcaaaaaaacagtgtcccatggactgtctgttgtccctctatataaatgtccaatgaagcttgctaatgtgtggtcatcgtgttcatgttctggtccattcatctcgacagtgttgaaaccctgacgaagcaacttgtttcgaaagtgggcctcctctgtggagcagtttctttgtggaaactttgattcctctttttttttcttttttttgttaccagctttgatgcctaattgctggtggggcatgcagcgtatgcgattatttgtctgctgctgaaggtcatgatggttaccatctatgatcccacaccaaagtgtcattttttttaaaaaaaaaga

SEQ ID NO: 59206 - DNA, 1450 bp, Zea Mays
cattgaataattaaaacaggcttgctgctgctatacaacagtgaacagtgccataacttgttagagaagcatcacgatcatatgaattcactgccttctcaggtgcagtcatgggttcgttggtagggaccaaggaaatggaaaccaaaaaatagctggattagaactcacgcaaacccattacccatgacaactgttagaataaaatgtgcttgtatatcatatcagactacggccatatcagatcaggggtccacacggttgttatataataaaggaagaccttaacagactctgattaaaaataggaataggatagaatcaggtttgatctgtcccaaagatagcagagttagaataggagtcggttacggtagttgtacccgagttagacaccatgtcatgttgtaatcctgatgcagtattctggcctacatatactcaatccccctctcttttttttctctcgaacacataggagatctgagcatcattatattaagaagaagaatgggcacaaaaagccccagttacaaacacacctataaaacacacacgccaacgcatgcccccccaaaacacatgaaacacgaagcaacaaccaaaagacccaaaagaaactaatgaacatccagaggagctgttaggaaagatatcccttttgctcctactgcctcccatagatgtctgtcctcaccagcttggatcagtgcagtcacgatactaggtgagataccatcaaacacacatttgtttatatgattacagatggtccatgccccaaaataatcaggctgtttaatctccctgtcaattgttcacccaccgaatcattgactctgtgccaccattccaagaaactaaacatggctgtttggggggctagagaatgaagaccaaattgcttgagccaacggaaccaaaattgccttgagaagacacaggacactagaagaggatcaagagtctcgtcctcttggtcgcacaacaagcaactttctaggtgctccatccccctgcgggataagcgatgagcgatctgctgtccagcatttgttgtgtgccactaaccacataaagaaccgacatttagaaggtgacaattctttaaaggaacccaatccgaagtacacccggtggacgacacttgagaaacaagtcctcgatttcctcatgacctccatgactcaagaagtcatgactcaagtttcaacctccgatatcctccaagaggtgtggtctgagctccaaaagaccaacgtgtcgtagtctagggcaaagactatgaacacaaggatcgccctagcaacaaacagaaaaagtaacatggctatgctagaatatgttaccaaaataaagtctcttgcagatgaaatgtcatctcaaggaagaacatagatgaagagtacaaccaggtaatctctactctagtggcccgtgttgagcaggt

SEQ ID NO: 59207 - DNA, 3711 bp, Zea Mays
ttcacagaatgggaatttccggttgccatccgtaacctccacccacctcgcgctctcgctgttctgcaacacgtgggtcagtcgaagcgggctcatctgcactgctgggttgtctaggacacgaccctacatcgcggctcgcgggcgtcagggcgcagatcagccatgccttccatcgagcagttccagcattggatggcaaccaacgtgtgtgctcttgtcttcgtttatccgtgcgtgggttctttcgtctggctggggactcctgcacgccggctctcgtacgaccgccgttctcccggacttcgtcggctcccacttttggaacttctagtctattgtcgccttctagcagagattggtggaagacgacgatgtctcgctaaaggagaggagtggaggaggcgggagcagcaagaatggcgtgctccaccaatctctgcttctcagtgtcgattcctcctctcccagcctcttgttcttctgactcctcccccttccgcacaatggagcgtgtgtcctgcactctgtccaggcattggtgaagcggttacggtgatggggatgggcaagatcgtgcggtggtgcgctgggaagtagcacttcctcgccaagaggaacaccaggcgcaagaagaggctctccaatatgtcaaaagaatcatagacaccatagatctctggcgattgttgcggttggcgacacaaaattggaacttaatgtgttccaaatagcgacaatgcctcactcgaaacaggtgtggcaattgcagcttcatttgcttccaagcaaagaggaccaatgtttcagtaaggacttttgattgtctttgtctacaatggtttatcaatttcacccttcctacacatgaaactcgcactaggtacaacagctatgacagagaacaaaaaggtagtcttttgttgactaaggccttgttcgtttctgccggattggtaggtcggaacgattcctgaccggattgtttctctaatttatataaactttgattagctggaacgattccagttataatccgacggaaacgaacaaaggactaagacgtctccaaccgtctcctctcccctcaccgtatttgctattgtggtctccaaccgtctcctctctcctcaccatgtttgccattgcattgcatgtacaacgtcacaatatactctttcaacaactcaccccgctctatgaatgagggagttttaagggcatgtttggttcgtatctaactgtattacactttgcataaggttagtcgttcgaattgaagaactaaccttcgataaaaaaaaagttaggcaaagtgtagcaaattaagcagtgaaccaaacatgtccttaatctccctgcttccattatcttaatttaattacctgataataatgtgttgtcttgttcttgattcatagcggttgaaaataagtgaccaacaatattcgttccaaatttttaactacccgtatccgttcatgtatcctggagaaatatattacgttaggatacagaataactttgtatctagttcctgttttcatccctaagcagacagcactgtcgcaagccataatctgcaataacaacatataattgtgccatccaaaaaacgtaattattgtttgttcgagataatgcgctaataacgtgtggctagttctagcaactggatgtgggtgcctgcagtgtgggcccgagcaaatccatctcttgcgctcgcagacaacggccttcccgccgccggtacaatcagatgcagatgctaatgatacagtccgtccagaccccacccgccgccgcccacctccgcgctgctgcgcccgccagcacgccaccgctcctcgcgcgtaggctggccggttctcgtccagctcccgcctccgccggaacaatcagatgcagccgatgctaacgctacagtccgtccagcccccacccgccgctgcccacctccgcgccgctgcgtccgccaagacgccactgctcctcccgcgcagagcggccggtcctcctccagcttccgcctccgcctccgcctcggctgagttcccaggatccgttccagacagcgctcagatggcgccccgacggcggcggcgccggagcgtggccggcatcgaccaggacgaactcctcgatcccgaggccctcgcggaccccgacagcggcttctacgagatcaacggcgtgaggctgcaccacaaggtctgcagccacgaggatgaggactcgtccagcgaccagtccaccggtagtaccattgcctcagactcagacgctgtcctgaaaagccagattggcctgcccatactgctgctgcacggcttcggcgcgtcagtcttctcctggagcagtgtgatgcggcctctcgcccgcattgtccgtgccaaggttcttgcgttcgaccggccggcgtttgggctgacatcccgggccagtcgctctgccgatgacgccaagcctctcaatccttactccatggcgttctcggtcttggccacgttggcgttcatcgactaccttggcgctgagaaggccatacttgttgggtaatactagtcctcatcccaaatctgaattgcttgcttctctcgctagctctgtctatctgcattgctttcgtgtgattattattatatgtacgtgtgtgatgaccattgcccccaggcactcagctggttgccttgtagcagtggatgcatactttgaggcaccggaacgggtggctgctctcgtgctagttgcgccggctatatttgcaccaaggaaggcggtgaaagagggccagtcaggggaagaagaaggagggcagcaagcacagagggttcccaacgatgaaaattcgcctccaaatttgttcgctaggatttcgggaggatttcttgagctatggaagcacgttgcggggcttgttctcaagatgatcacagcgatacgagatgtggtccgatctttgtgtcttaaagctgtcgttgcttttcttcggtcatcgttgggtgtggtgctggtaagatgggtgatggataaatttggtatactgggcgtccggaatgcatggtatgacccgagcaaagtaactgatcatgtcatacaaggctacacaaagctctgctggaacacaccgtatccatgatcatagattctgtgtctgcatcaagagtaccagtttcaaagaggctttctgagatctcatgcccagtgctagtggtgacaggtgacaccgatcgcattgttcctgcttggaatgccgagcgtgtggcacgcgctatacctggagcaacttttgaggcgatcaagagttgtggtcacttgccccacgaagaaaggcctgaggaattcctgtccgtcgttgaaaattttctacggacaacgtttgcaaatccaaatgaacaagtatttcaagcagctgtatcatgaattatgtgttgagtacgatctatttgctttataataaatcttaaagacccactcgtgtacaatgagagtggaatttggagtttaagcacatgagaagtaaaagaagttgaagaaaacttatatagtttgtctcctgcttttttttaaacaaagcaagagagggagaaaactaaagctacaagtgcgcacgttttatgttttcttttgcgtgataattcgtgcgacttgtgacttacgatgtgatgattcatgctaattttatttctatcttttgttattttctagaac

SEQ ID NO: 59208 - DNA, 3616 bp, Zea Mays
ttcacagaatgggaatttccggttgccatccgtaacctccacccacctcgcgctctcgctgttctgcaacacgtgggtcagtcgaagcgggctcatctgcactgctgggttgtctaggacacgaccctacatcgcggctcgcgggcgtcagggcgcagatcagccatgccttccatcgagcagttccagcattggatggcaaccaacgtgtgtgctcttgtcttcgtttatccgtgcgtgggttctttcgtctggctggggactcctgcacgccggctctcgtacgaccgccgttctcccggacttcgtcggctcccacttttggaacttctagtctattgtcgccttctagcagagattggtggaagacgacgatgtctcgctaaaggagaggagtggaggaggcgggagcagcaagaatggcgtgctccaccaatctctgcttctcagtgtcgattcctcctctcccagcctcttgttcttctgactcctcccccttccgcacaatggagcgtgtgtcctgcactctgtccaggcattggtgaagcggttacggtgatggggatgggcaagatcgtgcggtggtgcgctgggaagtagcacttcctcgccaagaggaacaccaggcgcaagaagaggctctccaatatgtcaaaagaatcatagacaccatagatctctggcgattgttgcggttggcgacacaaaattggaacttaatgtgttccaaatagcgacaatgcctcactcgaaacaggtgtggcaattgcagcttcatttgcttccaagcaaagaggaccaatgtttcagtaaggacttttgattgtctttgtctacaatggtttatcaatttcacccttcctacacatgaaactcgcactaggtacaacagctatgacagagaacaaaaaggtagtcttttgttgactaaggccttgttcgtttctgccggattggtaggtcggaacgattcctgaccggattgtttctctaatttatataaactttgattagctggaacgattccagttataatccgacggaaacgaacaaaggactaagacgtctccaaccgtctcctctcccctcaccgtatttgctattgtggtctccaaccgtctcctctctcctcaccatgtttgccattgcattgcatgtacaacgtcacaatatactctttcaacaactcaccccgctctatgaatgagggagttttaagggcatgtttggttcgtatctaactgtattacactttgcataaggttagtcgttcgaattgaagaactaaccttcgataaaaaaaaagttaggcaaagtgtagcaaattaagcagtgaaccaaacatgtccttaatctccctgcttccattatcttaatttaattacctgataataatgtgttgtcttgttcttgattcatagcggttgaaaataagtgaccaacaatattcgttccaaatttttaactacccgtatccgttcatgtatcctggagaaatatattacgttaggatacagaataactttgtatctagttcctgttttcatccctaagcagacagcactgtcgcaagccataatctgcaataacaacatataattgtgccatccaaaaaacgtaattattgtttgttcgagataatgcgctaataacgtgtggctagttctagcaactggatgtgggtgcctgcagtgtgggcccgagcaaatccatctcttgcgctcgcagacaacggccttcccgccgccggtacaatcagatgcagatgctaatgatacagtccgtccagaccccacccgccgccgcccacctccgcgctgctgcgcccgccagcacgccaccgctcctcgcgcgtaggctggccggttctcgtccagctcccgcctccgccggaacaatcagatgcagccgatgctaacgctacagtccgtccagcccccacccgccgctgcccacctccgcgccgctgcgtccgccaagacgccactgctcctcccgcgcagagcggccggtcctcctccagcttccgcctccgcctccgcctcggctgagttcccaggatccgttccagacagcgctcagatggcgccccgacggcggcggcgccggagcgtggccggcatcgaccaggacgaactcctcgatcccgaggccctcgcggaccccgacagcggcttctacgagatcaacggcgtgaggctgcaccacaaggtctgcagccacgaggatgaggactcgtccagcgaccagtccaccggtagtaccattgcctcagactcagacgctgtcctgaaaagccagattggcctgcccatactgctgctgcacggcttcggcgcgtcagtcttctcctggagcagtgtgatgcggcctctcgcccgcattgtccgtgccaaggttcttgcgttcgaccggccggcgtttgggctgacatcccgggccagtcgctctgccgatgacgccaagcctctcaatccttactccatggcgttctcggtcttggccacgttggcgttcatcgactaccttggcgctgagaaggccatacttgttgggcactcagctggttgccttgtagcagtggatgcatactttgaggcaccggaacgggtggctgctctcgtgctagttgcgccggctatatttgcaccaaggaaggcggtgaaagagggccagtcaggggaagaagaaggagggcagcaagcacagagggttcccaacgatgaaaattcgcctccaaatttgttcgctaggatttcgggaggatttcttgagctatggaagcacgttgcggggcttgttctcaagatgatcacagcgatacgagatgtggtccgatctttgtgtcttaaagctgtcgttgcttttcttcggtcatcgttgggtgtggtgctgatgggtgatggataaatttggtatactgggcgtccggaatgcatggtatgacccgagcaaagtaactgatcatgtcatacaaggctacacaaagcctctaaaatccaagggttgggagacagctctgctggaacacaccgtatccatgatcatagattctgtgtctgcatcaagagtaccagtttcaaagaggctttctgagatctcatgcccagtgctagtggtgacaggtgacaccgatcgcattgttcctgcttggaatgccgagcgtgtggcacgcgctatacctggagcaacttttgaggcgatcaagagttgtggtcacttgccccacgaagaaaggcctgaggaattcctgtccgtcgttgaaaattttctacggacaacgtttgcaaatccaaatgaacaagtatttcaagcagctgtatcatgaattatgtgttgagtacgatctatttgctttataataaatcttaaagacccactcgtgtacaatgagagtggaatttggagtttaagcacatgagaagtaaaagaagttgaagaaaacttatatagtttgtctcctgcttttttttaaacaaagcaagagagggagaaaactaaagctacaagtgcgcacgttttatgttttcttttgcgtgataattcgtgcgacttgtgacttacgatgtgatgattcatgctaattttatttctatcttttgttattttctagaac

SEQ ID NO: 59209 - DNA, 3595 bp, Zea Mays
ttcacagaatgggaatttccggttgccatccgtaacctccacccacctcgcgctctcgctgttctgcaacacgtgggtcagtcgaagcgggctcatctgcactgctgggttgtctaggacacgaccctacatcgcggctcgcgggcgtcagggcgcagatcagccatgccttccatcgagcagttccagcattggatggcaaccaacgtgtgtgctcttgtcttcgtttatccgtgcgtgggttctttcgtctggctggggactcctgcacgccggctctcgtacgaccgccgttctcccggacttcgtcggctcccacttttggaacttctagtctattgtcgccttctagcagagattggtggaagacgacgatgtctcgctaaaggagaggagtggaggaggcgggagcagcaagaatggcgtgctccaccaatctctgcttctcagtgtcgattcctcctctcccagcctcttgttcttctgactcctcccccttccgcacaatggagcgtgtgtcctgcactctgtccaggcattggtgaagcggttacggtgatggggatgggcaagatcgtgcggtggtgcgctgggaagtagcacttcctcgccaagaggaacaccaggcgcaagaagaggctctccaatatgtcaaaagaatcatagacaccatagatctctggcgattgttgcggttggcgacacaaaattggaacttaatgtgttccaaatagcgacaatgcctcactcgaaacaggtgtggcaattgcagcttcatttgcttccaagcaaagaggaccaatgtttcagtaaggacttttgattgtctttgtctacaatggtttatcaatttcacccttcctacacatgaaactcgcactaggtacaacagctatgacagagaacaaaaaggtagtcttttgttgactaaggccttgttcgtttctgccggattggtaggtcggaacgattcctgaccggattgtttctctaatttatataaactttgattagctggaacgattccagttataatccgacggaaacgaacaaaggactaagacgtctccaaccgtctcctctcccctcaccgtatttgctattgtggtctccaaccgtctcctctctcctcaccatgtttgccattgcattgcatgtacaacgtcacaatatactctttcaacaactcaccccgctctatgaatgagggagttttaagggcatgtttggttcgtatctaactgtattacactttgcataaggttagtcgttcgaattgaagaactaaccttcgataaaaaaaaagttaggcaaagtgtagcaaattaagcagtgaaccaaacatgtccttaatctccctgcttccattatcttaatttaattacctgataataatgtgttgtcttgttcttgattcatagcggttgaaaataagtgaccaacaatattcgttccaaatttttaactacccgtatccgttcatgtatcctggagaaatatattacgttaggatacagaataactttgtatctagttcctgttttcatccctaagcagacagcactgtcgcaagccataatctgcaataacaacatataattgtgccatccaaaaaacgtaattattgtttgttcgagataatgcgctaataacgtgtggctagttctagcaactggatgtgggtgcctgcagtgtgggcccgagcaaatccatctcttgcgctcgcagacaacggccttcccgccgccggtacaatcagatgcagatgctaatgatacagtccgtccagaccccacccgccgccgcccacctccgcgctgctgcgcccgccagcacgccaccgctcctcgcgcgtaggctggccggttctcgtccagctcccgcctccgccggaacaatcagatgcagccgatgctaacgctacagtccgtccagcccccacccgccgctgcccacctccgcgccgctgcgtccgccaagacgccactgctcctcccgcgcagagcggccggtcctcctccagcttccgcctccgcctccgcctcggctgagttcccaggatccgttccagacagcgctcagatggcgccccgacggcggcggcgccggagcgtggccggcatcgaccaggacgaactcctcgatcccgaggccctcgcggaccccgacagcggcttctacgagatcaacggcgtgaggctgcaccacaaggtctgcagccacgaggatgaggactcgtccagcgaccagtccaccggtagtaccattgcctcagactcagacgctgtcctgaaaagccagattggcctgcccatactgctgctgcacggcttcggcgcgtcagtcttctcctggagcagtgtgatgcggcctctcgcccgcattgtccgtgccaaggttcttgcgttcgaccggccggcgtttgggctgacatcccgggccagtcgctctgccgatgacgccaagcctctcaatccttactccatggcgttctcggtcttggccacgttggcgttcatcgactaccttggcgctgagaaggccatacttgttggtggatgcatactttgaggcaccggaacgggtggctgctctcgtgctagttgcgccggctatatttgcaccaaggaaggcggtgaaagagggccagtcaggggaagaagaaggagggcagcaagcacagagggttcccaacgatgaaaattcgcctccaaatttgttcgctaggatttcgggaggatttcttgagctatggaagcacgttgcggggcttgttctcaagatgatcacagcgatacgagatgtggtccgatctttgtgtcttaaagctgtcgttgcttttcttcggtcatcgttgggtgtggtgctggtaagatgggtgatggataaatttggtatactgggcgtccggaatgcatggtatgacccgagcaaagtaactgatcatgtcatacaaggctacacaaagcctctaaaatccaagggttgggagacagctctgctggaacacaccgtatccatgatcatagattctgtgtctgcatcaagagtaccagtttcaaagaggctttctgagatctcatgcccagtgctagtggtgacaggtgacaccgatcgcattgttcctgcttggaatgccgagcgtgtggcacgcgctatacctggagcaacttttgaggcgatcaagagttgtggtcacttgccccacgaagaaaggcctgaggaattcctgtccgtcgttgaaaattttctacggacaacgtttgcaaatccaaatgaacaagtatttcaagcagctgtatcatgaattatgtgttgagtacgatctatttgctttataataaatcttaaagacccactcgtgtacaatgagagtggaatttggagtttaagcacatgagaagtaaaagaagttgaagaaaacttatatagtttgtctcctgcttttttttaaacaaagcaagagagggagaaaactaaagctacaagtgcgcacgttttatgttttcttttgcgtgataattcgtgcgacttgtgacttacgatgtgatgattcatgctaattttatttctatcttttgttattttctagaac

SEQ ID NO: 59210 - DNA, 364 bp, Zea Mays
agcgctgtctgttgttttgtaaaaagtagtaaacatgaactaaaaatattttttttgccaaggtaattagagaggcttgctgtaaagcagtaggattgctggctgtagaaattgttgatgggctttttttgggggtttcctgccaaggaattctttcttttatataatctcaaaaaagttttttttttttggtatgggctgggttctatcaagggtttgttaaggctattagtttaccatgtagcagaaaaactagtgggacgtgaagttttttcacgtacattgtaatactttggtatttttgtctaccagatgaaactggaagtacagagcaaaaacttctctatcaaacagtatttatgcc

SEQ ID NO: 59211 - DNA, 2914 bp, Zea Mays
agtccctttggcgcgaagatctggcgccaagccgccgcctccttcccgtcaagaccactcccccggccccacccgccgcccccttcttcttccctagaggcctagacctattccagccgagagtgacaatctccagtccaaagctctattgcagacctcgaatcttccacaaggggcattcgttagtgatggaggcgttcggtgggttcttcgtggacgagaaggcagtgcgagtggagaacatcttccttgagttcctgaagcgattcaaggagtcggatggcgcgggggagccgttctacgaggccgagatggaggctatgcggtcgcgggagtccaccaccatgtacgtagactttgcgcacgtcatgcgcttcaacgacgtcctccagaaggccatctccgaggagtacctcaggtttgaaccatacttatggaatgcatgcaagagatttgtgttggaacaccgggctggcgagaaccgtgccccaatcatctcagatgatagccccaacaaagatatcaacattgccttctataacatcccgatgcttaaaaaactgagagagcttgggacagccgaaatcggtaagctcacagcagtaatgggtgttgtcacacggacaagtgaagtgcggcctgaactattgcaaggcaccttcaaatgcctcgactgcggcaatgttgtaaagaatgtggagcagcagttcaagtacactgagccaataatatgcgttaatgcaacatgccagaaccgaacaaaatgggcccttctccgccaggaaagcaaattcacagattggcagagggtcagaatgcaggagacatcaaaagagatacctgctggatcacttcctcgttcccttgatgtcattctgcggcatgagattgttgagaaggctagagctggggacacggttatatttactggaactgttgttgcagttcctgatgttatggcactaacttcacctggcgaacgagcagagtgtcgcagggaagctcctcagcgaaaaatgggaggtgttcaagaaggtgtaaagggcttgaagtcccttggagttagggatctctcttatcgcctcgcttttgtagcaaattcagtgcaggtcgcagatggcaggagggaaggggacatcagggatcgggacacagatggtgatgacagcgggagacagaaattcacagaagaagaggaagatgaggttgttaggatgaggaacactcctgatttctttaataagatagttgatagcatatgtcctaccgtctttggtcatcaagaaattaagagggcagtgcttcttatgcttttgggtggtgttcataagataacacatgaagggatcaaccttagaggtgacatcaatgtctgtattgttggtgacccaagctgcgcaaagtctcagttcctaaaatatactgctggtattgttccaagatctgtttacacgtcagggaagtcatcatctgctgctggtctgacagcaactgttgctaaagaaccggagactggtgaattctgtattgaggctggtgccctgatgttagctgataatggcatttgttgtatcgatgaatttgataaaatggacatcaaggatcaggtcgctatacatgaagcaatggaacagcaaacaattagcataaccaaagcaggaatacaggcaactttgaatgcacgaacatcaattttagctgcagcaaatccgaccgggggccgttatgacaagtcaaaaccacttaagtacaacgtggcattgcccccagctatcctttcaagatttgatctcgtctacatcatgattgatgaacctgatgaaaacaccgactaccacattgctcatcacattgtaagagtccatcagaaacgtgaagaagcacttgcccctgcatttagcactgcacaactgaagcgttatatatcttttgcgaagtctttgaaacctcagctgagttcagaagcaaagaaagttctggtggagtcgtatgttaccctccgtagaggggacagtactcctggaactagggttgcttacaggatgacagttcggcaattggaagcattgattcggctgtcagaagctattgctcgaagccatttagaaagagttgttctcccagctcatgtccgcctggcagttaaattgctcaagacatcaatcatcagtgttgagtcaagtgaagttgatctctctgactttcaagatgctgaagatggaacaaacgtaccttctgagaatgatgctggacagccagctgaagaaggtgctgctcctcaacagcaggatgcaggtgcctttccagaaaatgaccaagcagcgggataacggtaagaagaaattggtaataactgaagaacacttccagagagttactcaagctttggttatgagactaaggcagcatgaagagtcagtcaagaaagatggagatggtatggctggcatgaaacaaggggatcttatcatttggtatgttgagcagcagaatgccaaaggcgcatatagttctaccgcggaggtgaaggaagaagtgaagtgtatcaaggccattatagagagactcatacagcgggaaggccatcttatagtcattgacgaaggcacagcggctactgccgaagatggcagtcgctcaagaacatcagagagcagaatattggcagttaacccgaactatgttattgattagcaacagcatcgtaacatgctactaactcaattcagctgatctgtttaactaacagaagctataatttgggtgatgtgtctgttgtgccctagcattgttgtatcatctccgtgactgatgtcattgcaagggatcacatgatctccaaaactatataattcgtacagtattttgctttcttaagttcacccttttgggtccatttaagggctttcgtttc

SEQ ID NO: 59212 - DNA, 2927 bp, Zea Mays
cgccgcctccttcccgtcaagaccactcccccggccccacccgccgcccccttcttcttccctagaggcctagacctattccagccgagagtgacaatctccagtccaaagctctattgcagacctcgaatcttccacaaggggcattcgttagtgatggaggcgttcggtgggttcttcgtggacgagaaggcagtgcgagtggagaacatcttccttgagttcctgaagcgattcaaggagtcggatggcgcgggggagccgttctacgaggccgagatggaggctatgcggtcgcgggagtccaccaccatgtacgtagactttgcgcacgtcatgcgcttcaacgacgtcctccagaaggccatctccgaggagtacctcaggtttgaaccatacttatggaatgcatgcaagagatttgtgttggaacaccgggctggcgagaaccgtgccccaatcatctcagatgatagccccaacaaagatatcaacattgccttctataacatcccgatgcttaaaaaactgagagagcttgggacagccgaaatcggtaagctcacagcagtaatgggtgttgtcacacggacaagtgaagtgcggcctgaactattgcaaggcaccttcaaatgcctcgactgcggcaatgttgtaaagaatgtggagcagcagttcaagtacactgagccaataatatgcgttaatgcaacatgccagaaccgaacaaaatgggcccttctccgccaggaaagcaaattcacagattggcagagggtcagaatgcaggagacatcaaaagagatacctgctggatcacttcctcgttcccttgatgtcattctgcggcatgagattgttgagaaggctagagctggggacacttcctgatgttatggcactaacttcacctggcgaacgagcagagtgtcgcagggaagctcctcagcgaaaaatgggaggtgttcaagaaggtgtaaagggcttgaagtcccttggagttagggatctctcttatcgcctcgcttttgtagcaaattcagtgcaggtcgcagatggcaggagggaaggggacatcagggatcgggacacagatggtgatgacagcgggagacagaaattcacagaagaagaggaagatgaggttgttaggatgaggaacactcctgatttctttaataagatagttgatagcatatgtcctaccgtctttggtcatcaagaaattaagagggcagtgcttcttatgcttttgggtggtgttcataagataacacatgaagggatcaaccttagaggtgacatcaatgtctgtattgttggtgacccaagctgcgcaaagtctcagttcctaaaatatactgctggtattgttccaagatctgtttacacgtcagggaagtcatcatctgctgctggtctgacagcaactgttgctaaagaaccggagactggtgaattctgtattgaggctggtgccctgatgttagctgataatggcatttgttgtatcgatgaatttgataaaatggacatcaaggatcaggtcgctatacatgaagcaatggaacagcaaacaattagcataaccaaagcaggaatacaggcaactttgaatgcacgaacatcaattttagctgcagcaaatccgaccgggggccgttatgacaagtcaaaaccacttaagtacaacgtggcattgcccccagctatcctttcaagatttgatctcgtctacatcatgattgatgaacctgatgaaaacaccgactaccacattgctcatcacattgtaagagtccatcagaaacgtgaagaagcacttgcccctgcatttagcactgcacaactgaagcgttatatatcttttgcgaagtctttgaaacctcagctgagttcagaagcaaagaaagttctggtggagtcgtatgttaccctccgtagaggggacagtactcctggaactagggttgcttacaggatgacagttcggcaattggaagcattgattcggctgtcagaagctattgctcgaagccatttagaaagagttgttctcccagctcatgtccgcctggcagttaaattgctcaagacatcaatcatcagtgttgagtcaagtgaagttgatctctctgactttcaagatgctgaagatggaacaaacgtaccttctgagaatgatgctggacagccagctgaagaaggtgctgctcctcaacagcaggatgcaggtgcctttccaggtgttaaaacttaatattgctgtctttttattaggctgtttctgaccattttgttatttatgtcaaaacactagaaaatgaccaagcagcgggataacggtaagaagaaattggtaataactgaagaacacttccagagagttactcaagctttggttatgagactaaggcagcatgaagagtcagtcaagaaagatggagatggtatggctggcatgaaacaaggggatcttatcatttggtatgttgagcagcagaatgccaaaggcgcatatagttctaccgcggaggtgaaggaagaagtgaagtgtatcaaggccattatagagagactcatacagcgggaaggccatcttatagtcattgacgaaggcacagcggctactgccgaagatggcagtcgctcaagaacatcagagagcagaatattggcagttaacccgaactatgttattgattagcaacagcatcgtaacatgctactaactcaattcagctgatctgtttaactaacagaagctataatttgggtgatgtgtctgttgtgccctagcattgttgtatcatctccgtgactgatgtcattgcaagggatcacatgatctccaaaactatataattcgtacagtattttgctttcttaagttcacccttttgggtccatttaagggctttcgtttc

SEQ ID NO: 59213 - DNA, 1802 bp, Zea Mays
ttttcttgtgacaagtatatgaaggctccttcagatattttgaactcatgaaacgttggatgctcattgttgatttggaagaagaggaagatgaggttgttaggatgaggaacactcctgatttctttaataagatagttgatagcatatgtcctaccgtctttggtcatcaagaaattaagagggcagtgcttcttatgcttttgggtggtgttcataagataacacatgaagggatcaaccttagaggtgacatcaatgtctgtattgttggtgacccaagctgcgcaaagtctcagttcctaaaatatactgctggtattgttccaagatctgtttacacgtcagggaagtcatcatctgctgctggtctgacagcaactgttgctaaagaaccggagactggtgaattctgtattgaggctggtgccctgatgttagctgataatggcatttgttgtatcgatgaatttgataaaatggacatcaaggatcaggtcgctatacatgaagcaatggaacagcaaacaattagcataaccaaagcaggaatacaggcaactttgaatgcacgaacatcaattttagctgcagcaaatccgaccgggggccgttatgacaagtcaaaaccacttaaggtacctcaagtacaacgtggcattgcccccagctatcctttcaagatttgatctcgtctacatcatgattgatgaacctgatgaaaacaccgactaccacattgctcatcacattgtaagagtccatcagaaacgtgaagaagcacttgcccctgcatttagcactgcacaactgaagcgttatatatcttttgcgaagtctttgaaacctcagctgagttcagaagcaaagaaagttctggtggagtcgtatgttaccctccgtagaggggacagtactcctggaactagggttgcttacaggatgacagttcggcaattggaagcattgattcggctgtcagaagctattgctcgaagccatttagaaagagttgttctcccagctcatgtccgcctggcagttaaattgctcaagacatcaatcatcagtgttgagtcaagtgaagttgatctctctgactttcaagatgctgaagatggaacaaacgtaccttctgagaatgatgctggacagccagctgaagaaggtgctgctcctcaacagcaggatgcagaaaatgaccaagcagcgggataacggtaagaagaaattggtaataactgaagaacacttccagagagttactcaagctttggttatgagactaaggcagcatgaagagtcagtcaagaaagatggagatggtatggctggcatgaaacaaggggatcttatcatttggtatgttgagcagcagaatgccaaaggcgcatatagttctaccgcggaggtgaaggaagaagtgaagtgtatcaaggccattatagagagactcatacagcgggaaggccatcttatagtcattgacgaaggcacagcggctactgccgaagatggcagtcgctcaagaacatcagagagcagaatattggcagttaacccgaactatgttattgattagcaacagcatcgtaacatgctactaactcaattcagctgatctgtttaactaacagaagctataatttgggtgatgtgtctgttgtgccctagcattgttgtatcatctccgtgactgatgtcattgcaagggatcacatgatctccaaaactatataattcgtacagtattttgctttcttaagttcacccttttgggtccatttaagggctttcgtttc

SEQ ID NO: 59214 - DNA, 2398 bp, Zea Mays
atctcagcaacgatgcctcgtcctcttgcagctctcctctctaccgcttgcatcctctccttcttcatcgctctgtttccaagagctgcatcatcccgagacatcctaccactgggttcctctctcgtagtcgagtcctacgaatccagcaccttacaatcatcagacgggacattctcctctggcttctacgaagtctacacccatgccttcacattctcagtatggtactcaaagacggaggcggcggcggccaacaacaagaccatcgtgtggagcgcaaaccctgaccgccctgtccatgccaggaggtcggctctaaccctgcaaaaggacggcaacatggtgctcaccgactacgacggcgcagccgtgtggcgagctgatggcaacaacttcaccggcgtccagcgtgctcggctcctggacaccgggaacctcgtcatcgaggactcaggaggttatgcgacgaggaacccgggtaactggactgaaggctgtatggctattgtcaacacaacctgtgaccgctatgacaagaggtctatgagatttgtgcgacttcccaatacggatttttgggggtcggatcagcaacatcttctgtcggtttctcttcgaacttgtagggatatctgcatcagtgactgcacctgtaaaggctttcagtatcaggaaggcacaggatcatgctatccaaaagcttatcttttcagtggaagaacctacccaacatctgacgtgcgaacgatatatctcaagcttccaacaggggtcagtgtttcaaatgcccttattccacgttccgacgtgttcgattccgtgccccgtcgtctcgactgcgatcggatgaacaaaagcatcagagaaccgtttccagatgtgcacaagaccggcggaggagaatcgaaatggttttacttctatgggttcatagctgcattttttgtcgttgaagtttccttcatttcgtttgcgtggttctttgttttgaagagagaactcaggccatctgaactatgggcgtctgagaaaggttacaaagcaatgactagtaattttagaaggtacagctacagggaacttgtgaaggcgaccagaaaattcaaggttgagctagggaggggagaatcaggcactgtgtacaaaggtgtcctagaagatgataggcatgtggctgtgaagaagctggagaatgtaaggcaaggcaaggaagtgtttcaggctgagctaagtgtaattgggaggatcaaccacatgaaccttgtgaggatatggggcttctgttcagagggatctcataggttgttggtctccgaatatgttgagaatggatcactggctaacattttgttcagtgaaggaggcaacatcttattggactgggagggaaggttcaacattgcgttaggtgttgcaaaagggttagcctatctccaccatgagtgcttagagtgggtcatccactgtgatgtgaaacctgagaacatactgttagaccaagcttttgagcccaagatcactgactttgggttggtgaagttgctgaacagaggagggtccacccagaacgtatcccatgtcagaggaacgctaggttacattgcacctgagtgggtttccagcctcccgatcacagcaaaagtcgatgtatacagttatggggttgtgctactggagctattgacaggcaccagagtttcagagttggtgggaggcacagatgaggtgcatagtatgcttagaaagcttgtcaggatgctttctgccaaacttgaaggggaggaacaatcgtggattgatgggtatctggattcaaaactgaatcgtccagtcaactatgtgcaagcaagaacactgatcaaattggcggtctcctgcttggaggaagacagaagcaaaagaccgactatggaacatgcagtccagaccctcctgtcagctgatgactgaatgggcaaataaaacatatgctacaacaacttcattgagttgacaattcacatcttgatggaaaaaaagaagaagaagcaaaaggccaacactccaggccatcctgtcagttggttttgggtgtttacccctgatataaattacctgtaaacagtgctcgttccaatttgtcactatatgatgtaagttgtagcatgtaatgtattgaacttgaacagttagatgtaaccatattcaagttaccggtagtgaaacgccatcgacctacgtgtgctcccttatctgaaattctgaatacctcttgtgtgtggtctcacgatggtgaaaaatatggaatccaattgacgtacctagcgcaagagtaaggatgtgtttggttgcgggccagctggtgacagataggataggaacgtctcttggcgtccatacaacactgagataattc

SEQ ID NO: 59215 - DNA, 2804 bp, Zea Mays
atctcagcaacgatgcctcgtcctcttgcagctctcctctctaccgcttgcatcctctccttcttcatcgctctgtttccaagagctgcatcatcccgagacatcctaccactgggttcctctctcgtagtcgagtcctacgaatccagcaccttacaatcatcagacgggacattctcctctggcttctacgaagtctacacccatgccttcacattctcagtatggtactcaaagacggaggcggcggcggccaacaacaagaccatcgtgtggagcgcaaaccctgaccgccctgtccatgccaggaggtcggctctaaccctgcaaaaggacggcaacatggtgctcaccgactacgacggcgcagccgtgtggcgagctgatggcaacaacttcaccggcgtccagcgtgctcggctcctggacaccgggaacctcgtcatcgaggactcaggaggtaacactgtatggcagagtttcgattccccaacggacactttcctgccgacgcagctcatcactgctgcgaccagattagtccccacaacccaatcgcgtagtcctggtaactacatcttccgcttcagcgacctctcagtgctgtcgcttatataccacgtgcctcaagtctcagacatatactggccagaccctgaccagaacctctaccaggatggccggaaccagtataacagtacgaggttaggaatgcttactgatagcggggtgcttgcctcgagcgacttcgctgatggtcaggcgcttgtggcctccgacgtagggccgggcgtcaagagaaggctaactcttgaccctgatggcaatctccgtctgtacagcatgaacgattcagatgggtcatggttatgcgacgaggaacccgggtaactggactgaaggctgtatggctattgtcaacacaacctgtgaccgctatgacaagaggtctatgagatttgtgcgacttcccaatacggatttttgggggtcggatcagcaacatcttctgtcggtttctcttcgaacttgtagggatatctgcatcagtgactgcacctgtaaaggctttcagtatcaggaaggcacaggatcatgctatccaaaagcttatcttttcagtggaagaacctacccaacatctgacgtgcgaacgatatatctcaagcttccaacaggggtcagtgtttcaaatgcccttattccacgttccgacgtgttcgattccgtgccccgtcgtctcgactgcgatcggatgaacaaaagcatcagagaaccgtttccagatgtgcacaagaccggcggaggagaatcgaaatggttttacttctatgggttcatagctgcattttttgtcgttgaagtttccttcatttcgtttgcgtggttctttgttttgaagagagaactcaggccatctgaactatgggcgtctgagaaaggttacaaagcaatgactagtaattttagaaggtacagctacagggaacttgtgaaggcgaccagaaaattcaaggttgagctagggaggggagaatcaggcactgtgtacaaaggtgtcctagaagatgataggcatgtggctgtgaagaagctggagaatgtaaggcaaggcaaggaagtgtttcaggctgagctaagtgtaattgggaggatcaaccacatgaaccttgtgaggatatggggcttctgttcagagggatctcataggttgttggtctccgaatatgttgagaatggatcactggctaacattttgttcagtgaaggaggcaacatcttattggactgggagggaaggttcaacattgcgttaggtgttgcaaaagggttagcctatctccaccatgagtgcttagagtgggtcatccactgtgatgtgaaacctgagaacatactgttagaccaagcttttgagcccaagatcactgactttgggttggtgaagttgctgaacagaggagggtccacccagaacgtatcccatgtcagaggaacgctaggttacattgcacctgagtgggtttccagcctcccgatcacagcaaaagtcgatgtatacagttatggggttgtgctactggagctattgacaggcaccagagtttcagagttggtgggaggcacagatgaggtgcatagtatgcttagaaagcttgtcaggatgctttctgccaaacttgaaggggaggaacaatcgtggattgatgggtatctggattcaaaactgaatcgtccagtcaactatgtgcaagcaagaacactgatcaaattggcggtctcctgcttggaggaagacagaagcaaaagaccgactatggaacatgcagtccagaccctcctgtcagctgatgactgaatgggcaaataaaacatatgctacaacaacttcattgagttgacaattcacatcttgatggaaaaaaagaagaagaagcaaaaggccaacactccaggccatcctgtcagttggttttgggtgtttacccctgatataaattacctgtaaacagtgctcgttccaatttgtcactatatgatgtaagttgtagcatgtaatgtattgaacttgaacagttagatgtaaccatattcaagttaccggtagtgaaacgccatcgacctacgtgtgctcccttatctgaaattctgaatacctcttgtgtgtggtctcacgatggtgaaaaatatggaatccaattgacgtacctagcgcaagagtaaggatgtgtttggttgcgggccagctggtgacagataggataggaacgtctcttggcgtccatacaacactgagataattc

SEQ ID NO: 59216 - DNA, 1529 bp, Zea Mays
ctaacgagttttctgttcctccccaccgctctgcgaccgcatgaggcaccaggtgccgcacttcacgccgatgccgggccggtagggcagggcggtgcgctcatctccgctgctggtcccctccactgccatcgctgataccccaccaccgcagccaccaatcccctccatcgtcgctgcacctcgtcgcgattactggtgccctgcgctgtcgccggtcccttacgccgccatcgtcacctacgccgttgtcgtcccctgcatcgccaacgcacaagccatgttcttcgattccgacgaggctgagtaccacacaactcctattaggtcgccctatgatcgtgtgaacatgggtttcttctcagatgaagtggcgctgagtcttcataaggagcagtttatcccttctccgcgatctagtagagtggacgggttggacctcaactctagtggtgtggaattccagaacattgcatcatttcaagaccttcgtcagtcctagtctactgccaactactctgctactctgattcgtgatggccacaggggtcgcagtcattttcgatcaattggtattggtcgtggtgttacaggtagaggcttccgagttccacggatggccagtgagggtcctagaggtggtcattgagcacgaagcatcttctctcgtgcatatggtatgccttgatctattggtgcttcctcctcgggtggtcgtggtgccaccgatggtcatggtgccaatatttcagcttcaaatgcctctcgcagccaagaggacaatgatgatacctttgcacaggtgactccttttcctgacttgatcgttccaatgttgtacctaaattatgattataagaatggattaatagttggtcgtggtgccaatattccaatgttccaccgaaagttccaaatttctagcccatcagcccaataggtgtatttatagttagatgacctccttcgacttttatagttacactctttccatgactgaatctataaattatttacatttttgctagtagcagtctagcgagtttagttgatgaggcttctttttactttatcctaaattcctaagcacgcttatgccaactatgtaaactcaattttagtttagttgatggtatgtttataaaatccaatgggttgtttatactttataaaatccaatgggtagtggattcagtttttagagctgttcgtgtttggtaatgaactttcggtgagtaccctgggcaagatatgactgcattattagtaatgggtttataattctgttttggcagcatgcagagttaagcatgtagtttcaattagtcagttagtttctgttagcaatttaactccatgcaaaccattctattgatcaacactttgattttatgtaagtctgaactctgaataaatagaaaggaaaactgaaaagctgttgttctttgggcagcaccaaaactctgcatccgtaccatgggagaaaacagtggctggcttggcatcattatgtttgaaaactctgctgc

SEQ ID NO: 59217 - DNA, 1050 bp, Zea Mays
gaacatgggtttcttctcagatgaagtggcgctgagtcttcataaggagcagtttatcccttctccgcgatctagtagagtggacgggttggacctcaactctagtggtgtggaattccagaacattgcatcatttcaagaccttcgtcagtcctagtctactgccaactactctgctactctgattcgtgatggccacaggggtcgcagtcattttcgatcaattggtattggtcgtggtgttacaggtagaggcttccgagttccacggatggccagtgagggtcctagaggtggtcattgagcacgaagcatcttctctcgtgcatatggtatgccttgatctattggtgcttcctcctcgggtggtcgtggtgccaccgatggtcatggtgccaatatttcagcttcaaatgcctctcgcagccaagaggacaatgatgatacctttgcacaggtgatgacttggatgaggatattgccagtccagctagtggagcaagaaagaaacgagcatgcaacactagtactgcaacaaagccctatgttgaagattatgaggggaatgtggggaactttgcaatctaatagtgctactgcaaaaatggttctacagggaaaattaaggacagagtccatcaagaatgcgatgaatctggttaagaaatgtggtgcaccagaaggaagtgttgagcattacatggctacaaaattgttcatgaaagctgaaaactgagatatgttctttacttttgaatcaaatgaaggaaggttatcttggttaaagagaaattgtcaggactatgggttgtattgagttgggagttatcatgagtgtgtcataaaccttttatgtactactgtcttgaactattttatgtagtattgtcgtagaccttctatgtgtgtatgttgtcagaaaccttttatgtacggcttcatgaaccttttatatactattgtcatgaaccttctatgtgtgtctattgtcatgaacattttatgtactaccatcatgaacattttatgaatcttctatgtgtttcaaat

SEQ ID NO: 59218 - DNA, 822 bp, Zea Mays
ttttggttgtggctcaacaaacaaacgggtcttggccgggcaaatggtactgttgttgctgatgaagctttctagagggaacacacaaagaatcattcggaatggaagaagttacaataagaaccacatgaaaaccttgatcaacttcaacaaatgtatgagcacacgtatgagcacactgttgttgatggttcattgttttgtattcctggagagcatatgaatgaaggtgatgacttggatgaggatattgccagtccagctagtggagcaagaaagaaacgagcatgcaacactagtactgcaacaaagccctatgttgaagattatgaggggaatgtggggaactttgcaatctaatagtgctactgcaaaaatggttctacagggaaaattaaggacagagtccatcaagaatgcgatgaatctggttaagaaatgtggtgcaccagaaggaagtgttgagcattacatggctacaaaattgttcatgaaagctgaaaactgagatatgttctttacttttgaatcaaatgaaggaaggttatcttggttaaagagaaattgtcaggactatgggttgtattgagttgggagttatcatgagtgtgtcataaaccttttatgtactactgtcttgaactattttatgtagtattgtcgtagaccttctatgtgtgtatgttgtcagaaaccttttatgtacggcttcatgaaccttttatatactattgtcatgaaccttctatgtgtgtctattgtcatgaacattttatgtactaccatcatgaacattttatgaatcttctatgtgtttcaaat

SEQ ID NO: 59219 - DNA, 2530 bp, Zea Mays
ccaaccctctctctgaaaaacacacgcaccaaacccaacaccgctgcaccgtgcattccgcctacccctcctcccttccatcaccgcttgcatttattaaccacctcccctccccagcgacatctcgtgtctctgttgggagctccttcaacatctcgtctctctcatcctccgacgccatccgctcccggcccggccgagccgcgcgttgtgattccaaaagcaatcatacaggggctatggcgaggccttacaaacctaagaatatcctcattacaggagctgctggttttatcgcctcccatgtcgcaatccgcattaccaagaagtaccccgattacaagattatcgtccttgacaaacttgactactgctctaatctgaagaacctgcttcctgtgagctcatcaccaaacttcaagtttgtgaagggtgatattgcaagtgttgatcttgtcaacttccttcttgtcacagagaacattgataccataatgcacttcgcggcccagacacatgtcgacaattcatttgggaattctttcgaatttaccaagaacaatatttatggtacacatgtacttcttgaggcctgcaggattagtggccagatcaagaggttcatccatgtcagcactgatgaggtctatggggagactgacgaggatgcagttgttggcaaccatgaagcatcacagctgcttcctacaaacccatatgcagccaccaaagcgggagcggagatgcttgtaatggcatatgggagatcctatggactgccagttatcactactcggggaaacaatgtctatggcccaaatcagttccctgagaagcttatcccaaagttcattctcttggccatgagaggggagcccctccctatccatggtgatggagtcaatgtccgtagctacctctattgtgaggatgttgcggaggcatttgaggtcattcttcatcatggagaagttggacatgtttataatattggaacaaaaagggagaggacagtgcttgatgtggcaaaagatgtttgcagactcttcaatcttgaacctgacaaagtcatcatgtttgtcgagaacagaccttttaatgaccagaggtatttcttggacgatgagaagctcaagagccttggatgggctgagcgcaccccatgggaagaaggcttaaaaaagacaatggagtggtatgtagcaaattctgattattggggtgatgtttctggggccttactgcctcatccaaggacattgatgatgccagggtgcgaggggtctgaggagattaaaggaatactcagccggtttaataacattcaaacaaaggtcggttcaacatcagataatgctccagaaccgcatgccttcaagttcttgatatatggcaggacaggatggatcggcggacttcttgggaaaatatgtgagaagaaaggaattccatatgaatatggaaatggccgcttgcaagagcgttcttcactcgtcctagacatccaaactattaagccaacacatgtcttcaatgccgctggtgtgactggaaggcccaatgttgattggtgtgaatcgcacaagccggacaccatccgtaccaatgttgtgggcaccttgaatctagcagatgtatgtaggaagcatggcttattgatgatgaactatgccactgggtgcatatttgaatacgatgcacatcatcctgaagggtcaggtatcggcttcaaagaggaagatacaccaaattttactggttcgttctactcgaagacgaaggcaatggtcgaggagttattgaaggagtatgagaacgtctgcactctgcgagttcggatgccgatatcctctgacctcagcaacccgcggaacttcgtgacaaagatcagccgttacaacaaggtggtgaacatccccaacagcatgacgatattggacgaactcctgcccatctcagtggagatggcgaagaggaacctgcggggcatctataacttcaccaaccccggcgtcgtcagccacaacgagatcctagagatgtacaagcagtacatcgaccctagcttcaagtggacaaacttcaccctcgaggagcaggcgaaggtcatcgttgctccgcgaagcaacaacgagatggacgcaaccaagctgaagaacgagttccccgagctgctgtcgatcaaggactcgttgatcaagtacgtctttgagcccaacagaaaggtgcccacagactgaagcccgaagggctggcacagctgataccgtacaacacagcaaccattagtgttagactatgtgtgtgggccagcactactttacttttgggctgtcggtctattagggttagagtcctgtgagtctatatattgtacctcatctcttatacaatacatttttgggctgtgagtctatatattgtcgaacagcagaggaggtcgagggcggggctgtccgcccagatccacaccgccgccgcttctagggcaggtcgtcgtgacctggacctcccccgcacggacatcgct

SEQ ID NO: 59220 - DNA, 3139 bp, Zea Mays
cttgggtttacgggttacaaatgtcaaaatcgaaacaaagaatataaaaaagttgtgtgctcgagtggcagaagcatacatgagtgtacaagactcaggcactcccttcgctcttcctaagcacctggtagcctgctcgtctctcgtgcggcgccgagtctagcctcattctcaacaatccatctccacagccaccgccgcgcctgccctggcaaatggagttcgacttcgactcccatggcggcgacgcttggctgctcgacgccatgtccacgtcgctccacttttcggccgtttcgcccccggtgccgtcgccgtggccgtgcggcgacccgcatcatccttccatgtggctggacacggttgccctgcaagacgacggcccgagcgtccccgccgagaaatctgaaatatccaagaaatgtgaacatttaaatggtaaatgccaggttcatctttccctggttgatggttgttctgatagctcatatttcttgaaggaaaagctcacagtagctctcatgtacttcaaggagtctaccaagcagcatttgttggttcaagtttgggtgcctatcaggaaaggggaccactacatgctaagcacttcagggcagccctttgtgcttgacgaacagagcatcggacttcttgattatagggctgtgtccatgatgtatacgttcgctgtggatggggatagtgtcgaagaattgggtctacctggacgcgtatacaagcagaggctacctgaatggacgcccgatgtgcagtactacagcagtattgaatatgcacggcttaaccatgcaataagttacgacgtacatggtactgttgccttgcctgtgtttgattcttccatgaagtcatgcatcgctgttgttgaacttataatgacatcaaagaaagtaaactatgcaagagaggttggtgaagtctccaaagctcttgaggccgtgaatcttaaaagcactgaagttatcgaacatccatatgtccagatatttaatgaaggacatcaaaatgttcttgtagagatgttggaaatcataacagtaatttgtgaagagctcaaactacccatagctcagacttgggtgccatgcaaataccaaaatttattgatacattgtggtggtgaaaataagagttgcttcgatattcatgaaagttgtgcccaagaactatgcatgtcaacaagtgctgttatgtttcatattatcgatgctcatatgtggggcttccgagatgcctgtgtagagcaccacctgaagaagggacaaggggtttctggaaaggcttttatcctacgtaggccttgctttacgaaagatgttactagattctctaaaatggagtacccccttgttcactatgctcgtatgtttggattagctggctgtttttcgatatgcttgcaaagtgcttataatagaaatgaggactatgtattggagttcttcttgccacctgattgtagagaagatggtgagcaaaaggttcttttggactccatcttagctctgctgagacagtatcttaatagattgcaggtagccactgacgaaggctcaaatgaagtttaccttcaagtcgatgctattactataattgaaaatggagatataaagaatgcacatgtacaacatatgaactgtgaaggtggcattcatgcatcagatgagagaaatatgcatgtaatccatgagtctgacagccagaaaagaatatccccaacagaatctgaaacatgtccatcgcctgataacaccaaatgcaatgacaaattatttgctagacaaaatggtggatgtatctcagattctttattgcttgaaaacaatagcaagcatagtggaaggagacaaggaaaagaagaaaaaacattcagtttagaggttattcaacagtattttactggaagcttgaagaatgcagcaaaaagtcttggagtatgtcctacaacaatgaagcgcatttgtaggcaacatggtatttctcgctggccatctcgacaaatcagcaaggttaaccgtactgtttcaaaattaaagaaggtaattgaatctgttgaagggcatgagggtgcatttactctcacatctgtcacaggtcctcttcctgttgcttttggtccatccaatcctatcagtataaagaaccaaagccaaattaatgtttctggacttcccattccttctgttcaagaaaacagagactcatcctcacagaattgaagcagagaaagcttccaactcgagaaattcatcgaaagattgtagaacacattctgggagatcagaagaatcctaccctgttagccctgcaaacatgacatttgtttcaacactcctagaaccgcaacaaaacatgtacatacaagatggcttcacaaaagagtcttttcagaaagaggacctgcggtttcatgggatgtttgttaacggatcaggaagcttgaaagattgcatgaaccacatcacttctgcagttaacggaacgattatagggcatccaggaagtctcacgactgcacaaaattcagggataataacatgtccaggcagtctcatcagtgcgcagaattcaaggatagtaacagtaaaggcacgctacaaggaagacttgttaaggtttcggttcccatgttctggaagctttatcactttgaaagatgaggtggccaaaagaatacaaatggatggtgttctttttgacatcaagtatcttgatgatgatcatgaatgggtgaagttgacatgcgacaccgacttagaagagtgcatggagatctctcgggcatctggtagcaacgttttgaggctgctggtcactgacattgctccagtccttgggagttcttgtggtagcactggatgattttgaatgtttatgaatcggcatagtagtataatgcagtggccaaatctagctagctgatatttaggctagccgcttcggttcttaggtacatcaccatcttttacaggtatttctcattttgtgtagggaaatctcaggtataaatcatttcctttgaaacaatggaggtatttggtttgaggaatcacttcattcaaaatgagatggtgtatcataaatcaattcttcgaatttggtgtaatgacatcattcc

SEQ ID NO: 59221 - DNA, 2812 bp, Zea Mays
ctcccttcgctcttcctaagcacctggtagcctgctcgtctctcgtgcggcgccgagtctagcctcattctcaacaatccatctccacagccaccgccgcgcctgccctggcaaatggagttcgacttcgactcccatggcggcgacgcttggctgctcgacgccatgtccacgtcgctccacttttcggccgtttcgcccccggtgccgtcgccgtggccgtgcggcgacccgcatcatccttccatgtggctggacacggttgccctgcaagacgacggcccgagcgtccccgccggaaaagctcacagtagctctcatgtacttcaaggagtctaccaagcagcatttgttggttcaagtttgggtgcctatcaggaaaggggaccactacatgctaagcacttcagggcagccctttgtgcttgacgaacagagcatcggacttcttgattatagggctgtgtccatgatgtatacgttcgctgtggatggggatagtgtcgaagaattgggtctacctggacgcgtatacaagcagaggctacctgaatggacgcccgatgtgcagtactacagcagtattgaatatgcacggcttaaccatgcaataagttacgacgtacatggtactgttgccttgcctgtgtttgattcttccatgaagtcatgcatcgctgttgttgaacttataatgacatcaaagaaagtaaactatgcaagagaggttggtgaagtctccaaagctcttgaggccgtgaatcttaaaagcactgaagttatcgaacatccatatgtccagatatttaatgaaggacatcaaaatgttcttgtagagatgttggaaatcataacagtaatttgtgaagagctcaaactacccatagctcagacttgggtgccatgcaaataccaaaatttattgatacattgtggtggtgaaaataagagttgcttcgatattcatgaaagttgtgcccaagaactatgcatgtcaacaagtgctgttatgtttcatattatcgatgctcatatgtggggcttccgagatgcctgtgtagagcaccacctgaagaagggacaaggggtttctggaaaggcttttatcctacgtaggccttgctttacgaaagatgttactagattctctaaaatggagtacccccttgttcactatgctcgtatgtttggattagctggctgtttttcgatatgcttgcaaagtgcttataatagaaatgaggactatgtattggagttcttcttgccacctgattgtagagaagatggtgagcaaaaggttcttttggactccatcttagctctgctgagacagtatcttaatagattgcaggtagccactgacgaaggctcaaatgaagtttaccttcaagtcgatgctattactataattgaaaatggagatataaagaatgcacatgtacaacatatgaactgtgaaggtggcattcatgcatcagatgagagaaatatgcatgtaatccatgagtctgacagccagaaaagaatatccccaacagaatctgaaacatgtccatcgcctgataacaccaaatgcaatgacaaattatttgctagacaaaatggtggatgtatctcagattctttattgcttgaaaacaatagcaagcatagtggaaggagacaaggaaaagaagaaaaaacattcagtttagaggttattcaacagtattttactggaagcttgaagaatgcagcaaaaagtcttggagtatgtcctacaacaatgaagcgcatttgtaggcaacatggtatttctcgctggccatctcgacaaatcagcaagtataaagaaccaaagccaaattaatgtttctggacttcccattccttctgttcaagaaaacagagactcatcctcacagaattgaagcagagaaagcttccaactcgagaaattcatcgaaagattgtagaacacattctgggagatcagaagaatcctaccctgttagccctgcaaacatgacatttgtttcaacactcctagaaccgcaacaaaacatgtacatacaagatggcttcacaaaagagtcttttcagaaagaggacctgcggtttcatgggatgtttgttaacggatcaggaagcttgaaagattgcatgaaccacatcacttctgcagttaacggaacgattatagggcatccaggaagtctcacgactgcacaaaattcagggataataacatgtccaggcagtctcatcagtgcgcagaattcaaggatagtaacagtaaaggcacgctacaaggaagacttgttaaggtttcggttcccatgttctggaagctttatcactttgaaagatgaggtggccaaaagaatacaaatggatggtgttctttttgacatcaagtatcttgatgatgatcatgaatgggtgaagttgacatgcgacaccgacttagaagagtgcatggagatctctcgggcatctggtagcaacgttttgaggctgctggtcactgacattgctccagtccttgggagttcttgtggtagcactggatgattttgaatgtttatgaatcggcatagtagtataatgcagtggccaaatctagctagctgatatttaggctagccgcttcggttcttaggtacatcaccatcttttacaggtatttctcattttgtgtagggaaatctcaggtataaatcatttcctttgaaacaatggaggtatttggtttgaggaatcacttcattcaaaatgagatggtgtatcataaatcaattcttcgaatttggtgtaatgacatcattcc

SEQ ID NO: 59222 - DNA, 3033 bp, Zea Mays
tgctcgtctctcgtgcggcgccgagtctagcctcattctcaacaatccatctccacagccaccgccgcgcctgccctggcaaatggagttcgacttcgactcccatggcggcgacgcttggctgctcgacgccatgtccacgtcgctccacttttcggccgtttcgcccccggtgccgtcgccgtggccgtgcggcgacccgcatcatccttccatgtggctggacacggttgccctgcaagacgacggcccgagcgtccccgccggttcatctttccctggttgatggttgttctgatagctcatatttcttgaaggaaaagctcacagtagctctcatgtacttcaaggagtctaccaagcagcatttgttggttcaagtttgggtgcctatcaggaaaggggaccactacatgctaagcacttcagggcagccctttgtgcttgacgaacagagcatcggacttcttgattatagggctgtgtccatgatgtatacgttcgctgtggatggggatagtgtcgaagaattgggtctacctggacgcgtatacaagcagaggctacctgaatggacgcccgatgtgcagtactacagcagtattgaatatgcacggcttaaccatgcaataagttacgacgtacatggtactgttgccttgcctgtgtttgattcttccatgaagtcatgcatcgctgttgttgaacttataatgacatcaaagaaagtaaactatgcaagagaggttggtgaagtctccaaagctcttgaggccgtgaatcttaaaagcactgaagttatcgaacatccatatgtccagatatttaatgaaggacatcaaaatgttcttgtagagatgttggaaatcataacagtaatttgtgaagagctcaaactacccatagctcagacttgggtgccatgcaaataccaaaatttattgatacattgtggtggtgaaaataagagttgcttcgatattcatgaaagttgtgcccaagaactatgcatgtcaacaagtgctgttatgtttcatattatcgatgctcatatgtggggcttccgagatgcctgtgtagagcaccacctgaagaagggacaaggggtttctggaaaggcttttatcctacgtaggccttgctttacgaaagatgttactagattctctaaaatggagtacccccttgttcactatgctcgtatgtttggattagctggctgtttttcgatatgcttgcaaagtgcttataatagaaatgaggactatgtattggagttcttcttgccacctgattgtagagaagatggtgagcaaaaggttcttttggactccatcttagctctgctgagacagtatcttaatagattgcaggtagccactgacgaaggctcaaatgaagtttaccttcaagtcgatgctattactataattgaaaatggagatataaagaatgcacatgtacaacatatgaactgtgaaggtggcattcatgcatcagatgagagaaatatgcatgtaatccatgagtctgacagccagaaaagaatatccccaacagaatctgaaacatgtccatcgcctgataacaccaaatgcaatgacaaattatttgctagacaaaatggtggatgtatctcagattctttattgcttgaaaacaatagcaagcatagtggaaggagacaaggaaaagaagaaaaaacattcagtttagaggttattcaacagtattttactggaagcttgaagaatgcagcaaaaagtcttggagtatgtcctacaacaatgaagcgcatttgtaggcaacatggtatttctcgctggccatctcgacaaatcagcaaggttaaccgtactgtttcaaaattaaagaaggtaattgaatctgttgaagggcatgagggtgcatttactctcacatctgtcacaggtcctcttcctgttgcttttggtccatccaatcctatcagtataaagaaccaaagccaaattaatgtttctggacttcccattccttctgttcaagaaaacagagactcatcctcacagagtaagttactagaaaatgatattcaccgaagcactcttgttccccagaaaagctttctagctaatatcaacagacagattgaagcagagaaagcttccaactcgagaaattcatcgaaagattgtagaacacattctgggagatcagaagaatcctaccctgttagccctgcaaacatgacatttgtttcaacactcctagaaccgcaacaaaacatgtacatacaagatggcttcacaaaagagtcttttcagaaagaggacctgcggtttcatgggatgtttgttaacggatcaggaagcttgaaagattgcatgaaccacatcacttctgcagttaacggaacgattatagggcatccaggaagtctcacgactgcacaaaattcagggataataacatgtccaggcagtctcatcagtgcgcagaattcaaggatagtaacagtaaaggcacgctacaaggaagacttgttaaggtttcggttcccatgttctggaagctttatcactttgaaagatgaggtggccaaaagaatacaaatggatggtgttctttttgacatcaagtatcttgatgatgatcatgaatgggtgaagttgacatgcgacaccgacttagaagagtgcatggagatctctcgggcatctggtagcaacgttttgaggctgctggtcactgacattgctccagtccttgggagttcttgtggtagcactggatgattttgaatgtttatgaatcggcatagtagtataatgcagtggccaaatctagctagctgatatttaggctagccgcttcggttcttaggtacatcaccatcttttacaggtatttctcattttgtgtagggaaatctcaggtataaatcatttcctttgaaacaatggaggtatttggtttgaggaatcacttcattcaaaatgagatggtgtatcataaatcaattcttcgaatttggtgtaatgacatcattcc

SEQ ID NO: 59223 - DNA, 762 bp, Zea Mays
ctcgatttgtaaccgactgacatgctctcgcagggaagccggtccaggctgcgctcctgctcaactacgacccctccgggccatctcgcctccttcccgtcgtagcagagcaagagggaacacaactttcagctcttgatatgcaaccactcctggactttgtcaagaggggtaatctgcagactgaattgttctctgttgggctgaaccaacatttggtcacctcaatccatgaaaactggttttgcgcccgctgcattaacagcacaaaaccagaaggtgaaggagtaatagttatgcagattggagcttgcttattagtcactatcttcgcaagcaatggtggctgctgatcagtttgcaatacagtttaaccggaggagtcactaatttccagtatagtttcatgagtgatgttgatcgcaatttgttagtgtttgggatgatagtgctggaatgccgtagatgaccttatgtaacttgtaatgttacgatattctcggccgtagttatgctaatataatagcgaatattgactaatactgatgttcctagtgtgaggttgaagaagctcatgttgaatttgtggaaagtttccaaagcatccaaaagcttaaaagggacattagtttttcatcatttctcaatgtgagctcatgcaaaacattgaaggtttgaaatactttgaatcacgattcacagcaaaatgtatatagaaaaatactgcatatgtatcaagctaaaatctgattgtaatgagat

SEQ ID NO: 59224 - DNA, 757 bp, Zea Mays
cgcagggaagccggtccaggctgcgctcctgctcaactacgacccctccgggccatctcgcctccttcccgtcgtagcagagcaagagggaacacaactttcagctcttgatatgcaaccactcctggactttgtcaagaggggtaatctgcagactgaattgttctctgttgggctgaaccaacatttggtcacctcaatccatgaaaactggttttgcgcccgctgcattaacagcacaaaaccagaaggtgaaggagtaatagttatgcagattggagcttgcttattagtcactatgtatgctggttctcttgctgcagcttcgcaagcaatggtggctgctgatcagtttgcaatacagtttaaccggaggagtcactaatttccagtatagtttcatgagtgatgttgatcgcaatttgttagtgtttgggatgatagtgctggaatgccgtagatgaccttatgtaacttgtaatgttacgatattctcggccgtagttatgctaatataatagcgaatattgactaatactgatgttcctagtgtgaggttgaagaagctcatgttgaatttgtggaaagtttccaaagcatccaaaagcttaaaagggacattagtttttcatcatttctcaatgtgagctcatgcaaaacattgaaggtttgaaatactttgaatcacgattcacagcaaaatgtatatagaaaaatactgcatatgtatcaagctaaaatctgattgtaatgagat

SEQ ID NO: 59225 - DNA, 886 bp, Zea Mays
cgcagggaagccggtccaggctgcgctcctgctcaactacgacccctccgggccatctcgcctccttcccgtcgtgggcagattctattctgaggaggtagtgaatcagggcacatggaacaccagggttgcagttagctaaattcatcaaagctcatgaatccttatacaacccccacgttattgcaacaaaaaggtgaaaagagcagagcaagagggaacacaactttcagctcttgatatgcaaccactcctggactttgtcaagaggggtaatctgcagactgaattgttctctgttgggctgaaccaacatttggtcacctcaatccatgaaaactggttttgcgcccgctgcattaacagcacaaaaccagaaggtgaaggagtaatagttatgcagattggagcttgcttattagtcactatgtatgctggttctcttgctgcagcttcgcaagcaatggtggctgctgatcagtttgcaatacagtttaaccggaggagtcactaatttccagtatagtttcatgagtgatgttgatcgcaatttgttagtgtttgggatgatagtgctggaatgccgtagatgaccttatgtaacttgtaatgttacgatattctcggccgtagttatgctaatataatagcgaatattgactaatactgatgttcctagtgtgaggttgaagaagctcatgttgaatttgtggaaagtttccaaagcatccaaaagcttaaaagggacattagtttttcatcatttctcaatgtgagctcatgcaaaacattgaaggtttgaaatactttgaatcacgattcacagcaaaatgtatatagaaaaatactgcatatgtatcaagctaaaatctgattgtaatgagat

SEQ ID NO: 59226 - DNA, 880 bp, Zea Mays
agccggtccaggctgcgctcctgctcaactacgacccctccgggccatctcgcctccttcccgtcgtgattaaccaggggcagattctattctgaggaggtagtgaatcagggcacatggaacaccagggttgcagttagctaaattcatcaaagctcatgaatccttatacaacccccacgttattgcaacaaaaagagcagagcaagagggaacacaactttcagctcttgatatgcaaccactcctggactttgtcaagaggggtaatctgcagactgaattgttctctgttgggctgaaccaacatttggtcacctcaatccatgaaaactggttttgcgcccgctgcattaacagcacaaaaccagaaggtgaaggagtaatagttatgcagattggagcttgcttattagtcactatgtatgctggttctcttgctgcagcttcgcaagcaatggtggctgctgatcagtttgcaatacagtttaaccggaggagtcactaatttccagtatagtttcatgagtgatgttgatcgcaatttgttagtgtttgggatgatagtgctggaatgccgtagatgaccttatgtaacttgtaatgttacgatattctcggccgtagttatgctaatataatagcgaatattgactaatactgatgttcctagtgtgaggttgaagaagctcatgttgaatttgtggaaagtttccaaagcatccaaaagcttaaaagggacattagtttttcatcatttctcaatgtgagctcatgcaaaacattgaaggtttgaaatactttgaatcacgattcacagcaaaatgtatatagaaaaatactgcatatgtatcaagctaaaatctgattgtaatgagat

SEQ ID NO: 59227 - DNA, 878 bp, Zea Mays
ggctgcgctcctgctcaactacgacccctccgggccatctcgcctccttcccgtcgtgattaaccaggggcagattctattctgaggaggtagtgaatcagggcacatggaacaccagggttgcagttagctaaattcatcaaagctcatgaatccttatacaacccccacgttattgcaacaaaaaggtgaaaagagcagagcaagagggaacacaactttcagctcttgatatgcaaccactcctggactttgtcaagaggggtaatctgcagactgaattgttctctgttgggctgaaccaacatttggtcacctcaatccatgaaaactggttttgcgcccgctgcattaacagcacaaaaccagaaggtgaaggagtaatagttatgcagattggagcttgcttattagtcactatgtatgctggttctcttgctgcagcttcgcaagcaatggtggctgctgatcagtttgcaatacagtttaaccggaggagtcactaatttccagtatagtttcatgagtgatgttgatcgcaatttgttagtgtttgggatgatagtgctggaatgccgtagatgaccttatgtaacttgtaatgttacgatattctcggccgtagttatgctaatataatagcgaatattgactaatactgatgttcctagtgtgaggttgaagaagctcatgttgaatttgtggaaagtttccaaagcatccaaaagcttaaaagggacattagtttttcatcatttctcaatgtgagctcatgcaaaacattgaaggtttgaaatactttgaatcacgattcacagcaaaatgtatatagaaaaatactgcatatgtatcaagctaaaatctgattgtaatgagat

SEQ ID NO: 59228 - DNA, 1466 bp, Zea Mays
gtcctttcatagtccctagatcacccttttcgtggtataagtaccagcatcagttttacctgtactaggatcatgcgtgtgcgctgcaacgggttacgggtgatgtaccatccatttgagacttcccttcaacctacatttcttaacctggcaagatgtactcctcagtcctcactatgggcagacaaaggcccaactgtagccttcaaattctttgatctgctattttttgtgatagttgggtgagacgtggagaaacaatatgctacaatcacaggccatagatttatattttctacgaacttacaatgaattgaatattttcaatgctacattcggttcttgctggttaacatcattataattggaatgagaggaatgctttctccgcaacattagttcccctgatcccagtaatgctcagccctaaaatgtatggtgcttaccatgaaaagaatgcatatatgcaagtaactgcatgtcaaatagaatcctttcttgaagccagaaacctgagtgaaatttacttgttcaaatgcaaaatcagcactaacataatagttacatattagtggttcatacaaagtaacttttgttttcagaaactttacatagtatgatacaaaacaatgtatagtgcatcaggattaaccaggggcagattctattctgaggaggtagtgaatcagggcacatggaacaccagggttgcagttagctaaattcatcaaagctcatgaatccttatacaacccccacgttattgcaacaaaaaggtgaaaagagcagagcaagagggaacacaactttcagctcttgatatgcaaccactcctggactttgtcaagaggggtaatctgcagactgaattgttctctgttgggctgaaccaacatttggtcacctcaatccatgaaaactggttttgcgcccgctgcattaacagcacaaaaccagaaggtgaaggagtaatagttatgcagattggagcttgcttattagtcactatgtatgctggttctcttgctgcagcttcgcaagcaatggtggctgctgatcagtttgcaatacagtttaaccggaggagtcactaatttccagtatagtttcatgagtgatgttgatcgcaatttgttagtgtttgggatgatagtgctggaatgccgtagatgaccttatgtaacttgtaatgttacgatattctcggccgtagttatgctaatataatagcgaatattgactaatactgatgttcctagtgtgaggttgaagaagctcatgttgaatttgtggaaagtttccaaagcatccaaaagcttaaaagggacattagtttttcatcatttctcaatgtgagctcatgcaaaacattgaaggtttgaaatactttgaatcacgattcacagcaaaatgtatatagaaaaatactgcatatgtatcaagctaaaatctgattgtaatgagat

SEQ ID NO: 59229 - DNA, 1458 bp, Zea Mays
gtcctttcatagtccctagatcacccttttcgtggtataagtaccagcatcagttttacctgtactaggatcatgcgtgtgcgctgcaacgggttacgggtgatgtaccatccatttgagacttcccttcaacctacatttcttaacctggcaagatgtactcctcagtcctcactatgggcagacaaaggcccaactgtagccttcaaattctttgatctgctattttttgtgatagttgggtgagacgtggagaaacaatatgctacaatcacaggccatagatttatattttctacgaacttacaatgaattgaatattttcaatgctacattcggttcttgctggttaacatcattataattggaatgagaggaatgctttctccgcaacattagttcccctgatcccagtaatgctcagccctaaaatgtatggtgcttaccatgaaaagaatgcatatatgcaagtaactgcatgtcaaatagaatcctttcttgaagccagaaacctgagtgaaatttacttgttcaaatgcaaaatcagcactaacataatagttacatattagtggttcatacaaagtaacttttgttttcagaaactttacatagtatgatacaaaacaatgtatagtgcatcaggattaaccaggggcagattctattctgaggaggtagtgaatcagggcacatggaacaccagggttgcagttagctaaattcatcaaagctcatgaatccttatacaacccccacgttattgcaacaaaaagagcagagcaagagggaacacaactttcagctcttgatatgcaaccactcctggactttgtcaagaggggtaatctgcagactgaattgttctctgttgggctgaaccaacatttggtcacctcaatccatgaaaactggttttgcgcccgctgcattaacagcacaaaaccagaaggtgaaggagtaatagttatgcagattggagcttgcttattagtcactatgtatgctggttctcttgctgcagcttcgcaagcaatggtggctgctgatcagtttgcaatacagtttaaccggaggagtcactaatttccagtatagtttcatgagtgatgttgatcgcaatttgttagtgtttgggatgatagtgctggaatgccgtagatgaccttatgtaacttgtaatgttacgatattctcggccgtagttatgctaatataatagcgaatattgactaatactgatgttcctagtgtgaggttgaagaagctcatgttgaatttgtggaaagtttccaaagcatccaaaagcttaaaagggacattagtttttcatcatttctcaatgtgagctcatgcaaaacattgaaggtttgaaatactttgaatcacgattcacagcaaaatgtatatagaaaaatactgcatatgtatcaagctaaaatctgattgtaatgagat

SEQ ID NO: 59230 - DNA, 1119 bp, Zea Mays
atcgaattgacctattcttcgcggatttgccctgctacgaatggtgtcaaaatggacatactttgtgttcgacatgcaaggccagggtgcacaacaggtgccctacatgcagacaagagcttggtgatatcaggtgcttagcattggaaaaagtagcagagtcacttgagcttccctgtaagtactgctctttagggtgcccagagatcttcccatactacagcaagataaagcacgaagcacagtgcagcttcaggccatatacctgcccctatgctggttctgaatgtgctgtggctggtgatattccattccttgttgcacatttgagggatgatcacaaagtcgatatgcacagcggctgcacgttcaaccatagatatgtcaagtccaacccgcgagaggttgaaaacgccacctggatgcttacgtacttctgcctgcacttcgaggcattccagctcggaatggctccagtctacatggctttcctccggttcatgggtgatgagaatgatgcgaggaactacacatatagcctagaggttggtggtaacgggaggaagatggtgtgggaaggtactcctagaagcatccgtgacagccaccgcaaggtccgtgacagccatgatggcctcatcatccagaggaacatggcgctgttcttctcgggcggtgacaggaaggagctgaagctgagggtgactgggcggatctggaaggagcagaccaacccggacggggcctgcattcctaacctttgcagctgagcaagggagacgtttggaaagcaaaaaagaaagaaaatacggtgctgtttggctggcttgtctcaaaattgccacgttatgctttcatcatagtgtctgccgttgaaatgttgtagtagtaaaatcgtagggtgtaaaatgttttcttgtaaagtcattgtgtataccaaccaaattcaagaaagcttacaagttggcccataaatgcatgtgctacgttcttgtgtagtttgagttctgttatcaaggtattgggctcaggaaatgctcagtgttcatgtttatttgatagactattagtgttatcgcgaagaaaatgggaccaacgaattaactggatccattttct

SEQ ID NO: 59231 - DNA, 1199 bp, Zea Mays
aaaacatagaacattcactttgatggagcgcgcgatgaacttgaagagaacagtgtacttctcccagagaacccaaatgtcatgataatccttttgtcatgcattcatgcttttgattcgcctgtgtcaaaatggacatactttgtgttcgacatgcaaggccagggtgcacaacaggtgccctacatgcagacaagagcttggtgatatcaggtgcttagcattggaaaaagtagcagagtcacttgagcttccctgtaagtactgctctttagggtgcccagagatcttcccatactacagcaagataaagcacgaagcacagtgcagcttcaggccatatacctgcccctatgctggttctgaatgtgctgtggctggtgatattccattccttgttgcacatttgagggatgatcacaaagtcgatatgcacagcggctgcacgttcaaccatagatatgtcaagtccaacccgcgagaggttgaaaacgccacctggatgcttacgtacttctgcctgcacttcgaggcattccagctcggaatggctccagtctacatggctttcctccggttcatgggtgatgagaatgatgcgaggaactacacatatagcctagaggttggtggtaacgggaggaagatggtgtgggaaggtactcctagaagcatccgtgacagccaccgcaaggtccgtgacagccatgatggcctcatcatccagaggaacatggcgctgttcttctcgggcggtgacaggaaggagctgaagctgagggtgactgggcggatctggaaggagcagaccaacccggacggggcctgcattcctaacctttgcagctgagcaagggagacgtttggaaagcaaaaaagaaagaaaatacggtgctgtttggctggcttgtctcaaaattgccacgttatgctttcatcatagtgtctgccgttgaaatgttgtagtagtaaaatcgtagggtgtaaaatgttttcttgtaaagtcattgtgtataccaaccaaattcaagaaagcttacaagttggcccataaatgcatgtgctacgttcttgtgtagtttgagttctgttatcaaggtattgggctcaggaaatgctcagtgttcatgtttatttgatagactattagtgttatcgcgaagaaaatgggaccaacgaattaactggatccattttct

SEQ ID NO: 59232 - DNA, 1023 bp, Zea Mays
ggcacctcctgggcaggctgggagatgattaagttccatctagtgtcaaaatggacatactttgtgttcgacatgcaaggccagggtgcacaacaggtgccctacatgcagacaagagcttggtgatatcaggtgcttagcattggaaaaagtagcagagtcacttgagcttccctgtaagtactgctctttagggtgcccagagatcttcccatactacagcaagataaagcacgaagcacagtgcagcttcaggccatatacctgcccctatgctggttctgaatgtgctgtggctggtgatattccattccttgttgcacatttgagggatgatcacaaagtcgatatgcacagcggctgcacgttcaaccatagatatgtcaagtccaacccgcgagaggttgaaaacgccacctggatgcttacggtattccattgttttgggcagtacttctgcctgcacttcgaggcattccagctcggaatggctccagtctacatggctttcctccggttcatgggtgatgagaatgatgcgaggaactacacatatagcctagaggttggtggtaacgggaggaagatggtgtgggaagctgagggtgactgggcggatctggaaggagcagaccaacccggacggggcctgcattcctaacctttgcagctgagcaagggagacgtttggaaagcaaaaaagaaagaaaatacggtgctgtttggctggcttgtctcaaaattgccacgttatgctttcatcatagtgtctgccgttgaaatgttgtagtagtaaaatcgtagggtgtaaaatgttttcttgtaaagtcattgtgtataccaaccaaattcaagaaagcttacaagttggcccataaatgcatgtgctacgttcttgtgtagtttgagttctgttatcaaggtattgggctcaggaaatgctcagtgttcatgtttatttgatagactattagtgttatcgcgaagaaaatgggaccaacgaattaactggatccattttct

SEQ ID NO: 59233 - DNA, 3258 bp, Zea Mays
ccaggaggatctctacttctccacccagatttccaggctcccatcctcacctctgacactacgccccgtacctcgtgcccactgccaccaactttgctctcggtgctccgtggcttcgccttggcacgcgccggtcgtgcccgcggcctcgctcctccactagcataggcacaggtgaacccgcacagcgacataggcggcgcttcgcgcctggctttgcctcggcacacgccgagtcgtgccttagcccccaacccccctcttgcacaggattagtcgtcttgtgtcttcaacattacgaagtgatgatggccttctttttcctgaaaggatgatgactatcttgctcctatccaagctgatcgagaaaaagagttgaagtttgtgcagtaggttgaactccacagggtagaggaagctgcagcaagagaggctgctcttgaaaatcaaaagaaagaaaagaagctaaaaaagaacacaagggagaggtagttcacttagtactatcaaagtcaaagttgcagaatatgattgagattcatatatctacttatacagtttagtaagctacagcttggttcggtaaattgcagaacatcatgaatcatgacctcttatgcatggatggtaaattatttttagtttacatctcagtgttcattttacttaattgaccatcaatagcatggagtaccaaattttcttcgtcttaggaaatatatcctcattacttgtgcgaacctctcaacttatggaatgatacttagactgctctctttcgtctaggttcatttgatcgttcttttactgtattaatacaacttctattttcaagctactaagaaagctgctgaaattggacagctgaacgatggttatatgtttgacacatcaaccgacatgtcatgaatgtgaagataatacaccctgccctccattgacccactacattttttgttatattttgcgttttttgacattagttgcttataggttagattccccaacatgtccagtttgtccgcaaggtttttgtggggatttcaaacaaacattaaccccttccgggttggattggaaaatggactgcggactgccttataatccttgggggcatgctgtgcacgacatggccaccgagagccgatggatgccagatgagaagaagctggcttctgctgccactgagaaattcgaagaggaagataatacctcctattgtcaacagtgatgtgtcaatggagtgtgtatagcatgaaaaaaccaaacatgacagttcaagagagacatttcagaactgcttagtttgtatatcccatgagttatctcctaacatcttttaactgcttcaacattgcatcgaaagcaatataggcatgcctgatgatggagagatagatattttcatcgaagctgtcggtgacatgctatttgagttgcagaaacatttcatattttctattattatatacataggtttttgtatggagaaccataaaatatctgtttggaagggacgagatttgaaggtgatgaggctccttaaagaaggtttaatggaacaaatattagcataaggagtttgctggccatgtcaaaatctctatgggcagattctaactagagacctctaaaggttcaatgagatgaacattcatcaagtcttcgtctagatagaatctcatggtttcaagactgccttcaggttttggatccttggaactcattcgctgcacccagtcactgcctcccagatcctcaacatatggatttccccaattttagtgttgacaatcctcacttctaggaggtccattgtgatatctactttgaagtgcatgccatcaacaatactttgacgccactatttgtggcactaaactttgaaggggttgtagctaactgattgcaatcaattgaactcagggccactcactatttggaaacgtcagcagctaatttggacaacttgcaccttctatctatcttcaacaactaatttcgacaatttctgactttcatttagaacaatcatctactatttcggaattggaagaagagcgcacatccctcctaaacctcatttcttactcgctgtttcgaatcaagaacaaccgttttggacagcttgcagcttctatacagaacaggtcatttgtacatcttgcaacctgtacatactccagatacgctttgtccgataagcacaaatattacctttatagtatgcatcttcaggtttttccactcacgcctcaaattttattccagcctttgtatctcatttcaataagtagctgtgctcagctgcttaccacacatcaaaaaggtaactcctatctatatacctcccagattttacccacttgcaaaatgtttgcttacacgcataatatttactcaacttataatgaaactaacattaaaaaaagtaaatgttatattcagaagatgtactccccatttgtatttgcaaactcaaatgaacatattttacccttatttactgctttgtaaaaggatacgtagactccacaaataaagttcactcatatactcaattagaacataatgaactgacactttatgattacaaccaacatactctcaaatctgattctaaataacatgcttccaaatctgatactgaagaagaaactacaaaggtacaattcgtccaccttattttaaaaattgataaacacaagtacatttgtaaaatgagcgtataaaaatgctccttttcccttttataggaccaaacaacgatcgatggacaactcaaaaggaaaaaaaataatatgccctcaatggaagctcctccaaaaagaattggagcatgcacatacgagtagcagagtagcgacattacattatgggggagaagatctcccataggtggggagctgggaggtacagttgttgatggcgcccacgacgcacaggcccttgacaccatccttgtccttgtagtcccctgacaaaacagaaaaaacgacgcatgatgaccatgagcacaagattgcgtgtcagattcatcttggaacgaggggcgtggtcgcttaccgtcgtagttgtaggtgcagaggaagtaagaagaattcgttaattactgttatagagaataaaatgaagtagatggcttaatctaggctgtcgaatgtcattatcataaggcatatccactatgctgcaagcctggaaccttttattcatgtaaagtaagcatgtgatgtgaactccgtcatgctagcttca

SEQ ID NO: 59234 - DNA, 2748 bp, Zea Mays
aggatctctacttctccacccagatttccaggctcccatcctcacctctgacactacgccccgtacctcgtgcccactgccaccaactttgctctcggtgctccgtggcttcgccttggcacgcgccggtcgtgcccgcggcctcgctcctccactagcataggcacaggtgaacccgcacagcgacataggcggcgcttcgcgcctggctttgcctcggcacacgccgagtcgtgccttagcccccaacccccctcttgcacaggattagtcgtcttgtgtcttcaacattacgaagtgatgatggccttctttttcctgaaaggatgatgactatcttgctcctatccaagctgatcgagaaaaagagttgaagtttgtgcagtaggttgaactccacagggtagaggaagctgcagcaagagaggctgctcttgaaaatcaaaagaaagaaaagaagctaaaaaagaacacaagggagaggttagattccccaacatgtccagtttgtccgcaaggtttttgtggggatttcaaacaaacattaaccccttccgggttggattggaaaatggactgcggactgccttataatccttgggggcatgctgtgcacgacatggccaccgagagccgatggatgccagatgagaagaagctggcttctgctgccactgagaaattcgaagaggaagataatacctcctattgtcaacagtgatgtgtcaatggagtgtgtatagcatgaaaaaaccaaacatgacagttcaagagagacatttcagaactgcttagtttgtatatcccatgagttatctcctaacatcttttaactgcttcaacattgcatcgaaagcaatataggcatgcctgatgatggagagatagatattttcatcgaagctgtcggtgacatgctatttgagttgcagaaacatttcatattttctattattatatacataggtttttgtatggagaaccataaaatatctgtttggaagggacgagatttgaaggtgatgaggctccttaaagaaggtttaatggaacaaatattagcataaggagtttgctggccatgtcaaaatctctatgggcagattctaactagagacctctaaaggttcaatgagatgaacattcatcaagtcttcgtctagatagaatctcatggtttcaagactgccttcaggttttggatccttggaactcattcgctgcacccagtcactgcctcccagatcctcaacatatggatttccccaattttagtgttgacaatcctcacttctaggaggtccattgtgatatctactttgaagtgcatgccatcaacaatactttgacgccactatttgtggcactaaactttgaaggggttgtagctaactgattgcaatcaattgaactcagggccactcactatttggaaacgtcagcagctaatttggacaacttgcaccttctatctatcttcaacaactaatttcgacaatttctgactttcatttagaacaatcatctactatttcggaattggaagaagagcgcacatccctcctaaacctcatttcttactcgctgtttcgaatcaagaacaaccgttttggacagcttgcagcttctatacagaacaggtcatttgtacatcttgcaacctgtacatactccagatacgctttgtccgataagcacaaatattacctttatagtatgcatcttcaggtttttccactcacgcctcaaattttattccagcctttgtatctcatttcaataagtagctgtgctcagctgcttaccacacatcaaaaaggtaactcctatctatatacctcccagattttacccacttgcaaaatgtttgcttacacgcataatatttactcaacttataatgaaactaacattaaaaaaagtaaatgttatattcagaagatgtactccccatttgtatttgcaaactcaaatgaacatattttacccttatttactgctttgtaaaaggatacgtagactccacaaataaagttcactcatatactcaattagaacataatgaactgacactttatgattacaaccaacatactctcaaatctgattctaaataacatgcttccaaatctgatactgaagaagaaactacaaaggtacaattcgtccaccttattttaaaaattgataaacacaagtacatttgtaaaatgagcgtataaaaatgctccttttcccttttataggaccaaacaacgatcgatggacaactcaaaaggaaaaaaaataatatgccctcaatggaagctcctccaaaaagaattggagcatgcacatacgagtagcagagtagcgacattacattatgggggagaagatctcccataggtggggagctgggaggtacagttgttgatggcgcccacgacgcacaggcccttgacaccatccttgtccttgtagtcccctgacaaaacagaaaaaacgacgcatgatgaccatgagcacaagattgcgtgtcagattcatcttggaacgaggggcgtggtcgcttaccgtcgtagttgtaggtgcagaggaagtaagaagaattcgttaattactgttatagagaataaaatgaagtagatggcttaatctaggctgtcgaatgtcattatcataaggcatatccactatgctgcaagcctggaaccttttattcatgtaaagtaagcatgtgatgtgaactccgtcatgctagcttca

SEQ ID NO: 59235 - DNA, 3312 bp, Zea Mays
ctctacttctccacccagatttccaggctcccatcctcacctctgacactacgccccgtacctcgtgcccactgccaccaactttgctctcggtgctccgtggcttcgccttggcacgcgccggtcgtgcccgcggcctcgctcctccactagcataggcacaggtgaacccgcacagcgacataggcggcgcttcgcgcctggctttgcctcggcacacgccgagtcgtgccttagcccccaacccccctcttgcacaggattagtcgtcttgtgtcttcaacattacgaagtgatgatggccttctttttcctgaaaggatgatgactatcttgctcctatccaagctgatcgagaaaaagagttgaagtttgtgcagtaggttgaactccacagggtagaggaagctgcagcaagagaggctgctcttgaaaatcaaaagaaagaaaagaagctaaaaaagaacacaagggagaggtagttcacttagtactatcaaagtcaaagttgcagaatatgattgagattcatatatctacttatacagtttagtaagctacagcttggttcggtaaattgcagaacatcatgaatcatgacctcttatgcatggatggtaaattatttttagtttacatctcagtgttcattttacttaattgaccatcaatagcatggagtaccaaattttcttcgtcttaggaaatatatcctcattacttgtgcgaacctctcaacttatggaatgatacttagactgctctctttcgtctaggttcatttgatcgttcttttactgtattaatacaacttctattttcaagctactaagaaagctgctgaaattggacagctgaacgatggttatatgtttgacacatcaaccgacatgtcatgaatgtgaagataatacaccctgccctccattgacccactacattttttgttatattttgcgttttttgacattagttgcttataggttagattccccaacatgtccagtttgtccgcaaggtttttgtggggatttcaaacaaacattaaccccttccgggttggattggaaaatggactgcggactgccttataatccttgggggcatgctgtgcacgacatggccaccgagagccgatggatgccagatgagaagaagctggcttctgctgccactgagaaattcgaagaggaagataatacctcctattgtcaacagtgatgtgtcaatggagtgtgtatagcatgaaaaaaccaaacatgacagttcaagagagacatttcagaactgcttagtttgtatatcccatgagttatctcctaacatcttttaactgcttcaacattgcatcgaaagcaatataggcatgcctgatgatggagagatagatattttcatcgaagctgtcggtgacatgctatttgagttgcagaaacatttcatattttctattattatatacataggtttttgtatggaggtactgaaagccccctcctgaaatatagtatgattaccaccttctctacaatcctttttttgtttttgttttatttttacgttgaagcaaagaaccataaaatatctgtttggaagggacgagatttgaaggtgatgaggctccttaaagaaggtttaatggaacaaatattagcataaggagtttgctggccatgtcaaaatctctatgggcagattctaactagagacctctaaaggttcaatgagatgaacattcatcaagtcttcgtctagatagaatctcatggtttcaagactgccttcaggttttggatccttggaactcattcgctgcacccagtcactgcctcccagatcctcaacatatggatttccccaattttagtgttgacaatcctcacttctaggaggtccattgtgatatctactttgaagtgcatgccatcaacaatactttgacgccactatttgtggcactaaactttgaaggggttgtagctaactgattgcaatcaattgaactcagggccactcactatttggaaacgtcagcagctaatttggacaacttgcaccttctatctatcttcaacaactaatttcgacaatttctgactttcatttagaacaaagcgcacatccctcctaaacctcatttcttactcgctgtttcgaatcaagaacaaccgttttggacagcttgcagcttctatacagaacaggtcatttgtacatcttgcaacctgtacatactccagatacgctttgtccgataagcacaaatattacctttatagtatgcatcttcaggtttttccactcacgcctcaaattttattccagcctttgtatctcatttcaataagtagctgtgctcagctgcttaccacacatcaaaaaggtaactcctatctatatacctcccagattttacccacttgcaaaatgtttgcttacacgcataatatttactcaacttataatgaaactaacattaaaaaaagtaaatgttatattcagaagatgtactccccatttgtatttgcaaactcaaatgaacatattttacccttatttactgctttgtaaaaggatacgtagactccacaaataaagttcactcatatactcaattagaacataatgaactgacactttatgattacaaccaacatactctcaaatctgattctaaataacatgcttccaaatctgatactgaagaagaaactacaaaggtacaattcgtccaccttattttaaaaattgataaacacaagtacatttgtaaaatgagcgtataaaaatgctccttttcccttttataggaccaaacaacgatcgatggacaactcaaaaggaaaaaaaataatatgccctcaatggaagctcctccaaaaagaattggagcatgcacatacgagtagcagagtagcgacattacattatgggggagaagatctcccataggtggggagctgggaggtacagttgttgatggcgcccacgacgcacaggcccttgacaccatccttgtccttgtagtcccctgacaaaacagaaaaaacgacgcatgatgaccatgagcacaagattgcgtgtcagattcatcttggaacgaggggcgtggtcgcttaccgtcgtagttgtaggtgcagaggaagtaagaagaattcgttaattactgttatagagaataaaatgaagtagatggcttaatctaggctgtcgaatgtcattatcataaggcatatccactatgctgcaagcctggaaccttttattcatgtaaagtaagcatgtgatgtgaactccgtcatgctagcttca

SEQ ID NO: 59236 - DNA, 2641 bp, Zea Mays
cttctccacccagatttccaggctcccatcctcacctctgacactacgccccgtacctcgtgcccactgccaccaactttgctctcggtgctccgtggcttcgccttggcacgcgccggtcgtgcccgcggcctcgctcctccactagcataggcacaggtgaacccgcacagcgacataggcggcgcttcgcgcctggctttgcctcggcacacgccgagtcgtgccttagcccccaacccccctcttgcacaggtgcacgagatatctccaacctcgcctccctgctgattagtcgtcttgtgtcttcaacattacgaagtgatgatggccttctttttcctgaaaggatgatgactatcttgctcctatccaagctgatcgagaaaaagagttgaagtttgtgcagtaggttgaactccacagggtagaggaagctgcagcaagagaggctgctcttgaaaatcaaaagaaagaaaagaagctaaaaaagaacacaagggagaggttagattccccaacatgtccagtttgtccgcaaggtttttgtggggatttcaaacaaacattaaccccttccgggttggattggaaaatggactgcggactgccttataatccttgggggcatgctgtgcacgacatggccaccgagagccgatggatgccagatgagaagaagctggcttctgctgccactgagaaattcgaagaggaagataatacctcctattgtcaacagtgatgtgtcaatggagtgtgtatagcatgaaaaaaccaaacatgacagttcaagagagacatttcagaactgcttagtttgtatatcccatgagttatctcctaacatcttttaactgcttcaacattgcatcgaaagcaatataggcatgcctgatgatggagagatagatattttcatcgaagctgtcggtgacatgctatttgagttgcagaaacatttcatattttctattattatatacataggtttttgtatggagaaccataaaatatctgtttggaagggacgagatttgaaggtgatgaggctccttaaagaaggtttaatggaacaaatattagcataaggagtttgctggccatgtcaaaatctctatgggcagattctaactagagacctctaaaggttcaatgagatgaacattcatcaagtcttcgtctagatagaatctcatggtttcaagactgccttcaggttttggatccttggaactcattcgctgcacccagtcactgcctcccagatcctcaacatatggatttccccaattttagtgttgacaatcctcacttctaggaggtccattgtgatatctactttgaagtgcatgccatcaacaatactttgacgccactatttgtggcactaaactttgaaggggttgtagctaactgattgcaatcaattgaactcagggagcgcacatccctcctaaacctcatttcttactcgctgtttcgaatcaagaacaaccgttttggacagcttgcagcttctatacagaacaggtcatttgtacatcttgcaacctgtacatactccagatacgctttgtccgataagcacaaatattacctttatagtatgcatcttcaggtttttccactcacgcctcaaattttattccagcctttgtatctcatttcaataagtagctgtgctcagctgcttaccacacatcaaaaaggtaactcctatctatatacctcccagattttacccacttgcaaaatgtttgcttacacgcataatatttactcaacttataatgaaactaacattaaaaaaagtaaatgttatattcagaagatgtactccccatttgtatttgcaaactcaaatgaacatattttacccttatttactgctttgtaaaaggatacgtagactccacaaataaagttcactcatatactcaattagaacataatgaactgacactttatgattacaaccaacatactctcaaatctgattctaaataacatgcttccaaatctgatactgaagaagaaactacaaaggtacaattcgtccaccttattttaaaaattgataaacacaagtacatttgtaaaatgagcgtataaaaatgctccttttcccttttataggaccaaacaacgatcgatggacaactcaaaaggaaaaaaaataatatgccctcaatggaagctcctccaaaaagaattggagcatgcacatacgagtagcagagtagcgacattacattatgggggagaagatctcccataggtggggagctgggaggtacagttgttgatggcgcccacgacgcacaggcccttgacaccatccttgtccttgtagtcccctgacaaaacagaaaaaacgacgcatgatgaccatgagcacaagattgcgtgtcagattcatcttggaacgaggggcgtggtcgcttaccgtcgtagttgtaggtgcagaggaagtaagaagaattcgttaattactgttatagagaataaaatgaagtagatggcttaatctaggctgtcgaatgtcattatcataaggcatatccactatgctgcaagcctggaaccttttattcatgtaaagtaagcatgtgatgtgaactccgtcatgctagcttca

SEQ ID NO: 59237 - DNA, 3414 bp, Zea Mays
cttctccacccagatttccaggctcccatcctcacctctgacactacgccccgtacctcgtgcccactgccaccaactttgctctcggtgctccgtggcttcgccttggcacgcgccggtcgtgcccgcggcctcgctcctccactagcataggcacaggtgaacccgcacagcgacataggcggcgcttcgcgcctggctttgcctcggcacacgccgagtcgtgccttagcccccaacccccctcttgcacaggattagtcgtcttgtgtcttcaacattacgaagtgatgatggccttctttttcctgaaaggtggtgtttgtggcgtttaaatctctacttaagtcacttagggtatcatacacagtttgggttctttggtaggtaaatcctcctcaagacccattaatctgacaatgacacttggatatattatctttgacaattttactcttcttctttagacatatcattatttatttatttcattattcacaattataagtagtaatccaattgcaggatgatgactatcttgctcctatccaagctgatcgagaaaaagagttgaagtttgtgcagtaggttgaactccacagggtagaggaagctgcagcaagagaggctgctcttgaaaatcaaaagaaagaaaagaagctaaaaaagaacacaagggagaggtagttcacttagtactatcaaagtcaaagttgcagaatatgattgagattcatatatctacttatacagtttagtaagctacagcttggttcggtaaattgcagaacatcatgaatcatgacctcttatgcatggatggtaaattatttttagtttacatctcagtgttcattttacttaattgaccatcaatagcatggagtaccaaattttcttcgtcttaggaaatatatcctcattacttgtgcgaacctctcaacttatggaatgatacttagactgctctctttcgtctaggttcatttgatcgttcttttactgtattaatacaacttctattttcaagctactaagaaagctgctgaaattggacagctgaacgatggttatatgtttgacacatcaaccgacatgtcatgaatgtgaagataatacaccctgccctccattgacccactacattttttgttatattttgcgttttttgacattagttgcttataggttagattccccaacatgtccagtttgtccgcaaggtttttgtggggatttcaaacaaacattaaccccttccgggttggattggaaaatggactgcggactgccttataatccttgggggcatgctgtgcacgacatggccaccgagagccgatggatgccagatgagaagaagctggcttctgctgccactgagaaattcgaagaggaagataatacctcctattgtcaacagtgatgtgtcaatggagtgtgtatagcatgaaaaaaccaaacatgacagttcaagagagacatttcagaactgcttagtttgtatatcccatgagttatctcctaacatcttttaactgcttcaacattgcatcgaaagcaatataggcatgcctgatgatggagagatagatattttcatcgaagctgtcggtgacatgctatttgagttgcagaaacatttcatattttctattattatatacataggtttttgtatggaggtactgaaagccccctcctgaaatatagtatgattaccaccttctctacaatcctttttttgtttttgttttatttttacgttgaagcaaagaaccataaaatatctgtttggaagggacgagatttgaaggtgatgaggctccttaaagaaggtttaatggaacaaatattagcataaggagtttgctggccatgtcaaaatctctatgggcagattctaactagagacctctaaaggttcaatgagatgaacattcatcaagtcttcgtctagatagaatctcatggtttcaagactgccttcaggttttggatccttggaactcattcgctgcacccagtcactgcctcccagatcctcaacatatggatttccccaattttagtgttgacaatcctcacttctaggaggtccattgtgatatctactttgaagtgcatgccatcaacaatactttgacgccactatttgtggcactaaactttgaaggggttgtagctaactgattgcaatcaattgaactcagggagcgcacatccctcctaaacctcatttcttactcgctgtttcgaatcaagaacaaccgttttggacagcttgcagcttctatacagaacaggtcatttgtacatcttgcaacctgtacatactccagatacgctttgtccgataagcacaaatattacctttatagtatgcatcttcaggtttttccactcacgcctcaaattttattccagcctttgtatctcatttcaataagtagctgtgctcagctgcttaccacacatcaaaaaggtaactcctatctatatacctcccagattttacccacttgcaaaatgtttgcttacacgcataatatttactcaacttataatgaaactaacattaaaaaaagtaaatgttatattcagaagatgtactccccatttgtatttgcaaactcaaatgaacatattttacccttatttactgctttgtaaaaggatacgtagactccacaaataaagttcactcatatactcaattagaacataatgaactgacactttatgattacaaccaacatactctcaaatctgattctaaataacatgcttccaaatctgatactgaagaagaaactacaaaggtacaattcgtccaccttattttaaaaattgataaacacaagtacatttgtaaaatgagcgtataaaaatgctccttttcccttttataggaccaaacaacgatcgatggacaactcaaaaggaaaaaaaataatatgccctcaatggaagctcctccaaaaagaattggagcatgcacatacgagtagcagagtagcgacattacattatgggggagaagatctcccataggtggggagctgggaggtacagttgttgatggcgcccacgacgcacaggcccttgacaccatccttgtccttgtagtcccctgacaaaacagaaaaaacgacgcatgatgaccatgagcacaagattgcgtgtcagattcatcttggaacgaggggcgtggtcgcttaccgtcgtagttgtaggtgcagaggaagtaagaagaattcgttaattactgttatagagaataaaatgaagtagatggcttaatctaggctgtcgaatgtcattatcataaggcatatccactatgctgcaagcctggaaccttttattcatgtaaagtaagcatgtgatgtgaactccgtcatgctagcttca

SEQ ID NO: 59238 - DNA, 3993 bp, Zea Mays
cttctccacccagatttccaggctcccatcctcacctctgacactacgccccgtacctcgtgcccactgccaccaactttgctctcggtgctccgtggcttcgccttggcacgcgccggtcgtgcccgcggcctcgctcctccactagcataggcacaggtgaacccgcacagcgacataggcggcgcttcgcgcctggctttgcctcggcacacgccgagtcgtgccttagcccccaacccccctcttgcacaggtgcacgagatatctccaacctcgcctccctgctgattagtcgtcttgtgtcttcaacattacgaagtgatgatggccttctttttcctgaaaggatgatgactatcttgctcctatccaagctgatcgagaaaaagagttgaagtttgtgcagtaggttgaactccacagggtagaggaagctgcagcaagagaggctgctcttgaaaatcaaaagaaagaaaagaagctaaaaaagaacacaagggagaggtagttcacttagtactatcaaagtcaaagttgcagaatatgattgagattcatatatctacttatacagtttagtaagctacagcttggttcggtaaattgcagaacatcatgaatcatgacctcttatgcatggatggtaaattatttttagtttacatctcagtgttcattttacttaattgaccatcaatagcatggagtaccaaattttcttcgtcttaggaaatatatcctcattacttgtgcgaacctctcaacttatggaatgatacttagactgctctctttcgtctaggttcatttgatcgttcttttactgtattaatacaacttctattttcaagctactaagaaagctgctgaaattggacagctgaacgatggttatatgtttgacacatcaaccgacatgtcatgaatgtgaagataatacaccctgccctccattgacccactacattttttgttatattttgcgttttttgacattagttgcttataggttagattccccaacatgtccagtttgtccgcaaggtttttgtggggatttcaaacaaacattaaccccttccgggttggattggaaaatggactgcggactgccttataatccttgggggcatgctgtgcacgacatggccaccgagagccgatggatgccagatgagaagaagctggcttctgctgccactgagaaattcgaagaggaagataatacctcctattgtcaacagtgatgtgtcaatggagtgtgtatagcatgaaaaaaccaaacatgacagttcaagagagacatttcagaactgcttagtttgtatatcccatgagttatctcctaacatcttttaactgcttcaacattgcatcgaaagcaatataggcatgcctgatgatggagagatagatattttcatcgaagctgtcggtgacatgctatttgagttgcagaaacatttcatattttctattattatatacataggtttttgtatggagaaccataaaatatctgtttggaagggacgagatttgaaggtgatgaggctccttaaagaaggtttaatggaacaaatattagcataaggagtttgctggccatgtcaaaatctctatgggcagattctaactagagacctctaaaggttcaatgagatgaacattcatcaagtcttcgtctagatagaatctcatggtttcaagactgccttcaggttttggatccttggaactcattcgctgcacccagtcactgcctcccagatcctcaacatatggatttccccaattttagtgttgacaatcctcacttctaggaggtccattgtgatatctactttgaagtgcatgccatcaacaatactttgacgccactatttgtggcactaaactttgaaggggttgtagctaactgattgcaatcaattgaactcagggccactcactatttggaaacgtcagcagctaatttggacaacttgcaccttctatctatcttcaacaactaatttcgacaatttctgactttcatttagaacaatcatctactatttcggaattggaagaagagcgcacatccctcctaaacctcatttcttactcgctgtttcgaatcaagaacaaccgttttggacagcttgcagcttctatacagaacaggtacacatattacctgttcaatgccatgttatgcatagaaaagtctatgttttcagatttaattaccctgagatacattattatttctttactacttccacttcgcttgaacccgcataagacgcataactaaaaaaacattccttccttactttttcccaacgcgtggttaaatactattatgaaacctcaacagcaaattcagacatcatgtaacttctattctgaaaaagagtatggttactagaccaaatattatatatttttacaaccatgtgtcacatattactccattactcatgttttgtttaaacaaataactatgcatacctgctcaccacacataaaattaatcactcctcttatcaacggtcatccatcattattgctacaatacgcatggtcatcagatttcctatgtaattaccatactttaacctctatgtacatgtaaatatgtgcttccaataggtgctcaagtacatacgatcgataccatgttgttatgcataagtacatttacacacacatactctatactgattgacatctattgatccccctactattctcttgaacctacacacaatttttaaatgtatcttatattaagatatccttagcgtttgcgttcttcatcaacgtacaaactacaaatctaatttcattcttacttcattttcacatgtttacattctaatttgaatcgacgacaggtcatttgtacatcttgcaacctgtacatactccagatacgctttgtccgataagcacaaatattacctttatagtatgcatcttcaggtttttccactcacgcctcaaattttattccagcctttgtatctcatttcaataagtagctgtgctcagctgcttaccacacatcaaaaaggtaactcctatctatatacctcccagattttacccacttgcaaaatgtttgcttacacgcataatatttactcaacttataatgaaactaacattaaaaaaagtaaatgttatattcagaagatgtactccccatttgtatttgcaaactcaaatgaacatattttacccttatttactgctttgtaaaaggatacgtagactccacaaataaagttcactcatatactcaattagaacataatgaactgacactttatgattacaaccaacatactctcaaatctgattctaaataacatgcttccaaatctgatactgaagaagaaactacaaaggtacaattcgtccaccttattttaaaaattgataaacacaagtacatttgtaaaatgagcgtataaaaatgctccttttcccttttataggaccaaacaacgatcgatggacaactcaaaaggaaaaaaaataatatgccctcaatggaagctcctccaaaaagaattggagcatgcacatacgagtagcagagtagcgacattacattatgggggagaagatctcccataggtggggagctgggaggtacagttgttgatggcgcccacgacgcacaggcccttgacaccatccttgtccttgtagtcccctgacaaaacagaaaaaacgacgcatgatgaccatgagcacaagattgcgtgtcagattcatcttggaacgaggggcgtggtcgcttaccgtcgtagttgtaggtgcagaggaagtaagaagaattcgttaattactgttatagagaataaaatgaagtagatggcttaatctaggctgtcgaatgtcattatcataaggcatatccactatgctgcaagcctggaaccttttattcatgtaaagtaagcatgtgatgtgaactccgtcatgctagcttca

SEQ ID NO: 59239 - DNA, 3449 bp, Zea Mays
cttctccacccagatttccaggctcccatcctcacctctgacactacgccccgtacctcgtgcccactgccaccaactttgctctcggtgctccgtggcttcgccttggcacgcgccggtcgtgcccgcggcctcgctcctccactagcataggcacaggtgaacccgcacagcgacataggcggcgcttcgcgcctggctttgcctcggcacacgccgagtcgtgccttagcccccaacccccctcttgcacaggtgcacgagatatctccaacctcgcctccctgctgattagtcgtcttgtgtcttcaacattacgaagtgatgatggccttctttttcctgaaaggatgatgactatcttgctcctatccaagctgatcgagaaaaagagttgaagtttgtgcagtaggttgaactccacagggtagaggaagctgcagcaagagaggctgctcttgaaaatcaaaagaaagaaaagaagctaaaaaagaacacaagggagaggttagattccccaacatgtccagtttgtccgcaaggtttttgtggggatttcaaacaaacattaaccccttccgggttggattggaaaatggactgcggactgccttataatccttgggggcatgctgtgcacgacatggccaccgagagccgatggatgccagatgagaagaagctggcttctgctgccactgagaaattcgaagaggaagataatacctcctattgtcaacagtgatgtgtcaatggagtgtgtatagcatgaaaaaaccaaacatgacagttcaagagagacatttcagaactgcttagtttgtatatcccatgagttatctcctaacatcttttaactgcttcaacattgcatcgaaagcaatataggcatgcctgatgatggagagatagatattttcatcgaagctgtcggtgacatgctatttgagttgcagaaacatttcatattttctattattatatacataggtttttgtatggaggtactgaaagccccctcctgaaatatagtatgattaccaccttctctacaatcctttttttgtttttgttttatttttacgttgaagcaaagaaccataaaatatctgtttggaagggacgagatttgaaggtgatgaggctccttaaagaaggtttaatggaacaaatattagcataaggagtttgctggccatgtcaaaatctctatgggcagattctaactagagacctctaaaggttcaatgagatgaacattcatcaagtcttcgtctagatagaatctcatggtttcaagactgccttcaggttttggatccttggaactcattcgctgcacccagtcactgcctcccagatcctcaacatatggatttccccaattttagtgttgacaatcctcacttctaggaggtccattgtgatatctactttgaagtgcatgccatcaacaatactttgacgccactatttgtggcactaaactttgaaggggttgtagctaactgattgcaatcaattgaactcagggagcgcacatccctcctaaacctcatttcttactcgctgtttcgaatcaagaacaaccgttttggacagcttgcagcttctatacagaacaggtacacatattacctgttcaatgccatgttatgcatagaaaagtctatgttttcagatttaattaccctgagatacattattatttctttactacttccacttcgcttgaacccgcataagacgcataactaaaaaaacattccttccttactttttcccaacgcgtggttaaatactattatgaaacctcaacagcaaattcagacatcatgtaacttctattctgaaaaagagtatggttactagaccaaatattatatatttttacaaccatgtgtcacatattactccattactcatgttttgtttaaacaaataactatgcatacctgctcaccacacataaaattaatcactcctcttatcaacggtcatccatcattattgctacaatacgcatggtcatcagatttcctatgtaattaccatactttaacctctatgtacatgtaaatatgtgcttccaataggtgctcaagtacatacgatcgataccatgttgttatgcataagtacatttacacacacatactctatactgattgacatctattgatccccctactattctcttgaacctacacacaatttttaaatgtatcttatattaagatatccttagcgtttgcgttcttcatcaacgtacaaactacaaatctaatttcattcttacttcattttcacatgtttacattctaatttgaatcgacgacaggtcatttgtacatcttgcaacctgtacatactccagatacgctttgtccgataagcacaaatattacctttatagtatgcatcttcaggtttttccactcacgcctcaaattttattccagcctttgtatctcatttcaataagtagctgtgctcagctgcttaccacacatcaaaaaggtaactcctatctatatacctcccagattttacccacttgcaaaatgtttgcttacacgcataatatttactcaacttataatgaaactaacattaaaaaaagtaaatgttatattcagaagatgtactccccatttgtatttgcaaactcaaatgaacatattttacccttatttactgctttgtaaaaggatacgtagactccacaaataaagttcactcatatactcaattagaacataatgaactgacactttatgattacaaccaacatactctcaaatctgattctaaataacatgcttccaaatctgatactgaagaagaaactacaaaggtacaattcgtccaccttattttaaaaattgataaacacaagtacatttgtaaaatgagcgtataaaaatgctccttttcccttttataggaccaaacaacgatcgatggacaactcaaaaggaaaaaaaataatatgccctcaatggaagctcctccaaaaagaattggagcatgcacatacgagtagcagagtagcgacattacattatgggggagaagatctcccataggtggggagctgggaggtacagttgttgatggcgcccacgacgcacaggcccttgacaccatccttgtccttgtagtcccctgacaaaacagaaaaaacgacgcatgatgaccatgagcacaagattgcgtgtcagattcatcttggaacgaggggcgtggtcgcttaccgtcgtagttgtaggtgcagaggaagtaagaagaattcgttaattactgttatagagaataaaatgaagtagatggcttaatctaggctgtcgaatgtcattatcataaggcatatccactatgctgcaagcctggaaccttttattcatgtaaagtaagcatgtgatgtgaactccgtcatgctagcttca

SEQ ID NO: 59240 - DNA, 2867 bp, Zea Mays
cttctccacccagatttccaggctcccatcctcacctctgacactacgccccgtacctcgtgcccactgccaccaactttgctctcggtgctccgtggcttcgccttggcacgcgccggtcgtgcccgcggcctcgctcctccactagcataggcacaggtgaacccgcacagcgacataggcggcgcttcgcgcctggctttgcctcggcacacgccgagtcgtgccttagcccccaacccccctcttgcacaggattagtcgtcttgtgtcttcaacattacgaagtgatgatggccttctttttcctgaaaggtggtgtttgtggcgtttaaatctctacttaagtcacttagggtatcatacacagtttgggttctttggtaggatgatgactatcttgctcctatccaagctgatcgagaaaaagagttgaagtttgtgcagtaggttgaactccacagggtagaggaagctgcagcaagagaggctgctcttgaaaatcaaaagaaagaaaagaagctaaaaaagaacacaagggagagcttggttcggtaaattgcagaacatcatgaatcatgacctcttatgcatggatggtaaattatttttagtttacatctcagtgttcattttacttaattgaccatcaatagcatggagtaccaaattttcttcgtcttaggaaatatatcctcattacttgtgcgaacctctcaacttatggaatgatacttagactgctctctttcgtctaggttcatttgatcgttcttttactgtattaatacaacttctattttcaagctactaagaaagctgctgaaattggacagctgaacgatggttatatgtttgacacatcaaccgacatgtcatgaatgtgaagataatacaccctgccctccattgacccactacattttttgttatattttgcgttttttgacattagttgcttataggttagattccccaacatgtccagtttgtccgcaaggtttttgtggggatttcaaacaaacattaaccccttccgggttggattggaaaatggactgcggactgccttataatccttgggggcatgctgtgcacgacatggccaccgagagccgatggatgccagatgagaagaagctggcttctgctgccactgagaaattcgaagaggaagataatacctcctattgtcaacagtgatgtgtcaatggagtgtgtatagcatgaaaaaaccaaacatgacagttcaagagagacatttcagaactgcttagtttgtatatcccatgagttatctcctaacatcttttaactgcttcaacattgcatcgaaagcaatataggcatgcctgatgatggagagatagatattttcatcgaagctgtcggtgacatgctatttgagttgcagaaacatttcatattttctattattatatacataggtttttgtatggaggtactgaaagccccctcctgaaatatagtatgattaccaccttctctacaatcctttttttgtttttgttttatttttacgttgaagcaaagaaccataaaatatctgtttggaagggacgagatttgaaggtgatgaggctccttaaagaaggtttaatggaacaaatattagcataaggagtttgctggccatgtcaaaatctctatgggcagattctaactagagacctctaaaggttcaatgagatgaacattcatcaagtcttcgtctagatagaatctcatggtttcaagactgccttcaggttttggatccttggaactcattcgctgcacccagtcactgcctcccagatcctcaacatatggatttccccaattttagtgttgacaatcctcacttctaggaggtccattgtgatatctactttgaagtgcatgccatcaacaatactttgacgccactatttgtggcactaaactttgaaggggttgtagctaactgattgcaatcaattgaactcagggccactcactatttggaaacgtcagcagctaatttggacaacttgcaccttctatctatcttcaacaactaatttcgacaatttctgactttcatttagaacaaagcgcacatccctcctaaacctcatttcttactcgctgtttcgaatcaagaacaaccgttttggacagcttgcagcttctatacagaacaggtcatttgtacatcttgcaacctgtacatactccagatacgctttgtccgataagcacaaatattacctttatagtatgcatcttcaggtttttccactcacgcctcaaattttattccagcctttgtatctcatttcaataagtagctgtgctcagctgcttaccacacatcaaaaaggaccaaacaacgatcgatggacaactcaaaaggaaaaaaaataatatgccctcaatggaagctcctccaaaaagaattggagcatgcacatacgagtagcagagtagcgacattacattatgggggagaagatctcccataggtggggagctgggaggtacagttgttgatggcgcccacgacgcacaggcccttgacaccatccttgtccttgtagtcccctgacaaaacagaaaaaacgacgcatgatgaccatgagcacaagattgcgtgtcagattcatcttggaacgaggggcgtggtcgcttaccgtcgtagttgtaggtgcagaggaagtaagaagaattcgttaattactgttatagagaataaaatgaagtagatggcttaatctaggctgtcgaatgtcattatcataaggcatatccactatgctgcaagcctggaaccttttattcatgtaaagtaagcatgtgatgtgaactccgtcatgctagcttca

SEQ ID NO: 59241 - DNA, 3460 bp, Zea Mays
cttctccacccagatttccaggctcccatcctcacctctgacactacgccccgtacctcgtgcccactgccaccaactttgctctcggtgctccgtggcttcgccttggcacgcgccggtcgtgcccgcggcctcgctcctccactagcataggcacaggtgaacccgcacagcgacataggcggcgcttcgcgcctggctttgcctcggcacacgccgagtcgtgccttagcccccaacccccctcttgcacaggtgcacgagatatctccaacctcgcctccctgctgattagtcgtcttgtgtcttcaacattacgaagtgatgatggccttctttttcctgaaaggatgatgactatcttgctcctatccaagctgatcgagaaaaagagttgaagtttgtgcagtaggttgaactccacagggtagaggaagctgcagcaagagaggctgctcttgaaaatcaaaagaaagaaaagaagctaaaaaagaacacaagggagaggttagattccccaacatgtccagtttgtccgcaaggtttttgtggggatttcaaacaaacattaaccccttccgggttggattggaaaatggactgcggactgccttataatccttgggggcatgctgtgcacgacatggccaccgagagccgatggatgccagatgagaagaagctggcttctgctgccactgagaaattcgaagaggaagataatacctcctattgtcaacagtgatgtgtcaatggagtgtgtatagcatgaaaaaaccaaacatgacagttcaagagagacatttcagaactgcttagtttgtatatcccatgagttatctcctaacatcttttaactgcttcaacattgcatcgaaagcaatataggcatgcctgatgatggagagatagatattttcatcgaagctgtcggtgacatgctatttgagttgcagaaacatttcatattttctattattatatacataggtttttgtatggagaaccataaaatatctgtttggaagggacgagatttgaaggtgatgaggctccttaaagaaggtttaatggaacaaatattagcataaggagtttgctggccatgtcaaaatctctatgggcagattctaactagagacctctaaaggttcaatgagatgaacattcatcaagtcttcgtctagatagaatctcatggtttcaagactgccttcaggttttggatccttggaactcattcgctgcacccagtcactgcctcccagatcctcaacatatggatttccccaattttagtgttgacaatcctcacttctaggaggtccattgtgatatctactttgaagtgcatgccatcaacaatactttgacgccactatttgtggcactaaactttgaaggggttgtagctaactgattgcaatcaattgaactcagggccactcactatttggaaacgtcagcagctaatttggacaacttgcaccttctatctatcttcaacaactaatttcgacaatttctgactttcatttagaacaaagcgcacatccctcctaaacctcatttcttactcgctgtttcgaatcaagaacaaccgttttggacagcttgcagcttctatacagaacaggtacacatattacctgttcaatgccatgttatgcatagaaaagtctatgttttcagatttaattaccctgagatacattattatttctttactacttccacttcgcttgaacccgcataagacgcataactaaaaaaacattccttccttactttttcccaacgcgtggttaaatactattatgaaacctcaacagcaaattcagacatcatgtaacttctattctgaaaaagagtatggttactagaccaaatattatatatttttacaaccatgtgtcacatattactccattactcatgttttgtttaaacaaataactatgcatacctgctcaccacacataaaattaatcactcctcttatcaacggtcatccatcattattgctacaatacgcatggtcatcagatttcctatgtaattaccatactttaacctctatgtacatgtaaatatgtgcttccaataggtgctcaagtacatacgatcgataccatgttgttatgcataagtacatttacacacacatactctatactgattgacatctattgatccccctactattctcttgaacctacacacaatttttaaatgtatcttatattaagatatccttagcgtttgcgttcttcatcaacgtacaaactacaaatctaatttcattcttacttcattttcacatgtttacattctaatttgaatcgacgacaggtcatttgtacatcttgcaacctgtacatactccagatacgctttgtccgataagcacaaatattacctttatagtatgcatcttcaggtttttccactcacgcctcaaattttattccagcctttgtatctcatttcaataagtagctgtgctcagctgcttaccacacatcaaaaaggtaactcctatctatatacctcccagattttacccacttgcaaaatgtttgcttacacgcataatatttactcaacttataatgaaactaacattaaaaaaagtaaatgttatattcagaagatgtactccccatttgtatttgcaaactcaaatgaacatattttacccttatttactgctttgtaaaaggatacgtagactccacaaataaagttcactcatatactcaattagaacataatgaactgacactttatgattacaaccaacatactctcaaatctgattctaaataacatgcttccaaatctgatactgaagaagaaactacaaaggtacaattcgtccaccttattttaaaaattgataaacacaagtacatttgtaaaatgagcgtataaaaatgctccttttcccttttataggaccaaacaacgatcgatggacaactcaaaaggaaaaaaaataatatgccctcaatggaagctcctccaaaaagaattggagcatgcacatacgagtagcagagtagcgacattacattatgggggagaagatctcccataggtggggagctgggaggtacagttgttgatggcgcccacgacgcacaggcccttgacaccatccttgtccttgtagtcccctgacaaaacagaaaaaacgacgcatgatgaccatgagcacaagattgcgtgtcagattcatcttggaacgaggggcgtggtcgcttaccgtcgtagttgtaggtgcagaggaagtaagaagaattcgttaattactgttatagagaataaaatgaagtagatggcttaatctaggctgtcgaatgtcattatcataaggcatatccactatgctgcaagcctggaaccttttattcatgtaaagtaagcatgtgatgtgaactccgtcatgctagcttca

SEQ ID NO: 59242 - DNA, 3931 bp, Zea Mays
cttctccacccagatttccaggctcccatcctcacctctgacactacgccccgtacctcgtgcccactgccaccaactttgctctcggtgctccgtggcttcgccttggcacgcgccggtcgtgcccgcggcctcgctcctccactagcataggcacaggtgaacccgcacagcgacataggcggcgcttcgcgcctggctttgcctcggcacacgccgagtcgtgccttagcccccaacccccctcttgcacaggattagtcgtcttgtgtcttcaacattacgaagtgatgatggccttctttttcctgaaaggatgatgactatcttgctcctatccaagctgatcgagaaaaagagttgaagtttgtgcagtaggttgaactccacagggtagaggaagctgcagcaagagaggctgctcttgaaaatcaaaagaaagaaaagaagctaaaaaagaacacaagggagaggtagttcacttagtactatcaaagtcaaagttgcagaatatgattgagattcatatatctacttatacagtttagtaagctacagcttggttcggtaaattgcagaacatcatgaatcatgacctcttatgcatggatggtaaattatttttagtttacatctcagtgttcattttacttaattgaccatcaatagcatggagtaccaaattttcttcgtcttaggaaatatatcctcattacttgtgcgaacctctcaacttatggaatgatacttagactgctctctttcgtctaggttcatttgatcgttcttttactgtattaatacaacttctattttcaagctactaagaaagctgctgaaattggacagctgaacgatggttatatgtttgacacatcaaccgacatgtcatgaatgtgaagataatacaccctgccctccattgacccactacattttttgttatattttgcgttttttgacattagttgcttataggttagattccccaacatgtccagtttgtccgcaaggtttttgtggggatttcaaacaaacattaaccccttccgggttggattggaaaatggactgcggactgccttataatccttgggggcatgctgtgcacgacatggccaccgagagccgatggatgccagatgagaagaagctggcttctgctgccactgagaaattcgaagaggaagataatacctcctattgtcaacagtgatgtgtcaatggagtgtgtatagcatgaaaaaaccaaacatgacagttcaagagagacatttcagaactgcttagtttgtatatcccatgagttatctcctaacatcttttaactgcttcaacattgcatcgaaagcaatataggcatgcctgatgatggagagatagatattttcatcgaagctgtcggtgacatgctatttgagttgcagaaacatttcatattttctattattatatacataggtttttgtatggagaaccataaaatatctgtttggaagggacgagatttgaaggtgatgaggctccttaaagaaggtttaatggaacaaatattagcataaggagtttgctggccatgtcaaaatctctatgggcagattctaactagagacctctaaaggttcaatgagatgaacattcatcaagtcttcgtctagatagaatctcatggtttcaagactgccttcaggttttggatccttggaactcattcgctgcacccagtcactgcctcccagatcctcaacatatggatttccccaattttagtgttgacaatcctcacttctaggaggtccattgtgatatctactttgaagtgcatgccatcaacaatactttgacgccactatttgtggcactaaactttgaaggggttgtagctaactgattgcaatcaattgaactcagggccactcactatttggaaacgtcagcagctaatttggacaacttgcaccttctatctatcttcaacaactaatttcgacaatttctgactttcatttagaacaaagcgcacatccctcctaaacctcatttcttactcgctgtttcgaatcaagaacaaccgttttggacagcttgcagcttctatacagaacaggtacacatattacctgttcaatgccatgttatgcatagaaaagtctatgttttcagatttaattaccctgagatacattattatttctttactacttccacttcgcttgaacccgcataagacgcataactaaaaaaacattccttccttactttttcccaacgcgtggttaaatactattatgaaacctcaacagcaaattcagacatcatgtaacttctattctgaaaaagagtatggttactagaccaaatattatatatttttacaaccatgtgtcacatattactccattactcatgttttgtttaaacaaataactatgcatacctgctcaccacacataaaattaatcactcctcttatcaacggtcatccatcattattgctacaatacgcatggtcatcagatttcctatgtaattaccatactttaacctctatgtacatgtaaatatgtgcttccaataggtgctcaagtacatacgatcgataccatgttgttatgcataagtacatttacacacacatactctatactgattgacatctattgatccccctactattctcttgaacctacacacaatttttaaatgtatcttatattaagatatccttagcgtttgcgttcttcatcaacgtacaaactacaaatctaatttcattcttacttcattttcacatgtttacattctaatttgaatcgacgacaggtcatttgtacatcttgcaacctgtacatactccagatacgctttgtccgataagcacaaatattacctttatagtatgcatcttcaggtttttccactcacgcctcaaattttattccagcctttgtatctcatttcaataagtagctgtgctcagctgcttaccacacatcaaaaaggtaactcctatctatatacctcccagattttacccacttgcaaaatgtttgcttacacgcataatatttactcaacttataatgaaactaacattaaaaaaagtaaatgttatattcagaagatgtactccccatttgtatttgcaaactcaaatgaacatattttacccttatttactgctttgtaaaaggatacgtagactccacaaataaagttcactcatatactcaattagaacataatgaactgacactttatgattacaaccaacatactctcaaatctgattctaaataacatgcttccaaatctgatactgaagaagaaactacaaaggtacaattcgtccaccttattttaaaaattgataaacacaagtacatttgtaaaatgagcgtataaaaatgctccttttcccttttataggaccaaacaacgatcgatggacaactcaaaaggaaaaaaaataatatgccctcaatggaagctcctccaaaaagaattggagcatgcacatacgagtagcagagtagcgacattacattatgggggagaagatctcccataggtggggagctgggaggtacagttgttgatggcgcccacgacgcacaggcccttgacaccatccttgtccttgtagtcccctgacaaaacagaaaaaacgacgcatgatgaccatgagcacaagattgcgtgtcagattcatcttggaacgaggggcgtggtcgcttaccgtcgtagttgtaggtgcagaggaagtaagaagaattcgttaattactgttatagagaataaaatgaagtagatggcttaatctaggctgtcgaatgtcattatcataaggcatatccactatgctgcaagcctggaaccttttattcatgtaaagtaagcatgtgatgtgaactccgtcatgctagcttca

SEQ ID NO: 59243 - DNA, 2929 bp, Zea Mays
cttctccacccagatttccaggctcccatcctcacctctgacactacgccccgtacctcgtgcccactgccaccaactttgctctcggtgctccgtggcttcgccttggcacgcgccggtcgtgcccgcggcctcgctcctccactagcataggcacaggtgaacccgcacagcgacataggcggcgcttcgcgcctggctttgcctcggcacacgccgagtcgtgccttagcccccaacccccctcttgcacaggtgcacgagatatctccaacctcgcctccctgctgattagtcgtcttgtgtcttcaacattacgaagtgatgatggccttctttttcctgaaaggatgatgactatcttgctcctatccaagctgatcgagaaaaagagttgaagtttgtgcagtaggttgaactccacagggtagaggaagctgcagcaagagaggctgctcttgaaaatcaaaagaaagaaaagaagctaaaaaagaacacaagggagaggtagttcacttagtactatcaaagtcaaagttgcagaatatgattgagattcatatatctacttatacagtttagtaagctacagcttggttcggtaaattgcagaacatcatgaatcatgacctcttatgcatggatggtaaattatttttagtttacatctcagtgttcattttacttaattgaccatcaatagcatggagtaccaaattttcttcgtcttaggaaatatatcctcattacttgtgcgaacctctcaacttatggaatgatacttagactgctctctttcgtctaggttcatttgatcgttcttttactgtattaatacaacttctattttcaagctactaagaaagctgctgaaattggacagctgaacgatggttatatgtttgacacatcaaccgacatgtcatgaatgtgaagataatacaccctgccctccattgacccactacattttttgttatattttgcgttttttgacattagttgcttataggttagattccccaacatgtccagtttgtccgcaaggtttttgtggggatttcaaacaaacattaaccccttccgggttggattggaaaatggactgcggactgccttataatccttgggggcatgctgtgcacgacatggccaccgagagccgatggatgccagatgagaagaagctggcttctgctgccactgagaaattcgaagaggaagataatacctcctattgtcaacagtgatgtgtcaatggagtgtgtatagcatgaaaaaaccaaacatgacagttcaagagagacatttcagaactgcttagtttgtatatcccatgagttatctcctaacatcttttaactgcttcaacattgcatcgaaagcaatataggcatgcctgatgatggagagatagatattttcatcgaagctgtcggtgacatgctatttgagttgcagaaacatttcatattttctattattatatacataggtttttgtatggagaaccataaaatatctgtttggaagggacgagatttgaaggtgatgaggctccttaaagaaggtttaatggaacaaatattagcataaggagtttgctggccatgtcaaaatctctatgggcagattctaactagagacctctaaaggttcaatgagatgaacattcatcaagtcttcgtctagatagaatctcatggtttcaagactgccttcaggttttgagcgcacatccctcctaaacctcatttcttactcgctgtttcgaatcaagaacaaccgttttggacagcttgcagcttctatacagaacaggtcatttgtacatcttgcaacctgtacatactccagatacgctttgtccgataagcacaaatattacctttatagtatgcatcttcaggtttttccactcacgcctcaaattttattccagcctttgtatctcatttcaataagtagctgtgctcagctgcttaccacacatcaaaaaggtaactcctatctatatacctcccagattttacccacttgcaaaatgtttgcttacacgcataatatttactcaacttataatgaaactaacattaaaaaaagtaaatgttatattcagaagatgtactccccatttgtatttgcaaactcaaatgaacatattttacccttatttactgctttgtaaaaggatacgtagactccacaaataaagttcactcatatactcaattagaacataatgaactgacactttatgattacaaccaacatactctcaaatctgattctaaataacatgcttccaaatctgatactgaagaagaaactacaaaggtacaattcgtccaccttattttaaaaattgataaacacaagtacatttgtaaaatgagcgtataaaaatgctccttttcccttttataggaccaaacaacgatcgatggacaactcaaaaggaaaaaaaataatatgccctcaatggaagctcctccaaaaagaattggagcatgcacatacgagtagcagagtagcgacattacattatgggggagaagatctcccataggtggggagctgggaggtacagttgttgatggcgcccacgacgcacaggcccttgacaccatccttgtccttgtagtcccctgacaaaacagaaaaaacgacgcatgatgaccatgagcacaagattgcgtgtcagattcatcttggaacgaggggcgtggtcgcttaccgtcgtagttgtaggtgcagaggaagtaagaagaattcgttaattactgttatagagaataaaatgaagtagatggcttaatctaggctgtcgaatgtcattatcataaggcatatccactatgctgcaagcctggaaccttttattcatgtaaagtaagcatgtgatgtgaactccgtcatgctagcttca

SEQ ID NO: 59244 - DNA, 3341 bp, Zea Mays
cttctccacccagatttccaggctcccatcctcacctctgacactacgccccgtacctcgtgcccactgccaccaactttgctctcggtgctccgtggcttcgccttggcacgcgccggtcgtgcccgcggcctcgctcctccactagcataggcacaggtgaacccgcacagcgacataggcggcgcttcgcgcctggctttgcctcggcacacgccgagtcgtgccttagcccccaacccccctcttgcacaggtgcacgagatatctccaacctcgcctccctgctgattagtcgtcttgtgtcttcaacattacgaagtgatgatggccttctttttcctgaaaggatgatgactatcttgctcctatccaagctgatcgagaaaaagagttgaagtttgtgcagtaggttgaactccacagggtagaggaagctgcagcaagagaggctgctcttgaaaatcaaaagaaagaaaagaagctaaaaaagaacacaagggagaggtagttcacttagtactatcaaagtcaaagttgcagaatatgattgagattcatatatctacttatacagtttagtaagctacagcttggttcggtaaattgcagaacatcatgaatcatgacctcttatgcatggatggtaaattatttttagtttacatctcagtgttcattttacttaattgaccatcaatagcatggagtaccaaattttcttcgtcttaggaaatatatcctcattacttgtgcgaacctctcaacttatggaatgatacttagactgctctctttcgtctaggttcatttgatcgttcttttactgtattaatacaacttctattttcaagctactaagaaagctgctgaaattggacagctgaacgatggttatatgtttgacacatcaaccgacatgtcatgaatgtgaagataatacaccctgccctccattgacccactacattttttgttatattttgcgttttttgacattagttgcttataggttagattccccaacatgtccagtttgtccgcaaggtttttgtggggatttcaaacaaacattaaccccttccgggttggattggaaaatggactgcggactgccttataatccttgggggcatgctgtgcacgacatggccaccgagagccgatggatgccagatgagaagaagctggcttctgctgccactgagaaattcgaagaggaagataatacctcctattgtcaacagtgatgtgtcaatggagtgtgtatagcatgaaaaaaccaaacatgacagttcaagagagacatttcagaactgcttagtttgtatatcccatgagttatctcctaacatcttttaactgcttcaacattgcatcgaaagcaatataggcatgcctgatgatggagagatagatattttcatcgaagctgtcggtgacatgctatttgagttgcagaaacatttcatattttctattattatatacataggtttttgtatggaggtactgaaagccccctcctgaaatatagtatgattaccaccttctctacaatcctttttttgtttttgttttatttttacgttgaagcaaagaaccataaaatatctgtttggaagggacgagatttgaaggtgatgaggctccttaaagaaggtttaatggaacaaatattagcataaggagtttgctggccatgtcaaaatctctatgggcagattctaactagagacctctaaaggttcaatgagatgaacattcatcaagtcttcgtctagatagaatctcatggtttcaagactgccttcaggttttggatccttggaactcattcgctgcacccagtcactgcctcccagatcctcaacatatggatttccccaattttagtgttgacaatcctcacttctaggaggtccattgtgatatctactttgaagtgcatgccatcaacaatactttgacgccactatttgtggcactaaactttgaaggggttgtagctaactgattgcaatcaattgaactcagggccactcactatttggaaacgtcagcagctaatttggacaacttgcaccttctatctatcttcaacaactaatttcgacaatttctgactttcatttagaacaaagcgcacatccctcctaaacctcatttcttactcgctgtttcgaatcaagaacaaccgttttggacagcttgcagcttctatacagaacaggtcatttgtacatcttgcaacctgtacatactccagatacgctttgtccgataagcacaaatattacctttatagtatgcatcttcaggtttttccactcacgcctcaaattttattccagcctttgtatctcatttcaataagtagctgtgctcagctgcttaccacacatcaaaaaggtaactcctatctatatacctcccagattttacccacttgcaaaatgtttgcttacacgcataatatttactcaacttataatgaaactaacattaaaaaaagtaaatgttatattcagaagatgtactccccatttgtatttgcaaactcaaatgaacatattttacccttatttactgctttgtaaaaggatacgtagactccacaaataaagttcactcatatactcaattagaacataatgaactgacactttatgattacaaccaacatactctcaaatctgattctaaataacatgcttccaaatctgatactgaagaagaaactacaaaggtacaattcgtccaccttattttaaaaattgataaacacaagtacatttgtaaaatgagcgtataaaaatgctccttttcccttttataggaccaaacaacgatcgatggacaactcaaaaggaaaaaaaataatatgccctcaatggaagctcctccaaaaagaattggagcatgcacatacgagtagcagagtagcgacattacattatgggggagaagatctcccataggtggggagctgggaggtacagttgttgatggcgcccacgacgcacaggcccttgacaccatccttgtccttgtagtcccctgacaaaacagaaaaaacgacgcatgatgaccatgagcacaagattgcgtgtcagattcatcttggaacgaggggcgtggtcgcttaccgtcgtagttgtaggtgcagaggaagtaagaagaattcgttaattactgttatagagaataaaatgaagtagatggcttaatctaggctgtcgaatgtcattatcataaggcatatccactatgctgcaagcctggaaccttttattcatgtaaagtaagcatgtgatgtgaactccgtcatgctagcttca

SEQ ID NO: 59245 - DNA, 3580 bp, Zea Mays
cttctccacccagatttccaggctcccatcctcacctctgacactacgccccgtacctcgtgcccactgccaccaactttgctctcggtgctccgtggcttcgccttggcacgcgccggtcgtgcccgcggcctcgctcctccactagcataggcacaggtgaacccgcacagcgacataggcggcgcttcgcgcctggctttgcctcggcacacgccgagtcgtgccttagcccccaacccccctcttgcacaggtgcacgagatatctccaacctcgcctccctgctgattagtcgtcttgtgtcttcaacattacgaagtgatgatggccttctttttcctgaaaggatgatgactatcttgctcctatccaagctgatcgagaaaaagagttgaagtttgtgcagtaggttgaactccacagggtagaggaagctgcagcaagagaggctgctcttgaaaatcaaaagaaagaaaagaagctaaaaaagaacacaagggagaggttagattccccaacatgtccagtttgtccgcaaggtttttgtggggatttcaaacaaacattaaccccttccgggttggattggaaaatggactgcggactgccttataatccttgggggcatgctgtgcacgacatggccaccgagagccgatggatgccagatgagaagaagctggcttctgctgccactgagaaattcgaagaggaagataatacctcctattgtcaacagtgatgtgtcaatggagtgtgtatagcatgaaaaaaccaaacatgacagttcaagagagacatttcagaactgcttagtttgtatatcccatgagttatctcctaacatcttttaactgcttcaacattgcatcgaaagcaatataggcatgcctgatgatggagagatagatattttcatcgaagctgtcggtgacatgctatttgagttgcagaaacatttcatattttctattattatatacataggtttttgtatggaggtactgaaagccccctcctgaaatatagtatgattaccaccttctctacaatcctttttttgtttttgttttatttttacgttgaagcaaagaaccataaaatatctgtttggaagggacgagatttgaaggtgatgaggctccttaaagaaggtttaatggaacaaatattagcataaggagtttgctggccatgtcaaaatctctatgggcagattctaactagagacctctaaaggttcaatgagatgaacattcatcaagtcttcgtctagatagaatctcatggtttcaagactgccttcaggttttggatccttggaactcattcgctgcacccagtcactgcctcccagatcctcaacatatggatttccccaattttagtgttgacaatcctcacttctaggaggtccattgtgatatctactttgaagtgcatgccatcaacaatactttgacgccactatttgtggcactaaactttgaaggggttgtagctaactgattgcaatcaattgaactcagggccactcactatttggaaacgtcagcagctaatttggacaacttgcaccttctatctatcttcaacaactaatttcgacaatttctgactttcatttagaacaatcatctactatttcggaattggaagaagagcgcacatccctcctaaacctcatttcttactcgctgtttcgaatcaagaacaaccgttttggacagcttgcagcttctatacagaacaggtacacatattacctgttcaatgccatgttatgcatagaaaagtctatgttttcagatttaattaccctgagatacattattatttctttactacttccacttcgcttgaacccgcataagacgcataactaaaaaaacattccttccttactttttcccaacgcgtggttaaatactattatgaaacctcaacagcaaattcagacatcatgtaacttctattctgaaaaagagtatggttactagaccaaatattatatatttttacaaccatgtgtcacatattactccattactcatgttttgtttaaacaaataactatgcatacctgctcaccacacataaaattaatcactcctcttatcaacggtcatccatcattattgctacaatacgcatggtcatcagatttcctatgtaattaccatactttaacctctatgtacatgtaaatatgtgcttccaataggtgctcaagtacatacgatcgataccatgttgttatgcataagtacatttacacacacatactctatactgattgacatctattgatccccctactattctcttgaacctacacacaatttttaaatgtatcttatattaagatatccttagcgtttgcgttcttcatcaacgtacaaactacaaatctaatttcattcttacttcattttcacatgtttacattctaatttgaatcgacgacaggtcatttgtacatcttgcaacctgtacatactccagatacgctttgtccgataagcacaaatattacctttatagtatgcatcttcaggtttttccactcacgcctcaaattttattccagcctttgtatctcatttcaataagtagctgtgctcagctgcttaccacacatcaaaaaggtaactcctatctatatacctcccagattttacccacttgcaaaatgtttgcttacacgcataatatttactcaacttataatgaaactaacattaaaaaaagtaaatgttatattcagaagatgtactccccatttgtatttgcaaactcaaatgaacatattttacccttatttactgctttgtaaaaggatacgtagactccacaaataaagttcactcatatactcaattagaacataatgaactgacactttatgattacaaccaacatactctcaaatctgattctaaataacatgcttccaaatctgatactgaagaagaaactacaaaggtacaattcgtccaccttattttaaaaattgataaacacaagtacatttgtaaaatgagcgtataaaaatgctccttttcccttttataggaccaaacaacgatcgatggacaactcaaaaggaaaaaaaataatatgccctcaatggaagctcctccaaaaagaattggagcatgcacatacgagtagcagagtagcgacattacattatgggggagaagatctcccataggtggggagctgggaggtacagttgttgatggcgcccacgacgcacaggcccttgacaccatccttgtccttgtagtcccctgacaaaacagaaaaaacgacgcatgatgaccatgagcacaagattgcgtgtcagattcatcttggaacgaggggcgtggtcgcttaccgtcgtagttgtaggtgcagaggaagtaagaagaattcgttaattactgttatagagaataaaatgaagtagatggcttaatctaggctgtcgaatgtcattatcataaggcatatccactatgctgcaagcctggaaccttttattcatgtaaagtaagcatgtgatgtgaactccgtcatgctagcttca
